United States Patent Application Publication US 2024/0271122 A1 - sequence listing, part 3

SEQ ID NO: 3851 - DNA, 1713 bp, Saccharomyces cerevisiae
atgaaagaatcccctctcataacgttggttaaaagacattccgagacacattttgccaatatcaagtatgggtattatgtgttgataatatcattggtctatctcattggattggctcttttgagagctttcggaaggagaaccccatccagatcgtcgtcagctttcaaaaataagataatttatcggttgtatgatatagatcctgcaattcacttaggtatattgttttttgcagtcttgattccattttattaccattactctttgactacccaatctacggtctatctcaaaagattagggaggttgagttacgccttgatcccgctgaacctattcctcactttaaggcctaattggttccttaggaaaaattgcacctacactgattttataccgttccataaatggttttcacgtattatcaccgtgattggtttgcttcatgggattttcttcatcattaagtgggcgatagacgataatgtctctctaaagcaaaaattgattctgaaaactttcaattttgcgggattcataatatcaatattggtactttttttacttatttgctcgattgggccaatgagaagatacaactatcgtttgttttacatcgtacataacctggtgaacgtggccttcatcttactcaccccaatacactctaggccaggtgttaagttcccatttcttctactaaactgtaccctattattcattcatattatcaatagaatagtatttgcgaaatccttgatgattttgaataagaatgcgaattattcaaaaacaaatttagtccatgtaagattgcccagggctattcttccagattattttgaaccagggtcgcatattagaataagcccttacagaagaattaatcccctctattggttgctaccatcgcatccatacacaattgcgtctttggcagaagacaattcaattgatcttattataaaggaaacctctacagccgagccaggtagccagatagagtctcttcgtagtaatccaaaatcctttcatttagatcaagaaaaaacctatactttgattaatagttatcctccctctgtacccgaagaatgttattctcaaggcacgaatatagctattatatgtggtgggtctggtatatcttttgccctaccactatttaggcatttttttaacaaggagaatgtaaaatacttgaaaatgatctggctgataaaagattactctgaatatgaacttgttttggattatctcaagacaaatgggttgacttttgagaaaaaactctcgaataataagaggatttcagtatttattagtggagaatacacggcggaaacacggttagacgaaattacgaccaatatcgacgatgaaaactcagaatatgaaatgggatctttcaacaatgaagacgaagacctttcgatttctaatttcaattcagaaaatgcggacagcaatgacaatacgccagagacaagtcatagccccacaaaagagaatggaagcatgatcgaggtaaaatccaaacacagttttactctttccaacgaattgaagagcttcaacaatgaaagtgcacaagtgaaccaaaatgaaacatggttgttttcatgtggtcctccctcgttattacaattgtctaaaaaatattgtaacgatgaaaggatcaactttgtctgtgagacttacggattatga

SEQ ID NO: 3852 - DNA, 1713 bp, Artificial Sequence
  Description of Artificial Sequence: Synthetic polynucleotide
atgaaagaatcccctctcataacgttggttaaaagacattccgagacacattttgccaatatcaagtatgggtattatgtgttgataatatctttggtctatctcattggattggctcttttgagagctttcggaaggagaaccccatccagatcttcttctgctttcaaaaataagataatttatagattgtatgatatagatcctgcaattcacttaggtatattgttttttgcagtcttgattccattttattaccattactctttgactacccaatctacggtctatctcaaaagattagggaggttgagttacgccttgatcccgttgaacttgttcctcactttaaggcctaattggttccttaggaaaaattgcacctacactgattttataccgttccataaatggttttctcgtattatcaccgtgattggtttgcttcatgggattttcttcatcattaagtgggcgatagacgataatgtctctttgaagcaaaaattgattttgaaaactttcaattttgcgggattcataatatccatattggtactttttttacttatttgctccattgggccaatgagaagatacaactatcgtttgttttacatcgtacataacttggtgaacgtggccttcatcttactcaccccaatacactctaggccaggtgttaagttcccatttcttttattaaactgtaccttattattcattcatattatcaatagaatagtatttgcgaaatccttgatgattttgaataagaatgcgaattattctaaaacaaatttagtccatgtaagattgcccagggctattcttccagattattttgaaccagggtctcatattagaataagcccttacagaagaattaatcccctctattggttgttaccatctcatccatacacaattgcgtctttggcagaagacaattctattgatcttattataaaggaaacctctacagccgagccaggtagccagatagagtctcttcgtagtaatccaaaatcctttcatttagatcaagaaaaaacctatactttgattaatagttatcctccctctgtacccgaagaatgttattctcaaggcacgaatatagctattatatgtggtgggtctggtatatcttttgccttaccattatttaggcatttttttaacaaggagaatgtaaaatacttgaaaatgatctggttgataaaagattactctgaatatgaacttgttttggattatctcaagacaaatgggttgacttttgagaaaaaactctctaataataagaggattagtgtatttattagtggagaatacacggcggaaacaagattagacgaaattacgaccaatatcgacgatgaaaactctgaatatgaaatgggatctttcaacaatgaagacgaagacctttctatttctaatttcaattctgaaaatgcggacagcaatgacaatacgccagagacaagtcatagccccacaaaagagaatggaagcatgatcgaggtaaaatccaaacacagttttactctttccaacgaattgaagagcttcaacaatgaaagtgcacaagtgaaccaaaatgaaacatggttgttttcttgtggtcctccctctttattacaattgtctaaaaaatattgtaacgatgaaaggatcaactttgtctgtgagacttacggattatga

SEQ ID NO: 3853 - DNA, 1113 bp, Saccharomyces cerevisiae
atgaacaattccataattactgatgatgaggttagagagttttacttaaactgctcttctcaaacaattattgaatctcttctcagcttgcacgagtcattgagattatattctcaaaaccatgagatactgctcaataggatgttcaaaaaattggatgaaaccaatgcagactctaacatatcccatatattcatgcctgttgtgagcaaggatttttcaggaataaaaattcttgtgaataacaacaacaaaaattttcaaggtgtgataaatgttattgagcctgaaacaggaaaattaatcggatgttttgaggctaaacaaattaccgctataagaactgcccttgcatcgtgtatcggtttatataagcaactctcatgttcccatgataagttgtttagatttgaaaatggcacttgctatttaacatgttttggtaccggtctccaagcattttggcacatatacatagctattaaactaatcatgtcagggattgttggcgaatctttgaagttagttgaaataaacatactatatcacaataacatgatgagtttggatcgtttgaaatcattgaaaaacttatttggaagtaatataaagatagagcttaatcagtatcaaataaacgacatcagttcagaaggtaatggcgctgtttctaacagtgatattatctttggttgtctacctactctagagcccaacttgtttttgaggcagttgctaaacagtaaagcttctgtggagcagaaacatacttatatctcattaattggaagttacaaaccagtgatgcacgaatgcgataaggagttgattgataagttcaaatctgataatgaaagcgcttgcattttggtagattcaagggaacatactttattggaatctggagaattaatcgattccaatatcgctccacataatctcatcgaaattggtgaattagatactttgaaaaacacagttttgaatttgaacgaaaagggctgcaaaagaactatcaccttgtgtaaaattgttggtctagcggttatggacgtggcgcttgctaaggaattcttaagcttgagaacaaaaaacacagaaaacaaggaataa

SEQ ID NO: 3854 - DNA, 1113 bp, Artificial Sequence
  Description of Artificial Sequence: Synthetic polynucleotide
atgaacaattccataattactgatgatgaggttagagagttttacttaaactgctcttctcaaacaattattgaatctcttctcagcttgcacgagtctttgagattatattctcaaaaccatgagatattactcaataggatgttcaaaaaattggatgaaaccaatgcagactctaacatatcccatatattcatgcctgttgtgagcaaggatttttctggaataaaaattcttgtgaataacaacaacaaaaattttcaaggtgtgataaatgttattgagcctgaaacaggaaaattaatcggatgttttgaggctaaacaaattaccgctataagaactgcccttgcatcttgtatcggtttatataagcaactctcctgttcccatgataagttgtttagatttgaaaatggcacttgctatttaacatgttttggtaccggtctccaagcattttggcacatatacatagctattaaattaatcatgagtgggattgttggcgaatctttgaagttagttgaaataaacatactttatcacaataacatgatgagtttggatcgtttgaaatctttgaaaaacttatttggaagtaatataaagatagagcttaatcagtatcaaataaacgacatcagttctgaaggtaatggcgctgtttctaacagtgatattatctttggttgtttacctactttagagcccaacttgtttttgaggcagttgttgaacagtaaagcttctgtggagcagaaacatacttatatctctttaattggaagttacaaaccagtgatgcacgaatgcgataaggagttgattgataagttcaaatctgataatgaaagcgcttgcattttggtagatagtagggaacatactttattggaatctggagaattaatcgattccaatatcgctccacataatctcatcgaaattggtgaattagatactttgaaaaacacagttttgaatttgaacgaaaagggctgcaaaagaactatcaccttgtgtaaaattgttggtttggcggttatggacgtggcgcttgctaaggaattcttaagcttgagaacaaaaaacacagaaaacaaggaatga

SEQ ID NO: 3855 - DNA, 1539 bp, Saccharomyces cerevisiae
atgtcagtaaacccagaatttatagccgatggcatcgatttttatccaacaacgcccgatgccgcgtatttcaatgccgctgatggtaaaaataaagttaacaggataaatggtaactcagaaaatttacaccactcctttgcatcgggttgccgtagatcatctctttcagtcgactttaatgttacctcgtccgattcagaaaaaagtgaacagagctgcttggaaaacaactctcaagaagacgaatatttttgtgacattttttccactgaattaaaattagatgaaacttctaacaagtcaaccgattattccagttcaaatcaccagtatcctgaacaactggagttgcacaattataaactgctcaataaaattggtgaaggggcattttccagagtatttaaagcagtaggcatcaacacggatgaccaagctcctgttgccatcaaagcaatcataaagaaaggcatttcgagcgatgccatcttaaaagggaatgatagaatccaaggttccagcagaaagaaagtcttaaacgaagttgccatccacaaactggtttcgaaaaataatccgcattgtacaaaatttatcgcattccaggaatcggcgaactactattacttagtgacggagttagtcacaggtggggaaatatttgataggatcgtccaactaacatgctttagtgaagacttagctcgtcatgtcattactcaggtagcaattgcaattaaacatatgcactacatgggtattgtgcatcgtgatgtcaaaccagaaaacctactatttgaacctatcccattttatggccttgatggggacatgcaaaaagaagacgagtttacattaggtgtcggcggaggcggtattggtttagtgaagctaatggacttcggactagccaagaaacttcggaacaataccgcaaaaactccctgcggaacgatagaatacgtcgcatcagaagtattcacctccaaacgatattccatgaaagttgatatgtggagtattggctgcgtactattcacgttattgtgtggatatcctccgttttacgaaaagaacgaaaaaacattattgaagaaaatatcgagaggagattacgaattcttggcgccatggtgggacaacataagttctggcgctaagaacgcagttacccatcttttggaggttgacccaaacaagagatacgatatcgatgacttcctaaatgatccttggttaaattcgtacgattgtttgaaggattcaaactcaaattcttatgccagcgtgcaaagcatactaaatgattcattcgatgagagagcagagaccctacattgtgcattaagctgccaatctgaaaaacaagatgacaccgagttttccagaagtgaaagctcggaatacatatttatgacggaagaagacagaaacctacggggcagttggatcggtgagccaaaagagtgttttaccttagaccttgcaacatcttctatataccgaagaaggaagaacaagatattcttctggtaa

SEQ ID NO: 3856 - DNA, 1539 bp, Artificial Sequence
  Description of Artificial Sequence: Synthetic polynucleotide
atgtctgtaaacccagaatttatagccgatggcatcgatttttatccaacaacgcccgatgccgcgtatttcaatgccgctgatggtaaaaataaagttaacaggataaatggtaactctgaaaatttacaccactcctttgcatctggttgccgtagatcttctctttctgtcgactttaatgttacctcttccgattctgaaaaaagtgaacagagctgcttggaaaacaactctcaagaagacgaatatttttgtgacattttttccactgaattaaaattagatgaaacttctaacaagtctaccgattattccagtagtaatcaccagtatcctgaacaattggagttgcacaattataaattactcaataaaattggtgaaggggcattttccagagtatttaaagcagtaggcatcaacacggatgaccaagctcctgttgccatcaaagcaatcataaagaaaggcatttctagcgatgccatcttaaaagggaatgatagaatccaaggttccagcagaaagaaagtcttaaacgaagttgccatccacaaattggtttccaaaaataatccgcattgtacaaaatttatcgcattccaggaaagtgcgaactactattacttagtgacggagttagtcacaggtggggaaatatttgataggatcgtccaattgacatgctttagtgaagacttagctcgtcatgtcattactcaggtagcaattgcaattaaacatatgcactacatgggtattgtgcatcgtgatgtcaaaccagaaaacttactttttgaacctatcccattttatggccttgatggggacatgcaaaaagaagacgagtttacattaggtgtcggcggaggcggtattggtttagtgaagttgatggacttcggattggccaagaaacttagaaacaataccgcaaaaactccctgcggaacgatagaatacgtcgcatctgaagtattcacctccaaaagatattccatgaaagttgatatgtggagtattggctgcgtattattcacgttattgtgtggatatcctccgttttacgaaaagaacgaaaaaacattattgaagaaaatatctagaggagattacgaattcttggcgccatggtgggacaacataagttctggcgctaagaacgcagttacccatcttttggaggttgacccaaacaagagatacgatatcgatgacttcttgaatgatccttggttaaattcttacgattgtttgaaggattccaacagtaattcttatgccagcgtgcaaagcatattgaatgattctttcgatgagagagcagagaccttacattgtgcattaagctgccaatctgaaaaacaagatgacaccgagttttccagaagtgaaagctctgaatacatatttatgacggaagaagacagaaacttgagaggcagttggatcggtgagccaaaagagtgttttaccttagaccttgcaacatcttctatatacagaagaaggaagaacaagatattcttctggtga

SEQ ID NO: 3857 - DNA, 1044 bp, Saccharomyces cerevisiae
atgactactgataccactgttttcgtttctggcgcaaccggtttcattgctctacacattatgaacgatctgttgaaagctggctatacagtcatcggctcaggtagatctcaagaaaaaaatgatggcttgctcaaaaaatttaataacaatcccaaactatcgatggaaattgtggaagatattgctgctccaaacgcctttgatgaagttttcaaaaaacatggtaaggaaattaagattgtgctacacactgcctccccattccattttgaaactaccaattttgaaaaggatttactaacccctgcagtgaacggtacaaaatctatcttggaagcgattaaaaaatatgctgcagacactgttgaaaaagttattgttacttcgtctactgctgctctggtgacacctacagacatgaacaaaggagatttggtgatcacggaggagagttggaataaggatacatgggacagttgtcaagccaacgccgttgccgcatattgtggctcgaaaaagtttgctgaaaaaactgcttgggaatttcttaaagaaaacaagtctagtgtcaaattcacactatccactatcaatccgggattcgtttttggtcctcaaatgtttgcagattcgctaaaacatggcataaatacctcctcagggatcgtatctgagttaattcattccaaggtaggtggagaattttataattactgtggcccatttattgacgtgcgtgacgtttctaaagcccacctagttgcaattgaaaaaccagaatgtaccggccaaagattagtattgagtgaaggtttattctgctgtcaagaaatcgttgacatcttgaacgaggaattccctcaattaaagggcaagatagctacaggtgaacctgcgaccggtccaagctttttagaaaaaaactcttgcaagtttgacaattctaagacaaaaaaactactgggattccagttttacaatttaaaggattgcatagttgacaccgcggcgcaaatgttagaagttcaaaatgaagcctaa

SEQ ID NO: 3858 - DNA, 1044 bp, Artificial Sequence
  Description of Artificial Sequence: Synthetic polynucleotide
atgactactgataccactgttttcgtttctggcgcaaccggtttcattgctttacacattatgaacgatttattgaaagctggctatacagtcatcggcagtggtagatctcaagaaaaaaatgatggcttgctcaaaaaatttaataacaatcccaaattatctatggaaattgtggaagatattgctgctccaaacgcctttgatgaagttttcaaaaaacatggtaaggaaattaagattgtgttacacactgcctccccattccattttgaaactaccaattttgaaaaggatttattaacccctgcagtgaacggtacaaaatctatcttggaagcgattaaaaaatatgctgcagacactgttgaaaaagttattgttacttcttctactgctgctttggtgacacctacagacatgaacaaaggagatttggtgatcacggaggagagttggaataaggatacatgggacagttgtcaagccaacgccgttgccgcatattgtggctctaaaaagtttgctgaaaaaactgcttgggaatttcttaaagaaaacaagtctagtgtcaaattcacattatccactatcaatccgggattcgtttttggtcctcaaatgtttgcagattctttgaaacatggcataaatacctccagtgggatcgtatctgagttaattcattccaaggtaggtggagaattttataattactgtggcccatttattgacgtgcgtgacgtttctaaagcccacttggttgcaattgaaaaaccagaatgtaccggccaaagattagtattgagtgaaggtttattctgctgtcaagaaatcgttgacatcttgaacgaggaattccctcaattaaagggcaagatagctacaggtgaacctgcgaccggtccaagctttttagaaaaaaactcttgcaagtttgacaattctaagacaaaaaaattattaggattccagttttacaatttaaaggattgcatagttgacaccgcggcgcaaatgttagaagttcaaaatgaagcctga

SEQ ID NO: 3859 - DNA, 3252 bp, Saccharomyces cerevisiae
atgtcatctgaggatatcatttatgatcctcagttcaaacctgttcagggaatctacgagaatagattaagacaatttattgatactggtggggattaccatgacttaaatttacccaagttttatgataagaagcgcatttcattagatcatgatcacgttaaggtttggtggtaccaggtttcttttgaacgtggatcttcccctgtttcccctgataagaggccatcttggaaatctattattgaacgtgacaagaagggtgaattggagtttagagaagcgaacataaatcagccctttggacccagttggtctaccacttggttcaaggtgaaaatctctttgcctgaagattgggttaaatcaaacgagcaactacttttccaatgggattgttctaacgaaggaattgtcatagacccaaagactctaatccctgtgactgctttttcaggtggtgaaaggactgaatatgttttaccgaaaacatcggatgggaaacatttcttttacatcgaagctggtaataatggtatgtttggctgcggtgcaggatccactataaatccaccagatgataatagattttttcatttgagaaaagctgatatcgtttggcccgatctagatgctcgtgcattgtatatcgatttttggatgctaggggatgctgcaagagagctacctggagactcctggcaaaaacaccaggcaagacaactaggcaatgcagttatgaatctttttgacccgaatgatcgttcaagtgttcgtaaatgtcgtgaattactacaaagggaatactttgactcctttttagaaagcagtaaggtttacgaacaaggtgaatctcaagttttaacaaatgtttatggtatcggcaactgtcatatagatacagcttggctatggccattcgcagaaacaagaaggaaaattgtgagatcttggtcttcccaatgtactttaatggatcgcttcccagagtataaatttgttgcttcacaagcccaacaatttaaatggttattagaagatcatcccgaatttttcaataaagtgttaattccaaaaattcagcaatctcagttttttgctgttggtggtacatgggttgagaatgataccaatattccctcaggggaatcgctggcaaggcaattcttttttggtcaaaggtttttcttgaagcattttggtctcaagtcaaagatattttggttacctgacacctttggttattcttcgcaaatgccacaactttgccgcttatctggtattgataaatttttgactcaaaagctttcctggaataacatcaacagttttccgcatagcacgtttaactgggcagggattgacggttctcaattattgactcacatgcctcctggtaatacgtatacagcagattcacacttcggtgatgttttgcgtactgccaagcagaataagacaccagaatattacggctccggtttaatgttgtacggaaagggtgatggtggtggaggaccaactgaggaaatgctgcaaaaaatgaggcgtattagatccatgaataacagaaatggtaatgttattccaaagttacaagttggtataacggttgatgaattttatgatgacattttgaaaaggactaaccaaggccatgatttacccacatggagtggtgaattgtatttcgaatttcatagggggacatacaccagtcaagctcagaccaaaaaattaatgaggttgtccgaaattaaactacatgatttggaatggatagctgccaaaacatcagttttatatcccgattcgtataaatacccttccaaacagattaacgaactttgggagaatgttttgttatgtcaatttcacgatgttctaccaggatcatgtattgaaatggtatataagtatgaggctgtccctatgttgcacaacgttgtgaaagaatgtacttccttaatagacaaaaccgttcaatttcttcagagtcagagtaaggcagatttggttgagatgagaacattaacttggtcaaaaccagaaaaggtttctgaggagtgctcgttgaacggtagttacacgtcctctgtaaccgggtacgatgactatatagtccttgccaatgggaagttgaaagttatcatttgcaaaaagactggggtgatcacaagcattacggatgaaactttgggggtagaatacctggacacggaacatggcagaaacaaattgggcgccaaccagtttgttatttatgatgataaacctttgggctggcaggcttgggatactgaactttattccgtcaaccaatacaagtatgtaacaaagccgaagaaagttcaagtttcctgcaacacaaaagagaaatgtgctgttgaggtcatttttcaaatttccgaaaaatgcaaaatcaaatcagtgatatcactcaatgcaactgcggtcactgatgctaaattaagtaaagtagacatttctacgacggtagaaaactgggatgctagaaacaaatttttaaaagttgaatttcccgttaatattcggaacgattttgcttcgtatgaaactcaattcgggattaccaaaagaccaacacattataatacctcatgggacgtcgctaaatttgaggtttgccatcacaaatttgctgattattctgaatacagcaagggtgtttcaattttgaacgattgcaaatatgggttttccacacacggtaacttgatgagattatcattattaaggtcaccaaaggctccggatgcgcatgctgatatgggtactcatgagataaaatatgctatctatccacatagaggagcactatcaagcgacactgttaagctcgctcacgaattcaattattgcttcaaatacaaactccccaaagatattggcatgaattttgatgacatcataagcatttccggagatgagaatgtcattttgtctaacataaaaagaggcgaagatgatagtgctgtcaagtccaactattcattaaatccaagggatgaacaaagtattgtggtaagggtttacgaatctcttggcggggaatcttttgcttcactaaataccacactaaatttgaagcgtattgagaaggtcgataacttggagatgaaagtttataagagtttgacagcaacgcgagacgaatcaaatcatgcaataaacagaattcccattaaattgagaccttttgagattgcctcattcaggttgtatttctga

SEQ ID NO: 3860 - DNA, 3252 bp, Artificial Sequence
  Description of Artificial Sequence: Synthetic polynucleotide
atgtcttctgaggatatcatttatgatcctcagttcaaacctgttcagggaatctacgagaatagattaagacaatttattgatactggtggggattaccatgacttaaatttacccaagttttatgataagaagcgcatttctttagatcatgatcacgttaaggtttggtggtaccaggtttcttttgaacgtggatcttcccctgtttcccctgataagaggccatcttggaaatctattattgaacgtgacaagaagggtgaattggagtttagagaagcgaacataaatcagccctttggacccagttggtctaccacttggttcaaggtgaaaatctctttgcctgaagattgggttaaaagtaacgagcaattacttttccaatgggattgttctaacgaaggaattgtcatagacccaaagactttgatccctgtgactgctttttctggtggtgaaaggactgaatatgttttaccgaaaacatctgatgggaaacatttcttttacatcgaagctggtaataatggtatgtttggctgcggtgcaggatccactataaatccaccagatgataatagattttttcatttgagaaaagctgatatcgtttggcccgatttggatgctcgtgcattgtatatcgatttttggatgttgggggatgctgcaagagagcttcctggagactcctggcaaaaacaccaggcaagacaattaggcaatgcagttatgaatctttttgacccgaatgatcgttctagtgttcgtaaatgtcgtgaattattacaaagggaatactttgactcctttttagaaagcagtaaggtttacgaacaaggtgaatctcaagttttaacaaatgtttatggtatcggcaactgtcatatagatacagcttggttatggccattcgcagaaacaagaaggaaaattgtgagatcttggtcttcccaatgtactttaatggatcgcttcccagagtataaatttgttgcttctcaagcccaacaatttaaatggttattagaagatcatcccgaatttttcaataaagtgttaattccaaaaattcagcaatctcagttttttgctgttggtggtacatgggttgagaatgataccaatattcccagtggggaatctttggcaaggcaattcttttttggtcaaaggtttttcttgaagcattttggtctcaagtccaagatattttggttacctgacacctttggttattcttctcaaatgccacaactttgccgcttatctggtattgataaatttttgactcaaaagctttcctggaataacatcaacagttttccgcatagcacgtttaactgggcagggattgacggttctcaattattgactcacatgcctcctggtaatacgtatacagcagattctcacttcggtgatgttttgcgtactgccaagcagaataagacaccagaatattacggctccggtttaatgttgtacggaaagggtgatggtggtggaggaccaactgaggaaatgttacaaaaaatgaggcgtattagatccatgaataacagaaatggtaatgttattccaaagttacaagttggtataacggttgatgaattttatgatgacattttgaaaaggactaaccaaggccatgatttacccacatggagtggtgaattgtatttcgaatttcatagggggacatacaccagtcaagctcagaccaaaaaattaatgaggttgtccgaaattaaattgcatgatttggaatggatagctgccaaaacatctgttttatatcccgattcttataaatacccttccaaacagattaacgaactttgggagaatgttttgttatgtcaatttcacgatgttttgccaggatcttgtattgaaatggtatataagtatgaggctgtccctatgttgcacaacgttgtgaaagaatgtacttccttaatagacaaaaccgttcaatttcttcagagtcagagtaaggcagatttggttgagatgagaacattaacttggtccaaaccagaaaaggtttctgaggagtgctctttgaacggtagttacacgtcctctgtaaccgggtacgatgactatatagtccttgccaatgggaagttgaaagttatcatttgcaaaaagactggggtgatcacaagcattacggatgaaactttgggggtagaatacttggacacggaacatggcagaaacaaattgggcgccaaccagtttgttatttatgatgataaacctttgggctggcaggcttgggatactgaactttattccgtcaaccaatacaagtatgtaacaaagccgaagaaagttcaagtttcctgcaacacaaaagagaaatgtgctgttgaggtcatttttcaaatttccgaaaaatgcaaaatcaaatctgtgatatctctcaatgcaactgcggtcactgatgctaaattaagtaaagtagacatttctacgacggtagaaaactgggatgctagaaacaaatttttaaaagttgaatttcccgttaatattagaaacgattttgcttcttatgaaactcaattcgggattaccaaaagaccaacacattataataccagttgggacgtcgctaaatttgaggtttgccatcacaaatttgctgattattctgaatacagcaagggtgtttctattttgaacgattgcaaatatgggttttccacacacggtaacttgatgagattatctttattaaggtctccaaaggctccggatgcgcatgctgatatgggtactcatgagataaaatatgctatctatccacatagaggagcattatccagcgacactgttaagctcgctcacgaattcaattattgcttcaaatacaaactccccaaagatattggcatgaattttgatgacatcataagcatttccggagatgagaatgtcattttgtctaacataaaaagaggcgaagatgatagtgctgtcaagtccaactattctttaaatccaagggatgaacaaagtattgtggtaagggtttacgaatctcttggcggggaatcttttgcttctttgaataccacattaaatttgaagcgtattgagaaggtcgataacttggagatgaaagtttataagagtttgacagcaacgagagacgaaagtaatcatgcaataaacagaattcccattaaattgagaccttttgagattgcctctttcaggttgtatttctga

SEQ ID NO: 3861 - DNA, 1131 bp, Saccharomyces cerevisiae
atgtgtcaagctaccaatggcccgagtagagttgtgactaaaaagcataggaaatttttcgaaagacatctacagttgcttccctcttcacatcagggacatgacgtgaacagaatggcgataatattctactcaatctcaggactctctatatttgatgttaacgtttctgcgaagtacggcgatcatcttggctggatgcgcaaacattatatcaaaacagtgctggatgatacagaaaatactgtgatatctggatttgttggaagcttagtcatgaatatccctcacgcaacaacgattaatctaccaaatactctctttgcattgttgtccatgattatgctgagagattacgagtattttgagactatactagacaaaagaagcctggcgagatttgtttctaagtgccaacgacctgaccgtggctcgtttgtatcttgtttagactataagacaaattgtggatcttcggttgattcagacgatttaaggttttgctacatcgcagttgccattctgtacatatgcggatgccgatccaaagaagactttgatgaatacattgatactgagaagttgcttggctatataatgtcgcaacaatgctacaacggagctttcggtgcccacaatgaaccacactcagggtacacatcttgtgcgctgtctaccttagctttactctctagtttggaaaagctatcagacaagtttaaagaagacaccataacctggctattacataggcaagtatcaagccatggatgtatgaaatttgaaagcgaattgaatgccagctatgatcaatctgatgatggcggtttccagggaagggagaacaagttcgctgatacgtgttacgcattttggtgcttaaattcactacacttactaacaaaggattggaaaatgctatgccaaactgaactagtcacaaattatttgcttgatcgaacgcaaaaaacattaactggaggctttagtaaaaatgacgaagaagatgctgatttatatcacagctgtctagggagcgctgcgttagcattaattgaggggaaatttaatggagaattatgcatacctcaagaaatatttaatgattttagtaaaaggtgctgtttttga

SEQ ID NO: 3862 - DNA, 1131 bp, Artificial Sequence
  Description of Artificial Sequence: Synthetic polynucleotide
atgtgtcaagctaccaatggcccgagtagagttgtgactaaaaagcataggaaatttttcgaaagacatttacagttgcttccctcttctcatcagggacatgacgtgaacagaatggcgataatattctactctatcagtggactctctatatttgatgttaacgtttctgcgaagtacggcgatcatcttggctggatgcgcaaacattatatcaaaacagtgttggatgatacagaaaatactgtgatatctggatttgttggaagcttagtcatgaatatccctcacgcaacaacgattaatttaccaaatactctctttgcattgttgtccatgattatgttgagagattacgagtattttgagactatattggacaaaagaagcttggcgagatttgtttctaagtgccaaagacctgaccgtggctcttttgtatcttgtttagactataagacaaattgtggatcttctgttgattctgacgatttaaggttttgctacatcgcagttgccattttatacatatgcggatgccgttccaaagaagactttgatgaatacattgatactgagaagttgcttggctatataatgtctcaacaatgctacaacggagctttcggtgcccacaatgaaccacactctgggtacacatcttgtgcgctttctaccttagctttactctctagtttggaaaagttaagtgacaagtttaaagaagacaccataacctggttgttacataggcaagtatccagccatggatgtatgaaatttgaaagcgaattgaatgccagctatgatcaatctgatgatggcggtttccagggaagggagaacaagttcgctgatacgtgttacgcattttggtgcttaaattctttacacttattaacaaaggattggaaaatgttgtgccaaactgaattggtcacaaattatttgcttgatagaacgcaaaaaacattaactggaggctttagtaaaaatgacgaagaagatgctgatttatatcacagctgtttagggagcgctgcgttagcattaattgaggggaaatttaatggagaattatgcatacctcaagaaatatttaatgattttagtaaaaggtgctgtttttga

SEQ ID NO: 3863 - DNA, 819 bp, Saccharomyces cerevisiae
atggttaaaacgactgaagtagtaagcgaagtttcaaaggtggcaggtgtaagaccatgggcaggtatattcgttgttgaaattcaagaggatatactcgcggatgagtttacgttcgaggcattaatgagaactttgccattggcgtctcaagccagaatcctcaataaaaaatcgtttcacgatagatgttcaaatctatgcagccagctgctgcagttgtttggctgctctatagtaacgggcttaaattttcaagagctgaaatttgacaagggcagcttcggtaagccattcttagacaacaatcgttttcttccatttagcatgaccatcggtgaacaatatgtagctatgttcctcgtaaaatgtgtaagtacagatgaataccaggatgtcggaattgatatcgcttctccgtgcaattatggcgggagggaagagttggagctatttaaagaagtttttagtgaaagagaatttaacggtttactgaaagcgtctgatccatgcacaatatttacttacttatggtccttgaaggagtcgtatacaaaatttactggaactggccttaacacagacttgtcactaatagattttggcgctatcagcttttttccggctgagggagcttctatgtgcataactctggatgaagttccattgattttccattctcaatggttcaataacgaaattgtcactatctgtatgccaaagtccatcagtgataaaatcaacacgaacagaccaaaattatataatatcagcttatctacgttgattgattatttcatcgaaaatgatggtttataa

SEQ ID NO: 3864 - DNA, 819 bp, Artificial Sequence
  Description of Artificial Sequence: Synthetic polynucleotide
atggttaaaacgactgaagtagtaagcgaagtttccaaggtggcaggtgtaagaccatgggcaggtatattcgttgttgaaattcaagaggatatactcgcggatgagtttacgttcgaggcattaatgagaactttgccattggcgtctcaagccagaatcctcaataaaaaaagttttcacgatagatgttctaatttatgcagccagttattgcagttgtttggctgctctatagtaacgggcttaaattttcaagagttgaaatttgacaagggcagcttcggtaagccattcttagacaacaatcgttttcttccatttagcatgaccatcggtgaacaatatgtagctatgttcctcgtaaaatgtgtaagtacagatgaataccaggatgtcggaattgatatcgcttctccgtgcaattatggcgggagggaagagttggagttatttaaagaagtttttagtgaaagagaatttaacggtttattgaaagcgtctgatccatgcacaatatttacttacttatggtccttgaaggagtcttatacaaaatttactggaactggccttaacacagacttgtccttgatagattttggcgctatcagcttttttccggctgagggagcttctatgtgcataactttagatgaagttccattgattttccattctcaatggttcaataacgaaattgtcactatctgtatgccaaagtccatcagtgataaaatcaacacgaacagaccaaaattatataatatcagcttatctacgttgattgattatttcatcgaaaatgatggtttatga

SEQ ID NO: 3865 - DNA, 1026 bp, Saccharomyces cerevisiae
atgagtgacgtggtcagtaaagatcgtaaggcattgttcgactcagcagtatcctttttaaaggatgagtccattaaagatgctccacttttaaagaaaatcgaatttttaaaatccaaagggttaacagaaaaggagattgaaatagccatgaaagagcccaagaaagacggtatcgtaggcgatgaagtatcgaaaaaaattggtagtactgagaatagagcctcacaggatatgtatctctatgaagcgatgccaccaacgctgccccacagggattggaaggactattttgtgatggctactgccacagctgggctgttgtatggtgcatatgaagtaactagaaggtatgtgataccaaatattttaccagaagcaaaaagcaagttggaaggggacaaaaaagaaattgatgatcagttctccaaaatcgatacagtcctcaatgccatcgaagcggagcaagctgagtttaggaaaaaggaaagcgaaacattaaaggaacttagtgacacgattgctgaactgaaacaggcgcttgtgcagacaacaagaagcagggaaaagatcgaagacgagtttagaatagttaaactcgaggtggtcaatatgcaaaatacgatcgacaaatttgtttcagataatgacggcatgcaagagttaaataatatccaaaaagaaatggaatctctgaaaagcttaatgaataaccgtatggaatccggtaatgcgcaggacaacagattattttccatatctcctaatggtatacctggcatagatacgattccatctgcgtctgagattcttgccaaaatgggcatgcaagaagaaagtgataaagaaaaggaaaacggcagcgatgctaataaagatgacaatgctgttccagcgtggaaaaaagcaagagaacaaactattgatagcaacgcctccattccagaatggcaaaaaaataccgccgccaatgagatcagtgtccctgactggcaaaatggacaggtcgaagactccatcccatag

SEQ ID NO: 3866 - DNA, 1026 bp, Artificial Sequence
  Description of Artificial Sequence: Synthetic polynucleotide
atgagtgacgtggtcagtaaagatcgtaaggcattgttcgactctgcagtatcctttttaaaggatgagtccattaaagatgctccacttttaaagaaaatcgaatttttaaaatccaaagggttaacagaaaaggagattgaaatagccatgaaagagcccaagaaagacggtatcgtaggcgatgaagtatccaaaaaaattggtagtactgagaatagagcctctcaggatatgtatctctatgaagcgatgccaccaacgttaccccacagggattggaaggactattttgtgatggctactgccacagctgggttattgtatggtgcatatgaagtaactagaaggtatgtgataccaaatattttaccagaagcaaaaagcaagttggaaggggacaaaaaagaaattgatgatcagttctccaaaatcgatacagtcctcaatgccatcgaagcggagcaagctgagtttaggaaaaaggaaagcgaaacattaaaggaacttagtgacacgattgctgaattgaaacaggcgcttgtgcagacaacaagaagcagggaaaagatcgaagacgagtttagaatagttaaactcgaggtggtcaatatgcaaaatacgatcgacaaatttgtttctgataatgacggcatgcaagagttaaataatatccaaaaagaaatggaatctttgaaaagcttaatgaataaccgtatggaatccggtaatgcgcaggacaacagattattttccatatctcctaatggtatacctggcatagatacgattccatctgcgtctgagattcttgccaaaatgggcatgcaagaagaaagtgataaagaaaaggaaaacggcagcgatgctaataaagatgacaatgctgttccagcgtggaaaaaagcaagagaacaaactattgatagcaacgcctccattccagaatggcaaaaaaataccgccgccaatgagatcagtgtccctgactggcaaaatggacaggtcgaagactccatcccatga

SEQ ID NO: 3867 - DNA, 3399 bp, Saccharomyces cerevisiae
atggaaaaagaatcagtatacaacttagcactaaaatgtgctgagcggcaattgacctccatggaattttcgaacctttacaaggaattctttaatgaaaagttcccgtctttgattcaagaggaagaagaagatacaacaacaactgcaaatataaatgaggtcaagaaagcgtccgatttggtggatacacccagcaacaacacggctgctactgcagatactacacacttacacgaggctctagatattgtttgctccgattttgttaaaatattaaacctggagaagcctcttatcttggcagattatatcgttgaggtattgcttgtgaactacaactcagatatgataaaatgctttctgcctaaattgaattccgttaggaactccttgctattggcccattttttctccaaatcttgttcattctttgccaaattatcagatactttgataattgatcaagtacgcaaggatttgggcaacgtcatagtaccgaatatcttaagtctagacatgaatagtatgaataaagaattgattgccatagtatcaaagcttttgcaaacaactttaaaactctctccttcaccaattcttttaacttctgccggctgtaaaaatgggtcttttacgctactaaatcagttgtctcaaaccaacaagttactttttaaaagggtttctcagacttttgaagcaaaattacatttcaaagataccaagccatttttaaacaaagattccactaacgaattcgtaggttctccttcattaacctcccctcaatatatcccaagtccactttcttcaacaaaacctccaggatcagtcaattctgctgccaaatacaaagacatgaagcttcttcgttactataaaaacatttggctgaacaataaaattatcaattgggaaatatcgaacccagacttcctatcaaaatattctgcgattacttcttctatatttcaagagagctttaattcagttcaaaacttggaccagttactcacagacttgattgagacatcgtttacttgttttgctcaattcgttagcaataagcaatatcatcaggcaaattctaatttgactctgttagaaagaaagtgggtcatatttataacaaaacatctaccattattaatcctggaaaactcttcaagaagtcctcgtgtagtcacgaatgctctggataatattgacgaaaaagtcgttaaagcaatcagaatatacttcaccgaaaaagatgataacaaaaccaataatgaagatctatttgatgattatccatctacaagcttggatataagacacgattttatcaaagggttgattatgttaaatttacagcctgcgtccgttatcaacaattacttaagagaggaccaaatgatcgacaccagtattttacctacccgtgatgatttgtttgttcgtaatttgcaaggcattcaagaagtcgtccataataccaacagtttcatcatttcatccttagatactttagagttagaatcgataaccgaatcgatcacacatgattcgagtaacggactatttcaagtattacacaattttgaatctgtagctccgacaaaacaacgtgagatagtaaaagcctttttatctatatttgaagatgcaataaaagaattgaattataatagaatagccaagatatgtgctcttttgtttttcaacttttcacattcattgaccacaattctatcattttcttcgccagcagcactaatgaaaacattgataaaattcgttgatttgtctagaaatggcagaaatggctcaaacggtaatgatgaaagttcagaatatgaaacgataaatatatctttgtcattttcttgggcaattttactgataatcaacctaacacaaacatatggcatatctgtggtggatgtggcacttaagtatcctgaattgagcataaaaaattcctttataatcaatttcatttcaaatctacctaatgtctcagataagtactatttggaagaatcaaatgtgaatgattcagatatgctaacaaagtctcataataccgttcaaagctggctttgtgatctttttgttaatgggtccataacagatcaattgatccaaaatattgaaacaaggcaattggctaatctcataccatttattgttaaacaggttttgctatctgttgaaataggcgttttaacggatatttcaagtctgataggtggcttcgaatatttcttacaacctttactattagttgggctaatcaaaactttttattggctagaacaatttctttcttgcgtcaagaacgacacaatatctgaagatattttacaagggatattcaatttattgaatacacttttcaacccagtaactcttaacgaggattcgaaagcgttccacacggctgtactgaggttgaatgcaattccactactcaaagttctccgcaaatttagagttcagagccagtcaaattatggtatctactcttctgatgcccaaggtgatcctaacttagaacctttgatagccaaattagttgccgttcttaatgtatcacccgtttatgacgtcgatccaagaattatcaattcagagaacgattattctagaaagcagttgggttacggtaaattcctaattttgaacgaaaacccgattaacaagataatgacgaaccaaattaactcattctggagtctccacagcagcacatattataacttagattatctatttgagttaattgaattggttaccccaaaaagtttcctttttgatgttttgaaaacattagaatataaactagccacttatggggtccctggttctgaaaataagaggggatcattggattcagagcatgttttcgattatttcttctactttcttgtactatatgatgtgaaaaccgcggaggaagccagtcaactaatagaatatatggagaacgacgcaaaaaaaagtaagggggacgttgatataaagggagaagacttacatgagaaaaatgactcagctgaggtgaggcaagaaactcaaccaaaagctgaagctacccaagacgatgatttcgatatgctttttggcgagaatgatacaagcactcaagcttacgaagaagaagaagagaatgaggataacgacggcaataatagaacaaacaatgtaccaatgataaaagcagaagaaactcctagtaaaactaataagatatccattttaaagagacattcgtttgcggtacttctgcatgaaagaaaattattgaatgatttagctttggaaaacggcgaaataaccaagacagaaaatgagaaatttatcagttatcacgataagtacttgtgtatgctgaaaacatgcgtattctga

SEQ ID NO: 3868 - DNA, 3399 bp, Artificial Sequence
  Description of Artificial Sequence: Synthetic polynucleotide
atggaaaaagaaagtgtatacaacttagcattgaaatgtgctgagagacaattgacctccatggaattttccaacctttacaaggaattctttaatgaaaagttcccgtctttgattcaagaggaagaagaagatacaacaacaactgcaaatataaatgaggtcaagaaagcgtccgatttggtggatacacccagcaacaacacggctgctactgcagatactacacacttacacgaggctttagatattgtttgctccgattttgttaaaatattaaacttggagaagcctcttatcttggcagattatatcgttgaggtattgcttgtgaactacaacagtgatatgataaaatgctttttacctaaattgaattccgttaggaactccttgttgttggcccattttttctccaaatcttgttctttctttgccaaattaagtgatactttgataattgatcaagtacgcaaggatttgggcaacgtcatagtaccgaatatcttaagtttggacatgaatagtatgaataaagaattgattgccatagtatccaagcttttgcaaacaactttaaaactctctccttctccaattcttttaacttctgccggctgtaaaaatgggtcttttacgttattgaatcagttgtctcaaaccaacaagttactttttaaaagggtttctcagacttttgaagcaaaattacatttcaaagataccaagccatttttaaacaaagattccactaacgaattcgtaggttctccttctttaacctcccctcaatatatcccaagtccactttcttctacaaaacctccaggatctgtcaattctgctgccaaatacaaagacatgaagcttcttcgttactataaaaacatttggttgaacaataaaattatcaattgggaaataagcaacccagacttcttatccaaatattctgcgattacttcttctatatttcaagagagctttaattctgttcaaaacttggaccagttactcacagacttgattgagacatcttttacttgttttgctcaattcgttagcaataagcaatatcatcaggcaaattctaatttgactttattagaaagaaagtgggtcatatttataacaaaacatttaccattattaatcttggaaaactcttctagaagtcctcgtgtagtcacgaatgctttagataatattgacgaaaaagtcgttaaagcaatcagaatatacttcaccgaaaaagatgataacaaaaccaataatgaagatttatttgatgattatccatctacaagcttggatataagacacgattttatcaaagggttgattatgttaaatttacagcctgcgtccgttatcaacaattacttaagagaggaccaaatgatcgacaccagtattttacctacccgtgatgatttgtttgttcgtaatttgcaaggcattcaagaagtcgtccataataccaacagtttcatcatttcttccttagatactttagagttagaaagtataaccgaaagtatcacacatgattctagtaacggattatttcaagtattacacaattttgaatctgtagctccgacaaaacaacgtgagatagtaaaagcctttttatctatatttgaagatgcaataaaagaattgaattataatagaatagccaagatatgtgctcttttgtttttcaacttttctcattctttgaccacaattttatctttttcttctccagcagcattaatgaaaacattgataaaattcgttgatttgtctagaaatggcagaaatggctctaacggtaatgatgaaagttctgaatatgaaacgataaatatatctttgagtttttcttgggcaattttattgataatcaacttaacacaaacatatggcatatctgtggtggatgtggcacttaagtatcctgaattgagcataaaaaattcctttataatcaatttcatttctaatttacctaatgtctctgataagtactatttggaagaaagtaatgtgaatgattctgatatgttaacaaagtctcataataccgttcaaagctggctttgtgatctttttgttaatgggtccataacagatcaattgatccaaaatattgaaacaaggcaattggctaatctcataccatttattgttaaacaggttttgttatctgttgaaataggcgttttaacggatatttccagtttgataggtggcttcgaatatttcttacaacctttattattagttgggttgatcaaaactttttattggttagaacaatttctttcttgcgtcaagaacgacacaatatctgaagatattttacaagggatattcaatttattgaatacacttttcaacccagtaactcttaacgaggattctaaagcgttccacacggctgtattgaggttgaatgcaattccattgctcaaagttctccgcaaatttagagttcagagccagtctaattatggtatctactcttctgatgcccaaggtgatcctaacttagaacctttgatagccaaattagttgccgttcttaatgtatctcccgtttatgacgtcgatccaagaattatcaattctgagaacgattattctagaaagcagttgggttacggtaaattcttgattttgaacgaaaacccgattaacaagataatgacgaaccaaattaactctttctggagtctccacagcagcacatattataacttagattatttatttgagttaattgaattggttaccccaaaaagtttcctttttgatgttttgaaaacattagaatataaattggccacttatggggtccctggttctgaaaataagaggggatctttggattctgagcatgttttcgattatttcttctactttcttgtattatatgatgtgaaaaccgcggaggaagccagtcaattgatagaatatatggagaacgacgcaaaaaaaagtaagggggacgttgatataaagggagaagacttacatgagaaaaatgactctgctgaggtgaggcaagaaactcaaccaaaagctgaagctacccaagacgatgatttcgatatgctttttggcgagaatgatacaagcactcaagcttacgaagaagaagaagagaatgaggataacgacggcaataatagaacaaacaatgtaccaatgataaaagcagaagaaactcctagtaaaactaataagatatccattttaaagagacattcttttgcggtacttttacatgaaagaaaattattgaatgatttagctttggaaaacggcgaaataaccaagacagaaaatgagaaatttatcagttatcacgataagtacttgtgtatgttgaaaacatgcgtattctga

SEQ ID NO: 3869 - DNA, 4470 bp, Saccharomyces cerevisiae
atgtcactggcagttctactcaataaggaggacaaggatatatctgatttttcaaagactaccgcaggcaagtctgctaagaagaatagcagagagagagttgccgatgtggcgcccaccagagtgctagataagaaacaagcgtatctatctcaactgaacagtgagttcaaccgtatcaagagaagggattcgatagagcaactttatcaggactggaaatttatcaatctacaagagttcgagttgatatcggaatggaatcaacaatccaaggattggcaatttgataacactaatgattctcaggacctgcattttaaaaaactgtaccgtgatatgagcatgatcaataaagaatgggcggaataccaatcttttaaaaatgcaaatttatcggacataatcaatgaaaaggacgctgacgaggatgaagaagatgatgaagacgagcttgaagatggtgaagaagacatggaagaagatgaggcaagtactggtaggcataccaatgggaagagcatgcgtgggaatggtattcaaaaatcgagaaagaaggatgctgctgctgctgccgctattgggaaagccataaaggatgatcaaactcatgccgatactgttgttactgttaatggagacgaaaacgaggatggcaataacggtgaagacgaagacaacgacaacgacaatgaaaacaacaacgacaacgacaacgacaacgaaaatgaaaatgacaatgacagtgacaatgatgacgaggaagaaaatggagaggaggacgaagaggaagaggaaatcgaggatcttgatgaagaagatttcgccgcctttgaagaacaggatgacaatgacgatgaggactttaatcccgatgtcgagaaaaggagaaagagatcttcctcttcttcttcatccaccaaactatctatgaactcgctgtctttaataacgtccaagaaaataaataaaaatattaccatcaacagtgataggccgaagattgtacgtgaacttatcaaaatgtgcaacaaaaacaagcatcagaagattaagaagaggaggttcaccaattgtattgtcaccgactacaatccaatcgattccaagttgaacatcaaaataactttgaaacagtaccacgtcaaaaggttgaaaaaactgattaacgatgcgaagagagaaagagaaagggaagaggccttgaagaacaacgttggtttggatggtaatgatttggataatgatgaggatggatctgaatcccacaagagaaggaaattaaacaataatactgctaacggtgccgatgatgctaataagagaaaattcaacactagacacgggttgcccacttacggcatgaaaatgaatgctaaggaagcccgtgctatccagaggcattacgacaacacctatacaactatttggaaagacatggctcgtaaggattctacgaaaatgtcaagattggttcagcaaatacaatcaatcagatctacaaattttaggaaaacttcctcactttgtgctagagaagccaagaaatggcaatccaagaacttcaaacaaataaaggacttccaaacgagggccagaagaggtattagggaaatgtccaatttttggaagaagaatgagcgtgaagaaagagatctaaagaagaagatagaaaaggaggctatggaacaggcaaagaaggaagaagaggagaaggaatccaaaagacaagctaaaaagctgaactttttgttaacacagacagaattgtattcgcatttcattggaaggaaaatcaaaactaacgaattggaagggaacaatgtttccagtaatgattctgaaagccagaagaatattgacatttcagctttggctccaaataaaaatgactttcacgccattgactttgataacgaaaatgacgaacaattgagactaagagctgctgaaaatgcttccaatgcactggcagaaacaagagcgaaagcgaaacaatttgatgatcatgccaatgcgcatgaggaagaagaggaggaagatgagttgaacttccaaaacccaacctctttaggtgaaataaccatcgagcaaccaaagattttggcatgtactttgaaagaatatcagctcaagggtttgaattggctagctaacctttacgaccagggtatcaatggtatcttagcagatgaaatggggttaggtaaaactgtgcaatctatttccgttttggctcatctagccgagaaccataatatttgggggccctttttggtggtcacacccgcttctactctgcataactgggtcaatgaaatatccaaatttttgcctcaatttaaaattctgccatactggggtaatgccaatgaccgtaaagttcttaggaaattttgggacaggaaaaatctgaggtataataagaatgcgccattccatgtcatggttacatcctatcaaatggttgtcactgatgctaactatttgcagaaaatgaaatggcaatatatgatactggatgaggcccaagctatcaaatcttcacagtcatctagatggaagaacctgttgagttttcattgtcgtaatagattactattaacgggtactcctatccaaaacagtatgcaggaactatgggcacttttacattttatcatgccttctctttttgattctcacgatgaatttaatgaatggttctctaaggatattgaatctcatgcagaagctaataccaaattaaaccaacagcaattacgtcgtttgcatatgattttgaaaccgttcatgttaaggcgtgtcaaaaagaacgtccaatcagaattgggcgacaagattgaaattgatgtcttatgtgatttaactcaaaggcaggctaaattatatcaggttttgaaatctcaaatctctactaactatgatgccattgagaatgccgctacgaatgattctacttccaattctgcttcaaattctggttctgatcagaacttgattaacgcagtcatgcaattcaggaaagtttgtaaccacccggatctttttgaaagggcagatgtagattctccattttccttcactacttttggtaaaactacctcgatgttaactgcatctgttgctaataacaacagcagcgtaattagcaacagtaatatgaatctctctagcatgagcagtaataatatttccaatgggaaattcactgatttgatttactcttcaaggaatccaataaaatatagcctaccaaggttgatttatgaagatttgattttaccgaattacaacaatgacgtggacatagccaataaactgaagaacgtgaaatttaatattttcaacccatcaactaattatgaactgtgcttatttttatctaaattaacaggtgaaccctcgttgaatgaattttttagagtttctactacacccttactcaagcgagtaatagaacgtacaaatggtccaaaaaatactgacagtttaagttttaaaaccattactcaagagctactcgaggttactagaaatgcaccttccgagggcgtaatggcttcattattgaacgttgaaaaacatgcctatgaacgtgagtatctgaactgtatacaacgtggttatcatcccaatgtttcagctcctccggtcaccattgaagttcttggttctagtcatgttaccaatagcataaataatgaactgtttgacccgttgataagtcaggcattatccgatattccagcaataacgcaatataacatgcacgttaaaaagggaatacctgttgaagattttccaaagacaggactattccctgaaccactaaataaaaatttttcatccaacatatcaatgccatctatggataggttcattaccgaatcagcgaaattaagaaaattggatgaattgttggtaaagttgaaatcagaaggccacagagttttgatatatttccaaatgaccaagatgatggatcttatggaagaatacttgacctatagacaatataatcatattagactggatggttcctcaaagttggaggaccgtcgagatttggtccatgattggcagactaatccagaaatctttgttttcctcctaagtacaagagcaggtggtctaggtatcaacctgaccgcagctgacactgttatattctatgattcagattggaaccctactattgattcacaggctatggatagggcacataggttgggccaaacgaggcaagtcacagtgtacagattacttgttcgtggtaccatcgaagaaagaatgagggatagagcaaagcaaaaagagcaagttcaacaagtcgtcatggaaggtaagactcaggaaaaaaacattaaaaccattgaagtgggtgaaaatgattccgaagtcactcgtgaaggtagcaaaagcataagtcaagatggaattaaggaagcggcaagtgcattggcatga

SEQ ID NO: 3870 - DNA, 4470 bp, Artificial Sequence
  Description of Artificial Sequence: Synthetic polynucleotide
atgtctttggcagttttactcaataaggaggacaaggatatatctgatttttccaagactaccgcaggcaagtctgctaagaagaatagcagagagagagttgccgatgtggcgcccaccagagtgttggataagaaacaagcgtatttatctcaattgaacagtgagttcaaccgtatcaagagaagggattctatagagcaactttatcaggactggaaatttatcaatttacaagagttcgagttgatatctgaatggaatcaacaatccaaggattggcaatttgataacactaatgattctcaggacttgcattttaaaaaactttaccgtgatatgagcatgatcaataaagaatgggcggaataccaatcttttaaaaatgcaaatttaagtgacataatcaatgaaaaggacgctgacgaggatgaagaagatgatgaagacgagcttgaagatggtgaagaagacatggaagaagatgaggcaagtactggtaggcataccaatgggaagagcatgcgtgggaatggtattcaaaaatctagaaagaaggatgctgctgctgctgccgctattgggaaagccataaaggatgatcaaactcatgccgatactgttgttactgttaatggagacgaaaacgaggatggcaataacggtgaagacgaagacaacgacaacgacaatgaaaacaacaacgacaacgacaacgacaacgaaaatgaaaatgacaatgacagtgacaatgatgacgaggaagaaaatggagaggaggacgaagaggaagaggaaatcgaggatcttgatgaagaagatttcgccgcctttgaagaacaggatgacaatgacgatgaggactttaatcccgatgtcgagaaaaggagaaagagatcttcctcttcttcttcttccaccaaattatctatgaactctttatctttaataacgtccaagaaaataaataaaaatattaccatcaacagtgataggccgaagattgtacgtgaacttatcaaaatgtgcaacaaaaacaagcatcagaagattaagaagaggaggttcaccaattgtattgtcaccgactacaatccaatcgattccaagttgaacatcaaaataactttgaaacagtaccacgtcaaaaggttgaaaaaattgattaacgatgcgaagagagaaagagaaagggaagaggccttgaagaacaacgttggtttggatggtaatgatttggataatgatgaggatggatctgaatcccacaagagaaggaaattaaacaataatactgctaacggtgccgatgatgctaataagagaaaattcaacactagacacgggttgcccacttacggcatgaaaatgaatgctaaggaagcccgtgctatccagaggcattacgacaacacctatacaactatttggaaagacatggctcgtaaggattctacgaaaatgagtagattggttcagcaaatacaatccatcagatctacaaattttaggaaaacttcctctctttgtgctagagaagccaagaaatggcaatccaagaacttcaaacaaataaaggacttccaaacgagggccagaagaggtattagggaaatgtccaatttttggaagaagaatgagcgtgaagaaagagatttgaagaagaagatagaaaaggaggctatggaacaggcaaagaaggaagaagaggagaaggaatccaaaagacaagctaaaaagttgaactttttgttaacacagacagaattgtattctcatttcattggaaggaaaatcaaaactaacgaattggaagggaacaatgtttccagtaatgattctgaaagccagaagaatattgacatttctgctttggctccaaataaaaatgactttcacgccattgactttgataacgaaaatgacgaacaattgagattgagagctgctgaaaatgcttccaatgcattggcagaaacaagagcgaaagcgaaacaatttgatgatcatgccaatgcgcatgaggaagaagaggaggaagatgagttgaacttccaaaacccaacctctttaggtgaaataaccatcgagcaaccaaagattttggcatgtactttgaaagaatatcagctcaagggtttgaattggttggctaacctttacgaccagggtatcaatggtatcttagcagatgaaatggggttaggtaaaactgtgcaatctatttccgttttggctcatttggccgagaaccataatatttgggggccctttttggtggtcacacccgcttctactttacataactgggtcaatgaaatatccaaatttttgcctcaatttaaaattttaccatactggggtaatgccaatgaccgtaaagttcttaggaaattttgggacaggaaaaatttaaggtataataagaatgcgccattccatgtcatggttacatcctatcaaatggttgtcactgatgctaactatttgcagaaaatgaaatggcaatatatgatattggatgaggcccaagctatcaaatcttctcagtcttctagatggaagaaccttttgagttttcattgtcgtaatagattattattaacgggtactcctatccaaaacagtatgcaggaattatgggcacttttacattttatcatgccttctctttttgattctcacgatgaatttaatgaatggttctctaaggatattgaatctcatgcagaagctaataccaaattaaaccaacagcaattacgtcgtttgcatatgattttgaaaccgttcatgttaaggcgtgtcaaaaagaacgtccaaagtgaattgggcgacaagattgaaattgatgtcttatgtgatttaactcaaaggcaggctaaattatatcaggttttgaaatctcaaatctctactaactatgatgccattgagaatgccgctacgaatgattctacttccaattctgcttctaattctggttctgatcagaacttgattaacgcagtcatgcaattcaggaaagtttgtaaccacccggatctttttgaaagggcagatgtagattctccattttccttcactacttttggtaaaactacctccatgttaactgcatctgttgctaataacaacagcagcgtaattagcaacagtaatatgaatctctctagcatgagcagtaataatatttccaatgggaaattcactgatttgatttactcttccaggaatccaataaaatatagcttgccaaggttgatttatgaagatttgattttaccgaattacaacaatgacgtggacatagccaataaattgaagaacgtgaaatttaatattttcaacccatctactaattatgaattgtgcttatttttatctaaattaacaggtgaaccctctttgaatgaattttttagagtttctactacacccttactcaagagagtaatagaacgtacaaatggtccaaaaaatactgacagtttaagttttaaaaccattactcaagagttactcgaggttactagaaatgcaccttccgagggcgtaatggcttctttattgaacgttgaaaaacatgcctatgaacgtgagtatttgaactgtatacaacgtggttatcatcccaatgtttctgctcctccggtcaccattgaagttcttggttctagtcatgttaccaatagcataaataatgaattatttgacccgttgataagtcaggcattatccgatattccagcaataacgcaatataacatgcacgttaaaaagggaatacctgttgaagattttccaaagacaggattattccctgaaccattgaataaaaatttttcttccaacatatccatgccatctatggataggttcattaccgaaagtgcgaaattaagaaaattggatgaattgttggtaaagttgaaaagtgaaggccacagagttttgatatatttccaaatgaccaagatgatggatcttatggaagaatacttgacctatagacaatataatcatattagattagatggttcctccaagttggaggaccgtcgtgatttggtccatgattggcagactaatccagaaatctttgttttcctcttgagtacaagagcaggtggtttaggtatcaacttgaccgcagctgacactgttatattctatgattctgattggaaccctactattgattctcaggctatggatagggcacataggttgggccaaacgaggcaagtcacagtgtacagattacttgttcgtggtaccatcgaagaaagaatgagggatagagcaaagcaaaaagagcaagttcaacaagtcgtcatggaaggtaagactcaggaaaaaaacattaaaaccattgaagtgggtgaaaatgattccgaagtcactcgtgaaggtagcaaaagcataagtcaagatggaattaaggaagcggcaagtgcattggcatga

SEQ ID NO: 3871 - DNA, 306 bp, Saccharomyces cerevisiae
atgtctataaatgctcttctatatgtcttaagccttgctttgctaatatggacaggatcggtagttactcttctcttgttacttttcttttgcctcttcctcttgttcttctcactccactttttttgttttacccgtgaacacgtacactatacgctcccacccaaatgccactcacttaaattccaattcgattcgattccgagttcgtcgttgtctttgtctccttttcctttcctttttttcccacgacttcgtgcagttgcatttgcctctcccactctgtcttttttttttcccatttag

SEQ ID NO: 3872 - DNA, 306 bp, Artificial Sequence
  Description of Artificial Sequence: Synthetic polynucleotide
atgtctataaatgctcttttatatgtcttaagccttgctttgttaatatggacaggaagtgtagttactcttctcttgttacttttcttttgcctcttcctcttgttcttctctctccactttttttgttttacccgtgaacacgtacactatacgctcccacccaaatgccactcccttaaattccaattcgattctattccgagttcttctttgtctttgtctccttttcctttcctttttttcccaaggcttcgtgcagttgcatttgcctctcccactttatcttttttttttcccatttga

SEQ ID NO: 3873 - DNA, 1131 bp, Saccharomyces cerevisiae
atgtcaacgtttgggaaactgttccgcgtcaccacatatggtgaatcgcattgtaagtctgtcggttgcattgtcgacggtgttcctccaggaatgtcattaaccgaagctgacattcagccacaattgaccagaagaagaccgggtcaatctaagctatcgacccctagagacgaaaaggatagagtggaaatccagtccggtaccgagttcggcaagactctaggtacacccatcgccatgatgatcaaaaacgaggaccaaagacctcacgactactccgacatggacaagttccctagaccttcccatgcggacttcacgtactcggaaaagtacggtatcaaggcctcctctggtggtggcagagcttctgctagagaaacgattggccgtgtcgcttcaggtgccattgctgagaagttcttagctcagaactctaatgtcgagatcgtagcctttgtgacacaaatcggggaaatcaagatgaacagagactctttcgatcctgaatttcagcatctgttgaacaccatcaccagggaaaaagtggactcaatgggtcctatcagatgtccagacgcctccgttgctggtttgatggtcaaggaaatcgaaaagtacagaggcaacaaggactctatcggtggtgtcgtcacttgtgtcgtgagaaacttgcctaccggtctcggtgagccatgctttgacaagttggaagccatgttggctcatgctatgttgtccattccagcatccaagggtttcgaaattggctcaggttttcagggtgtctctgttccagggtccaagcacaatgacccattttactttgaaaaagaaacaaacagattaagaacaaagaccaacaattcaggtggtgtacaaggtggtatctctaatggtgagaacatctatttctctgtcccattcaagtcagtggccactatctctcaagaacaaaaaaccgccacttacgatggtgaagaaggtatcttagccgctaagggtagacatgaccctgctgtcactccaagagctattcctattgtggaagccatgaccgctctggtgttggctgacgcgcttttgatccaaaaggcaagagatttctccagatccgtggttcattaa

SEQ ID NO: 3874 - DNA, 1131 bp, Artificial Sequence
  Description of Artificial Sequence: Synthetic polynucleotide
atgtctacgtttgggaaattattccgcgtcaccacatatggtgaaagtcattgtaagtctgtcggttgcattgtcgacggtgttcctccaggaatgtctttaaccgaagctgacattcagccacaattgaccagaagaagaccgggtcaatctaagctttctacccctagagacgaaaaggatagagtggaaatccagtccggtaccgagttcggcaagactttaggtacacccatcgccatgatgatcaaaaacgaggaccaaagacctcacgactactccgacatggacaagttccctagaccttcccatgcggacttcacgtactctgaaaagtacggtatcaaggcctcctctggtggtggcagagcttctgctagagaaacgattggccgtgtcgcttctggtgccattgctgagaagttcttagctcagaactctaatgtcgagatcgtagcctttgtgacacaaatcggggaaatcaagatgaacagagactctttcgatcctgaatttcagcatcttttgaacaccatcaccagggaaaaagtggactccatgggtcctatcagatgtccagacgcctccgttgctggtttgatggtcaaggaaatcgaaaagtacagaggcaacaaggactctatcggtggtgtcgtcacttgtgtcgtgagaaacttgcctaccggtctcggtgagccatgctttgacaagttggaagccatgttggctcatgctatgttgtccattccagcatccaagggtttcgaaattggcagtggttttcagggtgtctctgttccagggtccaagcacaatgacccattttactttgaaaaagaaacaaacagattaagaacaaagaccaacaattctggtggtgtacaaggtggtatctctaatggtgagaacatctatttctctgtcccattcaagtctgtggccactatctctcaagaacaaaaaaccgccacttacgatggtgaagaaggtatcttagccgctaagggtagacatgaccctgctgtcactccaagagctattcctattgtggaagccatgaccgctttggtgttggctgacgcgcttttgatccaaaaggcaagagatttctccagatccgtggttcattga

SEQ ID NO: 3875 - DNA, 576 bp, Saccharomyces cerevisiae
atgaaatacatccaaactgaacaacaaatcgaagtcccagaaggtgtcactgtcagcatcaagtccagaatcgtcaaggttgttggtccaagaggtactttgaccaagaacttgaagcacattgatgttaccttcaccaaggtcaacaaccaattgatcaaggttgctgttcacaacggtggcagaaagcacgttgctgctttgagaaccgtcaagtctttggttgacaacatgatcactggtgtcaccaagggttacaagtacaagatgagatacgtctacgcgcatttcccaatcaacgtcaacattgttgaaaaggatggtgccaaattcattgaagtcagaaactttttgggtgacaagaagatcagaaacgttccagttagagatggtgttactatcgaattttccaccaacgttaaggacgaaattgtcttgtcaggtaactctgtcgaagacgtttcccaaaacgctgctgacttgcaacaaatctgtcgtgtcagaaacaaggatatccgtaaatttttggacggtatctacgtttctcacaagggttttattactgaagatttataa

SEQ ID NO: 3876 - DNA, 576 bp, Artificial Sequence
  Description of Artificial Sequence: Synthetic polynucleotide
atgaaatacatccaaactgaacaacaaatcgaagtcccagaaggtgtcactgtcagcatcaagtccagaatcgtcaaggttgttggtccaagaggtactttgaccaagaacttgaagcacattgatgttaccttcaccaaggtcaacaaccaattgatcaaggttgctgttcacaacggtggcagaaagcacgttgctgctttgagaaccgtcaagtctttggttgacaacatgatcactggtgtcaccaagggttacaagtacaagatgagatacgtctacgcgcatttcccaatcaacgtcaacattgttgaaaaggatggtgccaaattcattgaagtcagaaactttttgggtgacaagaagatcagaaacgttccagttagagatggtgttactatcgaattttccaccaacgttaaggacgaaattgtcttgtctggtaactctgtcgaagacgtttcccaaaacgctgctgacttgcaacaaatctgtcgtgtcagaaacaaggatatccgtaaatttttggacggtatctacgtttctcacaagggttttattactgaagatttatga

SEQ ID NO: 3877 - DNA, 936 bp, Saccharomyces cerevisiae
atggaaaaagcttccttgaacattgctcagacaaaggaaataccactgacagataggcgaatggggctccgaggatggaaggcgtgcagtaggccgcatttactaggtcgaatattgcttttcatgagcatactatttattacaagtgcggaattaagtagcgacgtaagctccagagaagtatatatgccgatattcaataataagctgtcgttcaaagtgccgcctattaaacgctcgttgctgctaggagcagccctgtacgaagatttcgaatatagctctaacaacagtgcttctgacggagcgttctgtaccgtgtttaatgcaggcatgaatgacgcgtctagggaggttgtttttgaaatccatgtaatggacgtgttgcaagaagaaacagactccagcaggttcggaggaaccagtcacgagcgtgggaggcaatcactgggcttcagtgtttttaataacaagaatggtgatttgttaagaagcaagaaaaatctagcgagcgggacgtcggtcatcgaagttaatcctgggaactgtaatgagttcttgatatgtttcataaatttagtctatgacggatcgtggagctcgattgatactgaaaaatctgtaacgataaagatgacctacaatgataagctcgatcctgacatgttgttgcatttggtcaatcaaatgacaccgcaggtggtgaaagcattgaataccgtctctgacggccttttccagatagtgagcgataccacacttcttcaaatggaaagtgataggcgagatataaatgaggcgacgtatagttatctgattgtggggtttgtgtcgcttatggtagcacagctgatatccaatattatagttactacctatttgattattaagatcaaaagtaatccttcatctcatatcaaaaagaaaggtttgtaa

SEQ ID NO: 3878 - DNA, 936 bp, Artificial Sequence
  Description of Artificial Sequence: Synthetic polynucleotide
atggaaaaagcttccttgaacattgctcagacaaaggaaataccattaacagataggagaatggggctcagaggatggaaggcgtgcagtaggccgcatttattgggtagaatattgcttttcatgagcatattgtttattacaagtgcggaattaagtagcgacgtaagctccagagaagtatatatgccgatattcaataataagctttctttcaaagtgccgcctattaaacgctctttgttattaggagcagccctttacgaagatttcgaatatagctctaacaacagtgcttctgacggagcgttctgtaccgtgtttaatgcaggcatgaatgacgcgtctagggaggttgtttttgaaatccatgtaatggacgtgttgcaagaagaaacagactccagcaggttcggaggaaccagtcacgagcgtgggaggcaaagtttgggcttcagtgtttttaataacaagaatggtgatttgttaagaagcaagaaaaatttggcgagcgggacgagtgtcatcgaagttaatcctgggaactgtaatgagttcttgatatgtttcataaatttagtctatgacggatcttggagctctattgatactgaaaaatctgtaacgataaagatgacctacaatgataagctcgatcctgacatgttgttgcatttggtcaatcaaatgacaccgcaggtggtgaaagcattgaataccgtctctgacggccttttccagatagtgagcgataccacacttcttcaaatggaaagtgataggagagatataaatgaggcgacgtatagttatttgattgtggggtttgtgtctcttatggtagcacagttgatatccaatattatagttactacctatttgattattaagatcaaaagtaatccttcttctcatatcaaaaagaaaggtttgtga

SEQ ID NO: 3879 - DNA, 2106 bp, Saccharomyces cerevisiae
atgaacggtattgatgatctcctaaatattaacgacagaattaagcaagtgcaaaatgagagaaacgaactggcatcaaaactgcaaaatctaaagcaatcattggccagcaatgacacagaagtagcattatcagaggtgatagcacaagatattattgaagtaggggctagtgttgaggggcttgaacaattaagggcaaaatatggtgatctgcaaatcttgaataaattggaaaaggtagctgtacaacaaacacaaatgcaagctggcgtagacaaactagatagttttgaacgtcagttagatgagttagctgaacaaccgccggatcaattcactctagatgacgtaaaggcgctacactcaaagttgacgagtgtcttcgctacagttcctcaaatcaataatatagattctcagtatgctgcttataacaaacttaaatcaaaggttaccggcaaatataatgacgttattatacagaggttagctactaactggagtaatacgtttgatcagaaattgttagaagcgcaatgggatacgcaaaaatttgcatccacatcagttggtttggttaaatgtctgagagaaaattccaccaaactttatcaattaagtctgctctacttacctttggaggaggaaacacagaatggagatagcgaacgcccactttcacgctcaaacaataaccaagaacctgtgctatggaattttaaatcactagcaaacaatttcaacgttaggtttacgtaccattttcacgccacatcgtcatcctctaagattgagacgtattttcagtttctaaacgattatctagcggaaaacctatacaagtgcatcaacatttttcatgatgactgtaatgggttgacgaagccagttattcatgaacaatttattaattacgtcttacaacccattagggataaagtaagatccaccctatttcaaaacgatttgaaaactttgatcgtcctaatttcccaaatcctggctacagacaaaaatttattgaattcttttcattaccatgggctaggtttggtgtcgttaatttccgatgaagtatgggagaaatggatcaactatgaagttgaaatggccaataggcaattcatcaatataactaaaaatccggaagatttcccaaaatcttctcagaattttgtcaaattaatcaataaaatttacgattatttggaaccgttctacgatttggattttgatctattagtaagatacaaactaatgacttgttcattaatttttatgaacttgacttcatcctacttggattacattttaactgtcgattcattgaatgaaacaagaactaaagagcaggaattgtatcaaactatggcaaaactgcaacatgtcaactttgtgtacagaaaaatcaaatctttgtcttcaaacttcatttttattcaactgaccgatattgttaacagcacagaatctaaaaaatacaattcactgtttcaaaatgtggagaatgactatgaaaaagctatgagtacggatatgcaaaactccattgtacacaggattcaaaaactgttgaaggaaaccctacgaaattacttcaagatttcaacttggtcaacattagagatgtctgtcgacgaaaatatcgggccgtcgtccgtaccaagcgctgagttggtcaattcaattaatgttttgagaagattgatcaacaaattggattcaatggatatcccactagctatttcattaaaggttaagaacgaattgttaaatgttattgttaactattttacggagtcaattctaaagttgaacaaatttaatcaaaacggtttaaatcagtttttacatgattttaaatctttaagcagcattttgagcttaccgtcacatgctaccaattataaatgtatgagtttacacgaactagtaaaaatattaaagctaaagtatgatccaaacaatcagcagtttttaaacccagaatacattaaaacaggtaatttcacatcattgaaagaagcttattccattaagtacttgaaggacacgaagattcaagatgcactctataggattatatatggtaacatattatag

SEQ ID NO: 3880 - DNA, 2106 bp, Artificial Sequence
  Description of Artificial Sequence: Synthetic polynucleotide
atgaacggtattgatgatctcttgaatattaacgacagaattaagcaagtgcaaaatgagagaaacgaattggcatccaaattacaaaatttgaagcaatctttggccagcaatgacacagaagtagcattatctgaggtgatagcacaagatattattgaagtaggggctagtgttgaggggcttgaacaattaagggcaaaatatggtgatttgcaaatcttgaataaattggaaaaggtagctgtacaacaaacacaaatgcaagctggcgtagacaaattggatagttttgaacgtcagttagatgagttagctgaacaaccgccggatcaattcactttagatgacgtaaaggcgttgcactccaagttgacgagtgtcttcgctacagttcctcaaatcaataatatagattctcagtatgctgcttataacaaacttaaatccaaggttaccggcaaatataatgacgttattatacagaggttagctactaactggagtaatacgtttgatcagaaattgttagaagcgcaatgggatacgcaaaaatttgcatccacatctgttggtttggttaaatgtttgagagaaaattccaccaaactttatcaattaagtttactctacttacctttggaggaggaaacacagaatggagatagcgaacgcccactttcccgctctaacaataaccaagaacctgtgttgtggaattttaaatctttggcaaacaatttcaacgttaggtttacgtaccattttcacgccacatcttcttcctctaagattgagacgtattttcagtttttgaacgattatttggcggaaaacctttacaagtgcatcaacatttttcatgatgactgtaatgggttgacgaagccagttattcatgaacaatttattaattacgtcttacaacccattagggataaagtaagatccaccttatttcaaaacgatttgaaaactttgatcgtcttgatttcccaaatcttggctacagacaaaaatttattgaattcttttcattaccatgggttaggtttggtgtctttaatttccgatgaagtatgggagaaatggatcaactatgaagttgaaatggccaataggcaattcatcaatataactaaaaatccggaagatttcccaaaatcttctcagaattttgtcaaattaatcaataaaatttacgattatttggaaccgttctacgatttggattttgatttattagtaagatacaaattaatgacttgttctttaatttttatgaacttgacttcttcctacttggattacattttaactgtcgattctttgaatgaaacaagaactaaagagcaggaattgtatcaaactatggcaaaattacaacatgtcaactttgtgtacagaaaaatcaaatctttgtcttccaacttcatttttattcaattgaccgatattgttaacagcacagaatctaaaaaatacaattctttatttcaaaatgtggagaatgactatgaaaaagctatgagtacggatatgcaaaactccattgtacacaggattcaaaaacttttgaaggaaaccttgagaaattacttcaagatttctacttggtctacattagagatgtctgtcgacgaaaatatcgggccgtcctccgtaccaagcgctgagttggtcaattctattaatgttttgagaagattgatcaacaaattggattctatggatatcccattggctatttctttaaaggttaagaacgaattgttaaatgttattgttaactattttacggagtctattttgaagttgaacaaatttaatcaaaacggtttaaatcagtttttacatgattttaaatctttaagcagcattttgagcttaccgtctcatgctaccaattataaatgtatgagtttacacgaattggtaaaaatattaaagttgaagtatgatccaaacaatcagcagtttttaaacccagaatacattaaaacaggtaatttcacatctttgaaagaagcttattccattaagtacttgaaggacacgaagattcaagatgcactctataggattatatatggtaacatattatga

SEQ ID NO: 3881 - DNA, 2058 bp, Saccharomyces cerevisiae
atgtctctgacaccaactaatgaaatattgtttcattacaagtcttcagtgaaggttggtgaacttgagagatatgtaattacttatcatctttatgacggtgaggaaattccaccagatttgaatttaaattccttgtggttaaaggtgagaaatatgaatccgttatcgtatagagctgcgtacctaatgggtccattcatgctttattgcgatgtaaaaactgcccaatatcatcattcccaaaaaatagttgcttcagttgattaccccaaatttgaaccgaatgtgcaaactcaacaagatttcgtggctgaactttcagtacataacatacgacagaaatacgtatggattgctgatgtgatgagtcaaatattgttcactacaaatacgaacgtcacttacgaagtcactattggaactagtaaagagtcagtagaaaatccgcatgatctgccatctcatctaggttcttatagccctaaacttacagtgaacaggttaactaccttggatttgtggaatcttcccgttcagattaccacaccacagaaaaagaaacatcttgtagttttgacacatggtttacattctaatgtgtcgaccgatctagtgtatattatggaacagatatacaaagcacaaaagaattatccccacgaacaaattgttgtgaaaggttataggggaaatgtctgtcaaactgagaagggagttaagtatttaggtactcgtttggccgaatatattatccaggatttgtacgatgaatccatccgcaagatttcttttgtaggtcattcattgggtggcctaatccaggctttcgcaatagcgtacatttatgaagtctacccttggttttttaaaaaggtgaatccaataaattttattactttagcttcaccgcttttaggtatagtcacagataatcccgcctatattaaagtactactttcattcggggttattggaaaaacaggtcaagacttgggtttggaaaatgatgttgaagtaggcaaaccgcttctctacttgctatctggtctgcccttgatagagattttgcgtaggttcaaaaggaggacagtatatgcgaacgctattaatgacggaattgtcccattgtataccgcatcgctattgttcctagactataatgatatcttggagcaattacagaaactaaaggagaacagcaaaaaatcaccgctaataaatgatgcttcaacacctgtgaatcaagatttcttcaataaaactttcatttcgcctctgactaaaatgttgagtatactggcgccacaaaagtttcctacggagaatggttccgaaattcctaaagtatcatttttcgagtcagcaagctcaattctccttcctcctttacctgaaagagcgtacataatggatccagattcaagagatcctgtaattattcatgataagatatacaatgaggatgacattccacaatccgaatttgatatcgaagacggtttttttggtaaaaagaatatactccttcaggctttttttgcaggaaagaaagaacgtgcgaagtatcgaaatttggaagaaacgattgctcgaaggtggcatgaaggaatggcatggagaaaggttgtcgttgctttaaaacctgacgctcacaacaacattatagtccgaagaaagtttgccaacgcatacggttggcccgttatcgatcatctgatagatgtccacttcaatggtgatgacgatgacgataacgatgaaaatgacgatatcaattccacacaagttgttgaacctattcagagcgtaaccgaaggaaagaaaaagtataggaaagctgaaaacattcctcaagaatatggatggttgaataaggttgaaacaaacggagtctttgacgaaggtcctacgggaatgatatcaactgttggtgaaatagtcgaggcgttagctaaaagaggatttagcgccgtaatcgacaggagaaatgcctcggaagatccgaatgatgaggtccttcggtttgaagaaatgaatagtgatttggtacaatga

SEQ ID NO: 3882 - DNA, 2058 bp, Artificial Sequence
  Description of Artificial Sequence: Synthetic polynucleotide
atgtctttaacaccaactaatgaaatattgtttcattacaagtcttctgtgaaggttggtgaacttgagagatatgtaattacttatcatctttatgacggtgaggaaattccaccagatttgaatttaaattccttgtggttaaaggtgagaaatatgaatccgttatcttatagagctgcgtacttgatgggtccattcatgctttattgcgatgtaaaaactgcccaatatcatcattcccaaaaaatagttgcttctgttgattaccccaaatttgaaccgaatgtgcaaactcaacaagatttcgtggctgaactttctgtacataacataagacagaaatacgtatggattgctgatgtgatgagtcaaatattgttcactacaaatacgaacgtcacttacgaagtcactattggaactagtaaagagagtgtagaaaatccgcatgatttaccatctcatttaggttcttatagccctaaacttacagtgaacaggttaactaccttggatttgtggaatcttcccgttcagattaccacaccacagaaaaagaaacatcttgtagttttgacacatggtttacattctaatgtgtctaccgatttggtgtatattatggaacagatatacaaagcacaaaagaattatccccacgaacaaattgttgtgaaaggttataggggaaatgtctgtcaaactgagaagggagttaagtatttaggtactcgtttggccgaatatattatccaggatttgtacgatgaatccatccgcaagatttcttttgtaggtcattctttgggtggcttaatccaggctttcgcaatagcgtacatttatgaagtctacccttggttttttaaaaaggtgaatccaataaattttattactttagcttctccgcttttaggtatagtcacagataatcccgcctatattaaagtattgctttctttcggggttattggaaaaacaggtcaagacttgggtttggaaaatgatgttgaagtaggcaaaccgcttctctacttgttatctggtttgcccttgatagagattttgcgtaggttcaaaaggaggacagtatatgcgaacgctattaatgacggaattgtcccattgtataccgcatctttgttgttcttggactataatgatatcttggagcaattacagaaattgaaggagaacagcaaaaaatctccgttgataaatgatgcttctacacctgtgaatcaagatttcttcaataaaactttcatttctcctttaactaaaatgttgagtatattggcgccacaaaagtttcctacggagaatggttccgaaattcctaaagtatcctttttcgagtctgcaagctctattctccttcctcctttacctgaaagagcgtacataatggatccagattccagagatcctgtaattattcatgataagatatacaatgaggatgacattccacaatccgaatttgatatcgaagacggtttttttggtaaaaagaatatactccttcaggctttttttgcaggaaagaaagaacgtgcgaagtatagaaatttggaagaaacgattgctagaaggtggcatgaaggaatggcatggagaaaggttgtcgttgctttaaaacctgacgctcacaacaacattatagtcagaagaaagtttgccaacgcatacggttggcccgttatcgatcatttgatagatgtccacttcaatggtgatgacgatgacgataacgatgaaaatgacgatatcaattccacacaagttgttgaacctattcagagcgtaaccgaaggaaagaaaaagtataggaaagctgaaaacattcctcaagaatatggatggttgaataaggttgaaacaaacggagtctttgacgaaggtcctacgggaatgatatctactgttggtgaaatagtcgaggcgttagctaaaagaggatttagcgccgtaatcgacaggagaaatgccagtgaagatccgaatgatgaggtccttagatttgaagaaatgaatagtgatttggtacaatga

SEQ ID NO: 3883 - DNA, 1242 bp, Saccharomyces cerevisiae
atgtggctttcaaagttccagttcccctcgaggtccatctttaagggtgtttttttgggtcacaagttgccgttactagtgcgactgacatcaacaacgactaactctaagagcaacggcagcatcccaacacaatacacagaactctctccgttacttgttaagcaagcggaaaagtatgaagctgaactaaaagatcttgacaaagacctttcttgcggcattcattttgacgtgaataagcagaaacattatgctaaattatcagcgctcactgatacatttattgagtataaggaaaaactaaatgaattgaaaagtttacaagaaatgattgtatctgatccatcattaagggcggaggctgaacaagaatatgcagaactggtcccccaatatgaaacgacctcctcaagattggtaaataaacttcttccaccgcatccgttcgcagataaacctagcttactagagcttcgaccgggtgtaggtggcattgaagccatgatttttacccagaatctattggatatgtatattggctatgccaactatagaaaatggaagtatcgaattatatcgaaaaatgaaaacgaaagtgggtcaggcattatcgatgccattctgagcattgaagaagccggatcttacgatcgtttgaggtttgaagcaggcgttcacagggtgcagagaattcctagtacggagactaaaggaaggacgcacacatccactgctgccgtggttgtgttacctcaaattggtgacgaatctgctaaatctattgacgcttatgaaagaacatttaaacctggtgaaatcagagttgacatcatgcgtgcaagcgggaaaggtggtcaacatgtgaatacgacagactctgctgtcagattaacccatatcccctctggaattgttgtttccatgcaagatgaaagatctcaacacaagaataaggctaaagcatttacgatcttaagagcgagacttgcagagaaggaaaggctggaaaaggaggaaaaagaaagaaaagcaagaaagagtcaggtttctagcaccaataggtctgataaaattagaacatacaattttccacagaacagaatcactgatcataggtgcgggttcacattgttggacctgccaggtgtgttatctggagaacgattggacgaagttattgaggcaatgtctaaatatgatagcaccgaacgggcaaaagaattattggagagtaactga

SEQ ID NO: 3884 - DNA, 1242 bp, Artificial Sequence
  Description of Artificial Sequence: Synthetic polynucleotide
atgtggctttccaagttccagttcccctctaggtccatctttaagggtgtttttttgggtcacaagttgccgttattggtgagattgacatctacaacgactaactctaagagcaacggcagcatcccaacacaatacacagaactctctccgttacttgttaagcaagcggaaaagtatgaagctgaattgaaagatcttgacaaagacctttcttgcggcattcattttgacgtgaataagcagaaacattatgctaaattatctgcgctcactgatacatttattgagtataaggaaaaattgaatgaattgaaaagtttacaagaaatgattgtatctgatccatctttaagggcggaggctgaacaagaatatgcagaattggtcccccaatatgaaacgacctccagcagattggtaaataaacttcttccaccgcatccgttcgcagataaacctagcttattggagcttagaccgggtgtaggtggcattgaagccatgatttttacccagaatttattggatatgtatattggctatgccaactatagaaaatggaagtatagaattatatccaaaaatgaaaacgaaagtgggtctggcattatcgatgccattttgagcattgaagaagccggatcttacgatcgtttgaggtttgaagcaggcgttcacagggtgcagagaattcctagtacggagactaaaggaaggacgcacacatccactgctgccgtggttgtgttacctcaaattggtgacgaatctgctaaatctattgacgcttatgaaagaacatttaaacctggtgaaatcagagttgacatcatgcgtgcaagcgggaaaggtggtcaacatgtgaatacgacagactctgctgtcagattaacccatatcccctctggaattgttgtttccatgcaagatgaaagatctcaacacaagaataaggctaaagcatttacgatcttaagagcgagacttgcagagaaggaaaggttagaaaaggaggaaaaagaaagaaaagcaagaaagagtcaggtttctagcaccaataggtctgataaaattagaacatacaattttccacagaacagaatcactgatcataggtgcgggttcacattgttggacttaccaggtgtgttatctggagaaagattggacgaagttattgaggcaatgtctaaatatgatagcaccgaaagagcaaaagaattattggagagtaactga

SEQ ID NO: 3885 - DNA, 1851 bp, Saccharomyces cerevisiae
atggctcacgaggttcatagaataaaacctaaactaggacggacccaaatattttgggtttttctagcctttagagtactgaatgcagttctgacgagaaccttctttcaggctgatgagttttggcaagcattggagccggcacattggaaggctttcaagtatggtgaactgacttgggaatggaaattcggagttcgtagctatttatttccgatgatttttgagctgacttatagattggtttctctatcgtcaatccttcttcactatgcacttcttcttctctcaacgatagggtctgatttattaattttactactgccgaaatatgagttaagttggcaagtcgctgaagacttgaagaggcttccttttgatgtcacacggtcgttcgaatattatggtgtgatatatgcgccaaaaatagttatggcagtactagcttccataggggaatattatatcgtaagatttgttcaaaagctctatttacttacacttgataagagaaacgagaaggaggaagaggagagacgcagcggtttatccgagattacgaagtttgcactgcttttaagtttaactaatttttttaattgcttttttattacaagaacgttcatcaactcttttgaaatgattttaacttctattgccctctactactgggactggacaggcggacaaatgataaaagagtcatcttttactaagtcgcttatttttgcatttctggcatgtttgcaaagacccagcagtggacttatttgggtaattcccagcatttccctaatattaaacttggtaggcaaaaagcagtatcatttacttttcatcacattttccaaagttttacggtctttttttctggtatttactgcaaatgcaattatcgacatgtatttttatgaaaaagtaacgtttccctttttccgatttctaaaattcaatttcacaacaccattatcaaagttttatggggtagctccttggcattttcatttctttcaaagcttacctatcgtattaggtgcaagtattcccgcttttgcatttggattattttttccactaagcaaaaggagtttcccaaagaagtatttaaacccgtttttccaagtgaaactcactatcttgttgaatctgttggtgtactctacgttacctcataaggaatttaggttcatcttcccattacagccacttttcatattaatatcatcatttggccttttgagacttgatagagattattggaaaagactatctggcctaaaatctttactctggcttgttccattcgtgtcggtgttcatcgcattacttttggacacattccacgaatctggatctatcgaagttatgaaatttttacatgaagagccagaaatagatagtttgggattcataatgccctgtcattcgacacctggtcaaagctatttacaccgcagtgacattcaagatctgtggtcgattacttgtaaccctccattgcatttacttggagacccagaggcttactccaaactagagacctacatggatgaaagtgaccatttgtatgacgatatatcggcattcatttacaaaaatttcccaccgccttttcgtaaggatctaaggagtccaggtaaaacatacagccacgaatggccaacatatttggttgttttcgagcacatggaaaacgcatttctaaaggatttcctgaaagattcatcatacattgaatacaatagattcttcaactctcttgcgcactgggattcaagaagatcaggagacataataatttattataaattaccattcgattatagcgatattccagcggcagatatttaa

SEQ ID NO: 3886 - DNA, 1851 bp, Artificial Sequence
  Description of Artificial Sequence: Synthetic polynucleotide
atggctcacgaggttcatagaataaaacctaaattaggaagaacccaaatattttgggtttttttggcctttagagtattgaatgcagttttgacgagaaccttctttcaggctgatgagttttggcaagcattggagccggcacattggaaggctttcaagtatggtgaattgacttgggaatggaaattcggagttcgtagctatttatttccgatgatttttgagttaacttatagattggtttctttatcttctatccttcttcactatgcacttcttcttctctccacgatagggtctgatttattaattttattattaccgaaatatgagttaagttggcaagtcgctgaagacttgaagaggcttccttttgatgtcacaagatctttcgaatattatggtgtgatatatgcgccaaaaatagttatggcagtattggcttccataggggaatattatatcgtaagatttgttcaaaagctctatttacttacacttgataagagaaacgagaaggaggaagaggagagacgcagcggtttatccgagattacgaagtttgcattacttttaagtttaactaatttttttaattgcttttttattacaagaacgttcatcaactcttttgaaatgattttaacttctattgccctctactactgggactggacaggcggacaaatgataaaagagtcttcttttactaagtctcttatttttgcatttttggcatgtttgcaaagacccagcagtggacttatttgggtaattcccagcatttccttgatattaaacttggtaggcaaaaagcagtatcatttacttttcatcacattttccaaagttttaagatctttttttttggtatttactgcaaatgcaattatcgacatgtatttttatgaaaaagtaacgtttccctttttcagatttttgaaattcaatttcacaacaccattatccaagttttatggggtagctccttggcattttcatttctttcaaagcttacctatcgtattaggtgcaagtattcccgcttttgcatttggattattttttccattaagcaaaaggagtttcccaaagaagtatttaaacccgtttttccaagtgaaactcactatcttgttgaatttattggtgtactctacgttacctcataaggaatttaggttcatcttcccattacagccacttttcatattaatatcttcttttggccttttgagacttgatagagattattggaaaagattatctggcttgaaatctttactctggcttgttccattcgtgtctgtgttcatcgcattacttttggacacattccacgaatctggatctatcgaagttatgaaatttttacatgaagagccagaaatagatagtttgggattcataatgccctgtcattctacacctggtcaaagctatttacaccgcagtgacattcaagatttatggtctattacttgtaaccctccattgcatttacttggagacccagaggcttactccaaattagagacctacatggatgaaagtgaccatttgtatgacgatatatctgcattcatttacaaaaatttcccaccgccttttcgtaaggatttaaggagtccaggtaaaacatacagccacgaatggccaacatatttggttgttttcgagcacatggaaaacgcatttttgaaggatttcttgaaagattcttcctacattgaatacaatagattcttcaactctcttgcgcactgggattccagaagatctggagacataataatttattataaattaccattcgattatagcgatattccagcggcagatatttga

SEQ ID NO: 3887 - DNA, 2733 bp, Saccharomyces cerevisiae
atgttaaacttcaccggtcaaacaaggagaagaaatgtcaatttagggaataggactcgaaattcaaagaaggatttactggaaaaggccaaaagggaacgtgaaaggagagcacaagataagctcaaagaagacgccagtaaaaccattcaaaaaagcatcagaagacatttttcaaatgtgagactcttcaaaaacacatttactagttcgcaacttgttcatatgataccagcttacgggggcaaattaatctattacatttctcaatatgatctgcagcaactgctaaaattatctcataattttttgagttcttatcctaattctttaggcaacagacagctattgagcttgttgaagctatatcaagatgatgcactggtggctgaaactctaagcgatcttaacatggactgccctacagttgacgaatttttagatagtctatccgtttatctctgtcgggcttcctttttgagttattcctcagcttctaagctagctgatgtcatagaagcatgggaagtaatgcatagcagtgcctccattagtattttttcgatatcgataggatcttacgaaaaacggccatttgcactacagttttattgcatacttgccgaaagaaaccttttgccccaacttatcaacacaaatccgatattatgggataacatggcaaagacatattcacactgtagtaaaggtggccaaaaaaatatcgccaagctactcataccaaacttcaacaatcatattgctccatcagtcttgcgtagtgataacgactatgtcttgaaattttatgaaaaggcatttatagacgaagttattgctactactgcaaattacgtttctgatgaagatcacgtgaagaatttgatgtgctacattgcaagctctcccaatcaaagctgtaagaattctgtccttattaccttactgtctaacaaagacttcgtgagaaggctctcatgggaattctttcacactaaattcaacgccagcaagactgaggctcaccccctgttttcagttttggcacagcttatcgacatgcaccttttaatatcgacagatcgggagttattagactacaactctgtgatacctatcgaagaactaaagaaatttacatccacgttaaaagattttactttccgacaatattgggaactacctaaaagtgaaaggaaccctatgttaaaggaagcagtaccacttttgagcaaagtctacgaaagggactcaagattgcactttctatccacggagaataatccaacctattgggaaaactctgaaaagcaatttttaaatttgagattttacgaagaattacaggagtacgaagatctgtatagagaacacttagaagaggaaagtgatgaggatatggaaaaggaaatagatcttgataaagaaaggcctcctttgaagtctttattattgaacaaaatgaaaaagagattaaagtcatcattacgtttccgaaagttggaaatacttttggaattaccattttttattccttttgaagaaagggtggacttattttatatgttcatcgcactggacaagaagcgattatctttagatgacgatcacaacttgatcaatatgtttaccccctgggcctccaccggtatgaggaagcaatccgctatcatctctagggataatgtcttagaagatgctttcaacgcatttaactctataggagaaaggttcaaagcttcattagatgttacttttattaatgaatttggtgaagaagctggtattgatgggggcggcattaccaaggaatttttaactactgtgtctgatgaaggatttaaagatccaaagcacgagttatttcggacgaatgatcgctacgaattatatccttctgttgtttatgacgctacgaaacttaagtatatatggtttctgggaaaggttgtaggcaaatgtctatatgagcatgttttgatagatgtatcttttgctgatttctttttgaaaaaattattgaattactcgaacgggtttttatcttctttttctgatctgggaagctatgattcggtgttgtataataatttgatcaaattattgaacatgaccactgacgagatcaagtctttagatttaacctttgaaatagatgagcctgaaagttccgcaaaagttgttgacttaattccgaatggttcaaaaacgtacgtgacgaaggataatgtgttgctctacgttactaaagtaacggattacaaattaaacaaaagatgcttcaaaccagtttcggcattccatggagggctcagtgttatcattgccccacattggatggagatgtttaactctatagaactacaaatgttaatatcaggtgagagagataatatcgatttagacgatctgaaatctaacacagaatacgggggttataaagaagaagatcagacaattgttgatttttgggaggttttgaatgagtttaagtttgaagagaaattgaattttttgaaatttgtcacgtccgttccgcaagctcctctgcaaggcttcaaggcattagatccaaaatttggtatcagaaatgcagggacagagaaatacaggctgcctacggcatctacctgtgttaatttattaaaattgccagattatagaaacaaaacaattttgagagagaaattattatatgcaataaactcaggcgccaggtttgacttatcataa

SEQ ID NO: 3888 - DNA, 2733 bp, Artificial Sequence
  Description of Artificial Sequence: Synthetic polynucleotide
atgttaaacttcaccggtcaaacaaggagaagaaatgtcaatttagggaataggactagaaattctaagaaggatttattggaaaaggccaaaagggaacgtgaaaggagagcacaagataagctcaaagaagacgccagtaaaaccattcaaaaaagcatcagaagacatttttctaatgtgagactcttcaaaaacacatttactagttctcaacttgttcatatgataccagcttacgggggcaaattaatctattacatttctcaatatgatttacagcaattattgaaattatctcataattttttgagttcttatcctaattctttaggcaacagacagttattgagcttgttgaagctttatcaagatgatgcattggtggctgaaactttaagcgatcttaacatggactgccctacagttgacgaatttttagatagtttatccgtttatctctgtagagcttcctttttgagttattcctctgcttctaagttggctgatgtcatagaagcatgggaagtaatgcatagcagtgcctccattagtattttttccatatccataggatcttacgaaaaaaggccatttgcattacagttttattgcatacttgccgaaagaaaccttttgccccaacttatcaacacaaatccgatattatgggataacatggcaaagacatattctcactgtagtaaaggtggccaaaaaaatatcgccaagttactcataccaaacttcaacaatcatattgctccaagtgtcttgcgtagtgataacgactatgtcttgaaattttatgaaaaggcatttatagacgaagttattgctactactgcaaattacgtttctgatgaagatcacgtgaagaatttgatgtgctacattgcaagctctcccaatcaaagctgtaagaattctgtccttattaccttattatctaacaaagacttcgtgagaaggctctcttgggaattctttcacactaaattcaacgccagcaagactgaggctcaccccttattttctgttttggcacagcttatcgacatgcaccttttaatatctacagatagagagttattagactacaactctgtgatacctatcgaagaattgaagaaatttacatccacgttaaaagattttactttcagacaatattgggaattacctaaaagtgaaaggaaccctatgttaaaggaagcagtaccacttttgagcaaagtctacgaaagggacagtagattgcactttctttccacggagaataatccaacctattgggaaaactctgaaaagcaatttttaaatttgagattttacgaagaattacaggagtacgaagatttatatagagaacacttagaagaggaaagtgatgaggatatggaaaaggaaatagatcttgataaagaaaggcctcctttgaagtctttattattgaacaaaatgaaaaagagattaaagagttctttacgtttcagaaagttggaaatacttttggaattaccattttttattccttttgaagaaagggtggacttattttatatgttcatcgcattggacaagaagagattatctttagatgacgatcacaacttgatcaatatgtttaccccctgggcctccaccggtatgaggaagcaatccgctatcatctctagggataatgtcttagaagatgctttcaacgcatttaactctataggagaaaggttcaaagcttctttagatgttacttttattaatgaatttggtgaagaagctggtattgatgggggcggcattaccaaggaatttttaactactgtgtctgatgaaggatttaaagatccaaagcacgagttatttagaacgaatgatcgctacgaattatatccttctgttgtttatgacgctacgaaacttaagtatatatggtttttgggaaaggttgtaggcaaatgtttgtatgagcatgttttgatagatgtatcttttgctgatttctttttgaaaaaattattgaattactctaacgggtttttatcttctttttctgatttgggaagctatgattctgtgttgtataataatttgatcaaattattgaacatgaccactgacgagatcaagtctttagatttaacctttgaaatagatgagcctgaaagttccgcaaaagttgttgacttaattccgaatggttccaaaacgtacgtgacgaaggataatgtgttgctctacgttactaaagtaacggattacaaattaaacaaaagatgcttcaaaccagtttctgcattccatggagggctcagtgttatcattgccccacattggatggagatgtttaactctatagaattacaaatgttaatatctggtgagagagataatatcgatttagacgatttgaaatctaacacagaatacgggggttataaagaagaagatcagacaattgttgatttttgggaggttttgaatgagtttaagtttgaagagaaattgaattttttgaaatttgtcacgtccgttccgcaagctcctttacaaggcttcaaggcattagatccaaaatttggtatcagaaatgcagggacagagaaatacaggttgcctacggcatctacctgtgttaatttattaaaattgccagattatagaaacaaaacaattttgagagagaaattattatatgcaataaacagtggcgccaggtttgacttatcttga

SEQ ID NO: 3889 - DNA, 3660 bp, Saccharomyces cerevisiae
atgtcgcttaaatcaaagttgactaagattcagaagttatggctgtattatttcccctgtgacagaatcctcgcgaagagaatatgtaaatcgactgttaatactacggtagctttcatattttgcttgatacctaagataactgcgcatttgggagcagctcctgcgatgctgccaatgatttctgttattgttcaccctggaagaagggtcgggggtactatccatggtgctatctattgcataactggattgatatttggcctagcttacgcaatcttcggccggttccttgcgcagcgatgtttagggagttcttggcatgagctaacagaggcacagcagcacgtattgcactataaaagatatgaagcgggattagcaattttggctgttttcgaagtaattatgcttttttttcatggttggatgagatctgtatcacactattactttggtattgttttcccactttttgtcgtggttcatttcgcatttatggatcctttgaatgaaacagcaggcactattgctaaagcttatagtacgcctttctacctgggtattgcaatgtcgattttctggaatcttgtgttgtttcctgagtggggtaccacatatttgggtaatacgactattgatgctatgaatgagctccataagtccattgactattcgataaatttcttcattgcagttgacccgcacaatagtagccagttgtacagtagagatcctgtttcgttaggcaagctattgaagatgaagtcactgatttcttctaaagttaacaactgtcgagtagtacttcacgagtgcatttatgagtttacttacgcttatgtttcgccaactaaactaaagccaatcatatctactttggaaaatttgacagtcttcattaatggattagttaatacatgccaattagaatttattttattggcaagacatgataacaagctcaggcctgatgatgtcgcagctttgacactgccaaagaacaaagaaatcagctttgcaaatgctgagaagttgttgaaagttattgacaagttgcatccagtgatttatagtctacaccggacaatgagtgaatgcatgtacatagcaaagttggtacttgctcatgcatttgatgtgaaagtttcaagggttcattcctgctcaatgttcaaagatggtaacttcccaacattcagtaataacgccaataatctgcccaatgatgttgacatccagaacaagatcaatgacctgaagcaggcgttagaagaatgtaaagcaaaattcaagtcagaaatgttaagttttgatattgatattatgagtcctagtgatgaaatgtttttgttgtctagctttctactaaattttaggcaaactgcagattcaactttggtaattatggagtccgtcaaggacattttagtcaaacgtcaaatacaagagaagaagggctggctgagaggcaaaagactttggtttttagtgttgaccaactacgagacattttctatctggttaaaaggcgataggaactcagtgactgaaaatgatacattaaagggtacgttcaatggtaatactaatggttttgctcatgacacagttattagaaggcctgattatgaagagaatgaacttttatctcaaaaagtttcatcgaataagaacattgtaaaagatgatgcatcgctagatctgccaatgacaagtgaacccaaaggaaattcatcttctacctctgacacttcttcgtcgccattaacgttaacgaaaacaactacgttcggaactaatagaacttccaggaggcaaggcagattttcttttatgtccatgcttatttcaattgataagttttgtgaagtgtcacatcctcactttagatttggatttcaggtagccattgcattaatgctggcttcatttccgatgtttattccaaagacaaggcagtggtacatagactatcgtggtacctggattggtttcgtgtgcatactttgtttggaaccttccgtaggaggtacgttctgggtcttctttttgcgtgctgtgggggttatttttggagcagcctggggttatctttcctatgttgctgctgtcaaccaaaccaatccatatttggagacagtcatcacagtttttggagccattcctgggttttactatttattaggcacaccctatgtgaaggctgcaattattgaaattattagtatttatattgttatgcttgcagcaatacttccctcccaagatgatatattgactagtttcgccaagagatgtttagctgtcggctatggtggaggggtagcattaatagttcaagtctttttctttccattgaaggcacgggaacaattaaatgaagagatttcttttgtctgtggctgtatatcggaaatggaacttctctacgccaccggactggaaggagagcaagtcgcaagtagtatgagtgaagagaaatacaaaaaaatcgaaaagatatcaaaaagtgctaaagaggcgttagcccgtgctacggcctataaaggactaaccagacaagagccgagattaaagggtgaatataccgagttggaaaatgttttcactcaagttatatttattcagaagcaaataatagagaggatagatacaatttccttgctgagaaagcaaaatggaagtgcggttattgaagaatttaacagtgttgtatatccatatcgacgccaaatggttggaagtatttcttgcctaatgagagcacttcaagaggcatttataaataagaccccgttaccgcaatttttgcccagcgcaagaattgcacatagaaggctgattaataaagtgcgccaaactctgcgaataagatatcctgggcagatttcaaatttaagtgataaagcaagaaagccaaatgaaggagattacgctgacggcaaggatgaagatgacgatgataacgaaggtttggtaatgaaaatgaatagaaggggacaggccaacacaacagctaatcctcatgaatatgttttaaaagaaaaatttttaagttggaacgcatctagtgctgcatcggaagaaataattgagtatattgaagagctgttgaatttaactaaaattctggtcggtgtaaatgagtttaaatacgggtttttatcgcgtccactttacgaggactgggctgcagaggcagtaacaggatttgataatttcattaacgggaaaagcaatcctatgaatacacggcgcaatcggaccccatttgatggtacttccatcatttccgaaggaaatgaaagtttacaaagtacaaattctaatgaatctcaaatttctcctgattccacaagaagttatgagccggaatgtccagtggcatacgaaaaaaatgataatccggcagcgttgaatttattacggattgcttctcataaagcaggccaaaacgcggatggcttaccaaagacatttagaaatagagcattttccattacttctacctccggccaactttcaagcttaagcagacacagcacccttggtaatgcggatcctaattatctgaacgatgatgatgaaagctctgatgatgatttgccattagctttgaaaatggtgctaagtcacatgaaagaaaagaaggactaa

SEQ ID NO: 3890 - DNA, 3660 bp, Artificial Sequence
  Description of Artificial Sequence: Synthetic polynucleotide
atgtctcttaaatccaagttgactaagattcagaagttatggttatattatttcccctgtgacagaatcctcgcgaagagaatatgtaaatctactgttaatactacggtagctttcatattttgcttgatacctaagataactgcgcatttgggagcagctcctgcgatgcttccaatgatttctgttattgttcaccctggaagaagggtcgggggtactatccatggtgctatctattgcataactggattgatatttggcttagcttacgcaatcttcggcaggttccttgcgcagcgttgtttagggagttcttggcatgagttgacagaggcacagcagcacgtattgcactataaaagatatgaagcgggattagcaattttggctgttttcgaagtaattatgcttttttttcatggttggatgagatctgtaagccactattactttggtattgttttcccactttttgtcgtggttcatttcgcatttatggatcctttgaatgaaacagcaggcactattgctaaagcttatagtacgcctttctacttgggtattgcaatgtctattttctggaatcttgtgttgtttcctgagtggggtaccacatatttgggtaatacgactattgatgctatgaatgagctccataagtccattgactattctataaatttcttcattgcagttgacccgcacaatagtagccagttgtacagtagagatcctgtttctttaggcaagttgttgaagatgaagtctttgatttcttctaaagttaacaactgtagagtagtacttcacgagtgcatttatgagtttacttacgcttatgtttctccaactaaattgaagccaatcatatctactttggaaaatttgacagtcttcattaatggattagttaatacatgccaattagaatttattttattggcaagacatgataacaagctcaggcctgatgatgtcgcagctttgacattaccaaagaacaaagaaatcagctttgcaaatgctgagaagttgttgaaagttattgacaagttgcatccagtgatttatagtttacacagaacaatgagtgaatgcatgtacatagcaaagttggtacttgctcatgcatttgatgtgaaagtttccagggttcattcctgctctatgttcaaagatggtaacttcccaacattcagtaataacgccaataatttgcccaatgatgttgacatccagaacaagatcaatgacttgaagcaggcgttagaagaatgtaaagcaaaattcaagtctgaaatgttaagttttgatattgatattatgagtcctagtgatgaaatgtttttgttgtctagctttttattgaattttaggcaaactgcagattctactttggtaattatggagtccgtcaaggacattttagtcaaacgtcaaatacaagagaagaagggctggttgagaggcaaaagactttggtttttagtgttgaccaactacgagacattttctatctggttaaaaggcgataggaactctgtgactgaaaatgatacattaaagggtacgttcaatggtaatactaatggttttgctcatgacacagttattagaaggcctgattatgaagagaatgaacttttatctcaaaaagtttcttccaataagaacattgtaaaagatgatgcatctttagatttaccaatgacaagtgaacccaaaggaaattcttcttctacctctgacacttcttcttctccattaacgttaacgaaaacaactacgttcggaactaatagaacttccaggaggcaaggcagattttcttttatgtccatgcttatttccattgataagttttgtgaagtgtctcatcctcactttagatttggatttcaggtagccattgcattaatgttggcttcttttccgatgtttattccaaagacaaggcagtggtacatagactatcgtggtacctggattggtttcgtgtgcatactttgtttggaaccttccgtaggaggtacgttctgggtcttctttttgcgtgctgtgggggttatttttggagcagcctggggttatctttcctatgttgctgctgtcaaccaaaccaatccatatttggagacagtcatcacagtttttggagccattcctgggttttactatttattaggcacaccctatgtgaaggctgcaattattgaaattattagtatttatattgttatgcttgcagcaatacttccctcccaagatgatatattgactagtttcgccaagagatgtttagctgtcggctatggtggaggggtagcattaatagttcaagtctttttctttccattgaaggcaagagaacaattaaatgaagagatttcttttgtctgtggctgtatatctgaaatggaacttctctacgccaccggattagaaggagagcaagtcgcaagtagtatgagtgaagagaaatacaaaaaaatcgaaaagatatccaaaagtgctaaagaggcgttagcccgtgctacggcctataaaggattaaccagacaagagccgagattaaagggtgaatataccgagttggaaaatgttttcactcaagttatatttattcagaagcaaataatagagaggatagatacaatttccttgttaagaaagcaaaatggaagtgcggttattgaagaatttaacagtgttgtatatccatatagacgccaaatggttggaagtatttcttgcttgatgagagcacttcaagaggcatttataaataagaccccgttaccgcaatttttgcccagcgcaagaattgcacatagaaggttgattaataaagtgcgccaaactttaagaataagatatcctgggcagatttctaatttaagtgataaagcaagaaagccaaatgaaggagattacgctgacggcaaggatgaagatgacgatgataacgaaggtttggtaatgaaaatgaatagaaggggacaggccaacacaacagctaatcctcatgaatatgttttaaaagaaaaatttttaagttggaacgcatctagtgctgcatctgaagaaataattgagtatattgaagagttattgaatttaactaaaattttagtcggtgtaaatgagtttaaatacgggtttttatctcgtccactttacgaggactgggctgcagaggcagtaacaggatttgataatttcattaacgggaaaagcaatcctatgaatacaagacgcaatagaaccccatttgatggtacttccatcatttccgaaggaaatgaaagtttacaaagtacaaattctaatgaatctcaaatttctcctgattccacaagaagttatgagccggaatgtccagtggcatacgaaaaaaatgataatccggcagcgttgaatttattaagaattgcttctcataaagcaggccaaaacgcggatggcttaccaaagacatttagaaatagagcattttccattacttctacctccggccaactttctagcttaagcagacacagcacccttggtaatgcggatcctaattatttgaacgatgatgatgaaagctctgatgatgatttgccattagctttgaaaatggtgttgagtcacatgaaagaaaagaaggactga

SEQ ID NO: 3891 - DNA, 2409 bp, Saccharomyces cerevisiae
atgagatttcttcaggtttataaatcatcggcattaattggactaataatattgttagccagtaaagtaaatcttgcagaggcaaaaaggaagctggtagccacatcattggtcacatgtatggaaaactcgcagctgtcagcaaatagttttgacgttgttttcaatccagacgacaggtcattacattatgatcttgatatgtcaactcaaattgattcatatatttttgctgatattgatgtctacgcatatggtttcaagatcattactaaaaatgtcgatctttgttcaatcaactggaaacagttttgcccggttcacccaggtaatattcagatcgactctattgaatacatctccagtgagtacgtaaatgaaattcctggtattgcataccaagtccccgatatcgacgcatatgccagggtcaagatcaccaacaatgtgagcgagtacctagcatgtatccaaatatacttctcaaacggtaaaacagtttctcagattggtgtaaaatgggcaactgcagtggtagcgggaattggtcttttactatctgccatcttatccacttttgggaactctaccgcagcctcacatatttctgccaacacaatgtcacttttcttatacttccaatctgttgtcgtggttgccatgcaacatgttcatcgagttccgcctattgcagccgcctgggcggaaaacttggtttggtcaatggggttaattagaatctcattcatgcaaaggattttccggtggtatgtgcaatccactggtggtacgcctagcttatatctgacttcaacatctatgtctgttttggctcaaagaagttggcaatatttgatggagctcccattaatcaaaagagctaccaatgttttgtatggtaatgcaaatacattaatttttagaggaatcaaaaggctaggctataaaatgggaatcgaaaatacgtccatcgtttgtaccggttttactttcttcgtcttatgtggatatgtgttggctggatttatcatagtattcaaatgctgtgtggagttagccacccggttaggatggatccaaaaggcaaggttttgggaattcaggaaacaatggagaatgatcttaaaaggtgctcttttaagatatatttacatcggtttcgttcagttaacaattctcagtttttgggaatttactgaaagagattcacctgctgttatcgtcatcgcatgcctttttattcttttgtcatgtgggttaatgctttgggctgcatggaggactgtttttttcgcaagaagatctgttgcattgtacaacaacccagcagccttattgtatggagatgaatatgtcttacacaaatacggatttttctatacaatgttcaatgccaatcattactggtggaacattgttcttttatcctacatttttgtaaaatcattattggttggatttgctcaggcttctggtcaaacacaagttcttttcatgttcatattggatttgttttacttcgttgctattatctactataagccctatctggaccgtccaacaaacataatgaatattttaattgctactgttactgtagttaattcctttctattcatgtttttttcggacttgtttaaccaaagctacaaagtggctgctattatgggatggatatttttcattatgaacgctgcattttcgttcattttactaatgatgatattggcattcgctggtatgatgcttttctcaaagaaccccgatctaagatttaaacctgctaaggacgatagaacttctttccaaaggaacactatgaaaccagaaggtactgttaatagatcagtagcgaacgagttgcttgcgttgggcaatgtggcaaaagaccatgacgacaattcagattacgaatcaaatgatactggtgtgaatgatgagctaaagcaagcacaggatgaaaccactcccacaaccgtaacatcaagtgatgataacaagcctacgttttcagagaaaatattaagtaaattctctaggcctaagaatgaaaacgcaagcacagatgctctgagagttgaagctccaaaacaacaaacgtttcctcacaacttaacgaatctttcacgagaaaacctatcaacattaggctctaaaccttatccaggacacacaagatcacagtctgatgcgcataatggactgatcaattcctttgaagaggaagatacaagttcaaataccgatccatttcacgactccactgaaggagaccttttagatacctcaagttcggacggaggatttaggtcgcaaaactatgttcgagatgacagcataaatagtttgggaaacaataaacaaccactgaggaaaccccctggattcttcgatgaaggatttatgtga

SEQ ID NO: 3892 - DNA, 2409 bp, Artificial Sequence
  Description of Artificial Sequence: Synthetic polynucleotide
atgagatttcttcaggtttataaaagcagcgcattaattggattgataatattgttagccagtaaagtaaatcttgcagaggcaaaaaggaagttggtagccacatctttggtcacatgtatggaaaactctcagttaagtgcaaatagttttgacgttgttttcaatccagacgacaggtctttacattatgatcttgatatgtctactcaaattgattcttatatttttgctgatattgatgtctacgcatatggtttcaagatcattactaaaaatgtcgatctttgttctatcaactggaaacagttttgcccggttcacccaggtaatattcagatcgactctattgaatacatctccagtgagtacgtaaatgaaattcctggtattgcataccaagtccccgatatcgacgcatatgccagggtcaagatcaccaacaatgtgagcgagtacttggcatgtatccaaatatacttcagtaacggtaaaacagtttctcagattggtgtaaaatgggcaactgcagtggtagcgggaattggtcttttattatctgccatcttatccacttttgggaactctaccgcagcctctcatatttctgccaacacaatgtctcttttcttatacttccaatctgttgtcgtggttgccatgcaacatgttcatagagttccgcctattgcagccgcctgggcggaaaacttggtttggtctatggggttaattagaatctctttcatgcaaaggattttccgttggtatgtgcaatccactggtggtacgcctagcttatatttgacttctacatctatgtctgttttggctcaaagaagttggcaatatttgatggagctcccattaatcaaaagagctaccaatgttttgtatggtaatgcaaatacattaatttttagaggaatcaaaaggttgggctataaaatgggaatcgaaaatacgtccatcgtttgtaccggttttactttcttcgtcttatgtggatatgtgttggctggatttatcatagtattcaaatgctgtgtggagttagccaccagattaggatggatccaaaaggcaaggttttgggaattcaggaaacaatggagaatgatcttaaaaggtgctcttttaagatatatttacatcggtttcgttcagttaacaattctcagtttttgggaatttactgaaagagattctcctgctgttatcgtcatcgcatgcctttttattcttttgagttgtgggttaatgctttgggctgcatggaggactgtttttttcgcaagaagatctgttgcattgtacaacaacccagcagccttattgtatggagatgaatatgtcttacacaaatacggatttttctatacaatgttcaatgccaatcattactggtggaacattgttcttttatcctacatttttgtaaaatctttattggttggatttgctcaggcttctggtcaaacacaagttcttttcatgttcatattggatttgttttacttcgttgctattatctactataagccctatttggaccgtccaacaaacataatgaatattttaattgctactgttactgtagttaattcctttcttttcatgtttttttctgacttgtttaaccaaagctacaaagtggctgctattatgggatggatatttttcattatgaacgctgcattttctttcattttattgatgatgatattggcattcgctggtatgatgcttttctccaagaaccccgatttgagatttaaacctgctaaggacgatagaacttctttccaaaggaacactatgaaaccagaaggtactgttaatagatctgtagcgaacgagttgcttgcgttgggcaatgtggcaaaagaccatgacgacaattctgattacgaaagtaatgatactggtgtgaatgatgagttgaagcaagcacaggatgaaaccactcccacaaccgtaacatctagtgatgataacaagcctacgttttctgagaaaatattaagtaaattctctaggcctaagaatgaaaacgcaagcacagatgctttgagagttgaagctccaaaacaacaaacgtttcctcacaacttaacgaatctttctagagaaaacttatctacattaggctctaaaccttatccaggacacacaagaagccagtctgatgcgcataatggattgatcaattcctttgaagaggaagatacaagtagtaataccgatccatttcacgactccactgaaggagaccttttagatacctctagtagtgacggaggatttaggtctcaaaactatgttagagatgacagcataaatagtttgggaaacaataaacaaccattaaggaaaccccctggattcttcgatgaaggatttatgtga

SEQ ID NO: 3893 - DNA, 1038 bp, Saccharomyces cerevisiae
atgtacaactttttagaatttttcttcttttttataacgtacaccttatttaagagcactttcgttcaaggaaaaagttcatttcctggacatgatgtgtgtaagttcgaagaccaaaatttccagacagagttcttcttaaatgttcttaaaggtgacaagttacagaacttgaagcaggagtacgaacaatacaaaaaacaaagtactttgtacacaggctttgtaattgaaaaacaatatgaataccaggtagcgcccttgcaaatcaataattttcttcaagtgaccttttgtaaaggaggaaagccaatttggaatcatattctaccctttcaaaaggatttagattgggcagaaccactatgcattccagcccaggaggatgatactatctcccaaaacagctcagtatgtttcaagtttgcaagggtgcagaaatatacacagcgtaatgtaaccctttactttcctaataaatttgttggattcgtatttgtttgcaattcttcaaagacgcatccccccactcagaacaattttgaaactattccattaacgcctattatttctgatgatattagagattacaaaatatcttggtcaattaaaggaagaatcaccaaggtggtaccttatctacattcgttaagtattcctatgtccaaatatgagatgctcatccattcagataagaacatatcaaacgaattggaatataaatccttaacttcggagttttggaagagctataaaaacttaagaaagtttaaaaacaaagaaatgtcttggataaacgaaataaatcctatggagcaatatgatagctctgggaatgaaaatgtcccgaattttcatgaaaaactagaccgtacaataaatcggattgcgcaaaacatagaaaggcctcatgatgcactaataagagcgatagccgcacataatagaaactctaatagtggaaatattacaagaaggaaatatttgaggaggaagatctcaaagatgttaaaaaataagatacctcttaagaactga

SEQ ID NO: 3894 - DNA, 1038 bp, Artificial Sequence
  Description of Artificial Sequence: Synthetic polynucleotide
atgtacaactttttagaatttttcttcttttttataacgtacaccttatttaagagcactttcgttcaaggaaaaagttcttttcctggacatgatgtgtgtaagttcgaagaccaaaatttccagacagagttcttcttaaatgttcttaaaggtgacaagttacagaacttgaagcaggagtacgaacaatacaaaaaacaaagtactttgtacacaggctttgtaattgaaaaacaatatgaataccaggtagcgcccttgcaaatcaataattttcttcaagtgaccttttgtaaaggaggaaagccaatttggaatcatattttgccctttcaaaaggatttagattgggcagaaccattgtgcattccagcccaggaggatgatactatctcccaaaacagctctgtatgtttcaagtttgcaagggtgcagaaatatacacagcgtaatgtaaccctttactttcctaataaatttgttggattcgtatttgtttgcaattcttccaagacgcatccccccactcagaacaattttgaaactattccattaacgcctattatttctgatgatattagagattacaaaatatcttggtctattaaaggaagaatcaccaaggtggtaccttatttgcattctttaagtattcctatgtccaaatatgagatgctcatccattctgataagaacataagcaacgaattggaatataaatccttaacttccgagttttggaagagctataaaaacttaagaaagtttaaaaacaaagaaatgtcttggataaacgaaataaatcctatggagcaatatgatagctctgggaatgaaaatgtcccgaattttcatgaaaaattagaccgtacaataaatagaattgcgcaaaacatagaaaggcctcatgatgcattaataagagcgatagccgcacataatagaaactctaatagtggaaatattacaagaaggaaatatttgaggaggaagatctccaagatgttaaaaaataagatacctcttaagaactga

SEQ ID NO: 3895 - DNA, 2670 bp, Saccharomyces cerevisiae
atgaagttggatataaagaaaacttttagtaatagatccgatcgagttaaaggtatcgatttccatcctactgagccatgggttttgactaccttgtactctggtcgtgttgagctttggaattacgaaacacaagttgaagttagatccatccaagttacggaaactcctgttagagcaggtaaattcattgcaagaaagaattggataattgttgggagtgatgatttcaggatcagagtcttcaactacaatacaggtgaaaaagttgttgatttcgaagctcatccagactatatccgttccattgctgtacatccaacaaagccttatgttttatccggcagtgatgatttgacagtcaaactatggaattgggaaaataactgggccttagaacaaacttttgaaggtcacgaacactttgtcatgtgcgtcgcattcaatccaaaggatcctagtacgtttgcatctgggtgtttggaccgaaccgttaaagtttggtcattgggacaatcgacaccaaatttcacgttaaccacaggacaagaaagaggtgtgaattatgttgattattacccgctacctgacaagccttatatgattactgcgtcggacgacttaaccatcaaaatttgggattaccaaacgaagtcatgtgtagccactctagaaggtcacatgtccaatgtttcttttgctgttttccatccaactttacccattataatttctggttccgaagatggcactttaaagatatggaattcttccacttacaaggtagaaaagactttaaacgttggtttagaaagaagttggtgtatcgctacccatccaacaggacgtaaaaactacattgcatccgggtttgataatgggtttaccgtactttccttgggaaatgatgaaccaactttatcacttgaccctgtcggtaagctagtatggtcaggtggcaaaaatgccgcagcttcagacattttcactgccgtcataagaggtaacgaagaagttgaacaagatgaaccattatctttacaaactaaggagctgggttccgttgatgttttccctcaatctttagcccattctccaaatggtaggtttgttacagttgttggggatggtgaatacgttatttatacggcgttggcttggagaaacaaagccttcggtaaatgtcaagactttgtttggggccccgactccaatagttatgctttaattgatgaaactgggcaaattaaatactacaaaaactttaaagaagtcacatcatggtctgtcccaatgcattctgctattgatagattattttcaggtgccttgttgggtgtgaagtctgatggcttcgtctatttcttcgattgggacaacggtacgctagttagaagaattgatgttaatgctaaggatgtcatttggtccgataacggtgagctggtgatgattgtcaacaccaatagtaatggtgatgaagcaagtggttacacattattattcaacaaggatgcttaccttgaagcagcaaataatggcaatatcgacgattcagaaggtgttgatgaggcttttgacgtattgtatgaactaagtgaatccattacatcaggcaaatgggttggtgatgtctttatctttaccacagcaactaacaggctgaactacttcgtaggtggaaagacttataatttagcccattacacaaaggaaatgtatctattgggctatctagcacgtgataataaagtatatttagctgacagagaggtccatgtttatggttacgaaatatctctagaggtgctggagttccaaacattgactttaagaggggaaattgaagaagccattgaaaatgtactcccaaatgttgagggtaaggactctttaacaaaaattgctagatttctggaaggtcaagagtattatgaagaagcactgaatatttcccctgatcaagatcaaaaatttgagctagccttaaaagtcggccaacttacgcttgctcgcgatttgttgacagatgaaagcgccgaaatgaaatggagagccttgggtgatgcttccttacaaaggttcaattttaaacttgctgttgaagctttcacaaatgcacatgatctagaatctttatttctattgcactcatcttttaataacaaggaggggttggtcactttagctaaagatgctgaaagggccggtaaattcaatttggcttttaatgcatattggatcgctggcgatatacaaggcgctaaagatcttttaatcaagtctcaaaggttttccgaagccgctttccttggatcaacatacggtttaggagatgatgcagtcaacgatattgttacaaaatggaaggaaaatttgatactcaacggtaagaatactgtatcagaaagagtttgtggggccgaaggtttaccaggctcttcgagttcaggagatgcccaaccactcattgacttagattccactccagccccagaacaagctgacgaaaacaaagaagctgaagttgaggacagcgagtttaaagaatccaactcagaggcagttgaagccgaaaaaaaagaagaggaagctccccagcaacaacaatcagaacaacagccggagcaaggagaggcagtgccggagcctgtggaagaagagagttaa

SEQ ID NO: 3896 - DNA, 2670 bp, Artificial Sequence
  Description of Artificial Sequence: Synthetic polynucleotide
atgaagttggatataaagaaaacttttagtaatagatccgatagagttaaaggtatcgatttccatcctactgagccatgggttttgactaccttgtactctggtcgtgttgagctttggaattacgaaacacaagttgaagttagatccatccaagttacggaaactcctgttagagcaggtaaattcattgcaagaaagaattggataattgttgggagtgatgatttcaggatcagagtcttcaactacaatacaggtgaaaaagttgttgatttcgaagctcatccagactatatccgttccattgctgtacatccaacaaagccttatgttttatccggcagtgatgatttgacagtcaaattatggaattgggaaaataactgggccttagaacaaacttttgaaggtcacgaacactttgtcatgtgcgtcgcattcaatccaaaggatcctagtacgtttgcatctgggtgtttggacagaaccgttaaagtttggtctttgggacaaagtacaccaaatttcacgttaaccacaggacaagaaagaggtgtgaattatgttgattattacccgttgcctgacaagccttatatgattactgcgtctgacgacttaaccatcaaaatttgggattaccaaacgaagagttgtgtagccactttggaaggtcacatgtccaatgtttcttttgctgttttccatccaactttacccattataatttctggttccgaagatggcactttaaagatatggaattcttccacttacaaggtagaaaagactttaaacgttggtttagaaagaagttggtgtatcgctacccatccaacaggacgtaaaaactacattgcatccgggtttgataatgggtttaccgtactttccttgggaaatgatgaaccaactttatctcttgaccctgtcggtaagttggtatggtctggtggcaaaaatgccgcagcttctgacattttcactgccgtcataagaggtaacgaagaagttgaacaagatgaaccattatctttacaaactaaggagttaggttccgttgatgttttccctcaatctttagcccattctccaaatggtaggtttgttacagttgttggggatggtgaatacgttatttatacggcgttggcttggagaaacaaagccttcggtaaatgtcaagactttgtttggggccccgactccaatagttatgctttaattgatgaaactgggcaaattaaatactacaaaaactttaaagaagtcacatcttggtctgtcccaatgcattctgctattgatagattattttctggtgccttgttgggtgtgaagtctgatggcttcgtctatttcttcgattgggacaacggtacgttagttagaagaattgatgttaatgctaaggatgtcatttggtccgataacggtgagttggtgatgattgtcaacaccaatagtaatggtgatgaagcaagtggttacacattattattcaacaaggatgcttaccttgaagcagcaaataatggcaatatcgacgattctgaaggtgttgatgaggcttttgacgtattgtatgaattaagtgaatccattacaagtggcaaatgggttggtgatgtctttatctttaccacagcaactaacaggttaaactacttcgtaggtggaaagacttataatttagcccattacacaaaggaaatgtatcttttgggctatttggcacgtgataataaagtatatttagctgacagagaggtccatgtttatggttacgaaatatctttggaggtgttggagttccaaacattgactttaagaggggaaattgaagaagccattgaaaatgtactcccaaatgttgagggtaaggactctttaacaaaaattgctagatttttggaaggtcaagagtattatgaagaagcattgaatatttcccctgatcaagatcaaaaatttgagttggccttaaaagtcggccaacttacgcttgctcgcgatttgttgacagatgaaagcgccgaaatgaaatggagagccttgggtgatgcttccttacaaaggttcaattttaaacttgctgttgaagctttcacaaatgcacatgatttggaatctttatttttattgcactcttcttttaataacaaggaggggttggtcactttagctaaagatgctgaaagggccggtaaattcaatttggcttttaatgcatattggatcgctggcgatatacaaggcgctaaagatcttttaatcaagtctcaaaggttttccgaagccgctttccttggaagtacatacggtttaggagatgatgcagtcaacgatattgttacaaaatggaaggaaaatttgatactcaacggtaagaatactgtatctgaaagagtttgtggggccgaaggtttaccaggctcttccagtagtggagatgcccaaccactcattgacttagattccactccagccccagaacaagctgacgaaaacaaagaagctgaagttgaggacagcgagtttaaagaatccaacagtgaggcagttgaagccgaaaaaaaagaagaggaagctccccagcaacaacaaagtgaacaacagccggagcaaggagaggcagtgccggagcctgtggaagaagagagttga

SEQ ID NO: 3897 - DNA, 963 bp, Saccharomyces cerevisiae
atgattttagtgtacaatcgtatcaggagtataatatcgtcttctttaggtcgaatacatgtacggtataattctaactcacaaaacagatggctgaatagacaactgaaggatccctacacaaaagaggccaaggtccaaaatctgaggtctagagccgcattcaagcttatgcagattgatgataaatatcggctttttagcaaaaacaggaccgatcagagaattctagatcttgggtatgcccctggggcttggtcccaagtagcacggcaaagaagttcacctaattcaatgatactgggcgttgacattctcccttgtgaacctccgcatggtgtgaactctattcaagctaatatattggccaaaagaactcatgatcttatacggctctttttttctaagcatttccaattgaacagacacgatgatttgcataaggaccatggctatttccagaacatgctcgaggaggagctaacccatgtgaaagatactgaattgtaccgtgaaattttcacctctgatgacatttatgaaactccgaatacgaatagtaccctaatagaacgagaaaaattcccagttgatgtgattataagtgatatgtatgaaccctggccccaaacaaccggtttttggaacaacattactaatcaagcttattttaggatggctaatacatctggtgtcagtataagagaccattaccaatctattgatttatgtgacgcagccttagttacggctatagatttattacggccattaggttcgtttgtttgtaaactatacaccggcgaagaagaaaacctatttaaaaaaagaatgcaggcagttttcactaacgttcataagttcaagcctgacgcttctagagacgaatcaaaggagacctattatatcggattaaagaagaaaagaaatgtagataaactggacgtgtttagtaattcataa

SEQ ID NO: 3898 - DNA, 963 bp, Artificial Sequence
  Description of Artificial Sequence: Synthetic polynucleotide
atgattttagtgtacaatcgtatcaggagtataatatcttcttctttaggtagaatacatgtaagatataattctaactctcaaaacagatggttaaatagacaattgaaggatccctacacaaaagaggccaaggtccaaaatttaaggtctagagccgcattcaagcttatgcagattgatgataaatatagactttttagcaaaaacaggaccgatcagagaattttagatcttgggtatgcccctggggcttggtcccaagtagcaagacaaagaagtagccctaattctatgatattgggcgttgacattctcccttgtgaacctccgcatggtgtgaactctattcaagctaatatattggccaaaagaactcatgatcttataagactctttttttctaagcatttccaattgaacagacacgatgatttgcataaggaccatggctatttccagaacatgctcgaggaggagttgacccatgtgaaagatactgaattgtaccgtgaaattttcacctctgatgacatttatgaaactccgaatacgaatagtaccttaatagaaagagaaaaattcccagttgatgtgattataagtgatatgtatgaaccctggccccaaacaaccggtttttggaacaacattactaatcaagcttattttaggatggctaatacatctggtgtcagtataagagaccattaccaatctattgatttatgtgacgcagccttagttacggctatagatttattaagaccattaggttcttttgtttgtaaactttacaccggcgaagaagaaaacttgtttaaaaaaagaatgcaggcagttttcactaacgttcataagttcaagcctgacgcttctagagacgaatccaaggagacctattatatcggattaaagaagaaaagaaatgtagataaattagacgtgtttagtaatagttga

SEQ ID NO: 3899 - DNA, 654 bp, Saccharomyces cerevisiae
atgtctaagatcacctcttctcaagtcagagaacacgtcaaggaattgttgaagtattccaacgaaaccaagaagagaaacttcttggaaaccgtcgaactacaagtcggtttgaagaactatgaccctcaaagagacaagcgtttctctggttctttgaagttgccaaactgtccaagaccaaacatgtccatctgtatcttcggtgatgctttcgatgttgacagagctaagtcttgcggtgttgacgctatgtccgtcgatgacttgaagaagttgaacaagaacaagaagttaatcaagaagttgtctaagaagtacaacgctttcattgcttccgaagttttgatcaagcaagttccaagactattgggtcctcaattgtccaaggctggtaagttcccaaccccagtttctcacaacgatgacttgtacggtaaggtcactgatgtcagatctaccatcaagttccaattgaagaaggtcttgtgtttggctgttgccgttggtaacgttgaaatggaagaagacgttttggttaaccaaatcttgatgtctgttaacttctttgtttctttgttgaagaagaactggcaaaatgttggttccttggttgttaagtcctccatgggtccagctttcagattgtactaa

SEQ ID NO: 3900 - DNA, 654 bp, Artificial Sequence
  Description of Artificial Sequence: Synthetic polynucleotide
atgtctaagatcacctcttctcaagtcagagaacacgtcaaggaattgttgaagtattccaacgaaaccaagaagagaaacttcttggaaaccgtcgaattacaagtcggtttgaagaactatgaccctcaaagagacaagcgtttctctggttctttgaagttgccaaactgtccaagaccaaacatgtccatctgtatcttcggtgatgctttcgatgttgacagagctaagtcttgcggtgttgacgctatgtccgtcgatgacttgaagaagttgaacaagaacaagaagttaatcaagaagttgtctaagaagtacaacgctttcattgcttccgaagttttgatcaagcaagttccaagattattgggtcctcaattgtccaaggctggtaagttcccaaccccagtttctcacaacgatgacttgtacggtaaggtcactgatgtcagatctaccatcaagttccaattgaagaaggtcttgtgtttggctgttgccgttggtaacgttgaaatggaagaagacgttttggttaaccaaatcttgatgtctgttaacttctttgtttctttgttgaagaagaactggcaaaatgttggttccttggttgttaagtcctccatgggtccagctttcagattgtactga

SEQ ID NO: 3901 - DNA, 1302 bp, Saccharomyces cerevisiae
atggacatgactaaaaaccacaccactgacacagaggagtttgatgatggtgatatacgtccagtcagtttgggaattgtggacgattataacgcttcgttcgaattacctttgaaaccaaagtttttacagagtgagaatttctcagatttaacaagtgaatgggaccagtctagatcaaatacgcctggtcttgcagaaggcaagactgagaaagcacagccatgcggtacaacagatagttcaaaaaatagaatacatgtagagcaactgttggaatccgctaatgaaatgaataattatttggcgcagaatatagagaacataaacaattttcaggtggggctattgaatggagggaaaggattatatagttccatgggtgatgattcgagcgcgtgtattaatggcactaattttagctcaacgtccaattttgaactaagtgatgatgagctagaggataccacgggttgcacaagttctatttttgataaagatcttttccatcaacaaaacgggctaagcatacctcgccgtagatcaccactcttcaaatctccaactgccagtttcgaaattggcgatgctacggatgtggaggagcaagatattgatgactccattttttctgaatgtagcagcattacaagctttgatatgggagggttgcatatcagtctaccacacgatgaagaagaagatcaagaaaaaactaagtccgaaagtgaaaacccgttgctacatggcataccggttgatgtagaagtgccccacatatcggttgatgaagctctggcgaatttcaaggaaaccatagaactactactaaaacttagtggcaatagaaagtgtaccggtttcaatactagagtggagaaaaaagaatactcgaatttctacatgaaaagtaaacccaccttatcatcagcagattttctcaagagaatccaagacaaatgtgagtaccagccaactgtttaccttgtggcaacatttttaattgacacgttgtttttaacaagggatggcaataacattttgcagttgaagttaaacttacaggaaaaggaggtccatcgaatgataatagcagcggttagattgagcacgaaattattggaagatttcgttcactcacatgaatattttagtaaagtatgcggtatttcgaaacggcttttgactaaattagaagtcagtctattgatctgtgtgtgcaatactaaattaatggtcagtaacaggaaattagccgcctccaaattacttttgaatgaactacggtccttctgtgtatag

SEQ ID NO: 3902 - DNA, 1302 bp, Artificial Sequence
  Description of Artificial Sequence: Synthetic polynucleotide
atggacatgactaaaaaccacaccactgacacagaggagtttgatgatggtgatatacgtccagtcagtttgggaattgtggacgattataacgcttctttcgaattacctttgaaaccaaagtttttacagagtgagaatttcagtgatttaacaagtgaatgggaccagtctagatctaatacgcctggtcttgcagaaggcaagactgagaaagcacagccatgcggtacaacagatagttctaaaaatagaatacatgtagagcaattattggaatccgctaatgaaatgaataattatttggcgcagaatatagagaacataaacaattttcaggtggggttattgaatggagggaaaggattatatagttccatgggtgatgattctagcgcgtgtattaatggcactaattttagctctacgtccaattttgaattaagtgatgatgagttagaggataccacgggttgcacaagttctatttttgataaagatcttttccatcaacaaaacgggttgagcatacctcgccgtagatctccactcttcaaatctccaactgccagtttcgaaattggcgatgctacggatgtggaggagcaagatattgatgactccattttttctgaatgtagcagcattacaagctttgatatgggagggttgcatatcagtttaccacacgatgaagaagaagatcaagaaaaaactaagtccgaaagtgaaaacccgttgttgcatggcataccggttgatgtagaagtgccccacatatctgttgatgaagctttggcgaatttcaaggaaaccatagaattattattgaaacttagtggcaatagaaagtgtaccggtttcaatactagagtggagaaaaaagaatactctaatttctacatgaaaagtaaacccaccttatcttctgcagattttctcaagagaatccaagacaaatgtgagtaccagccaactgtttaccttgtggcaacatttttaattgacacgttgtttttaacaagggatggcaataacattttgcagttgaagttaaacttacaggaaaaggaggtccatagaatgataatagcagcggttagattgagcacgaaattattggaagatttcgttcactctcatgaatattttagtaaagtatgcggtatttccaaaagacttttgactaaattagaagtcagtttattgatctgtgtgtgcaatactaaattaatggtcagtaacaggaaattagccgcctccaaattacttttgaatgaattaagatccttctgtgtatga

SEQ ID NO: 3903 - DNA, 3795 bp, Saccharomyces cerevisiae
atggtgttatataaaaggaaacctatattacttcctgatccaaaacctttaccattggatttgaatgtacaagtatggcatattgaagagactggagaatggttttctagttacgaagaatttttagaaaggtttgatttctacacacgccaccattttacatgcgaaatcactggtacttcttgcctgacttttttccaagctctggatagtgaggagacacaattcaaatacgtcgaagacagattcccattaaagttgagagaaccagttgcaagatttttacattttaacggaataagaaggttagatgcattggtggagaaagtttacgcaagatttaaaaatgactttttcccaggagaagttgtttatctacgtaaacagaaagactcttctaccacaagctctaattcccaacaaagtactcctcaacctgatgatatggtcgaaatcaacagtgttggtaatcctggcttaccgcagtaccaataccaaagacgttatgttatcaaagaaaaggtccaatttaacgcaacgataaatccagagagcagggaaattgtgatgcccgctcatactaaatacatgctgatagaagaagcagcttccagtaataaatccttcattgttgatcaaggacaaatttacagggaccgttccactttcactaagcacttaatcaaatgttttttcaagattactttacagagggcatcttcgaaaatgggtgcaccttggtgtgtcaaaccggaatatttagcgatgtatggtttaacgatggaatggccaaaagatatgttaaaatataaagaagatgaacctgtcgtagcaagacgttccaacagtgccaatgtttcatccccagaaagtgaaaagaataaacgtcaaagtaaatcatcgggtaaaagtaacacctcaaacgatgcttctaacaaaaaagaaaccaagaaaaaaagaaagccaaccgaagtaaatgattctgagaataattcttcggaagaagacaagaagaagggtcaaaatgtcacatcagaaacacattctaaaaaaaggaaaaaggaagccaatgaggaaccgaacacggaaaacgtcgaaagcgttcctacaccagctaatgcggagcctcaggctgtaacaataacgagcataatggatgacctagctttgccatatcaacatccaccgaacatctttccaaacttaacgtattataatgaaaaattagaatgtatttcattaggttctacaaaactttccagaccttttgattcttttggaaagctattacaagcctatcagtttctgaatacgtttggttcgaaaatttgtctctctcattttagccttgaccaattcattacttctttgaaatgtacagacccatatgagttaaagggcgaagttgttttagtgaacataagaacgcaaacgtctaaagaacaagaaattgaaaataacggcctgccgatgaaaaacaaagcagagactactactgaggaagactctgaaaacccaagtgactggcaaagaaattcatttattcgtgatatgataatgaaaagaaattccgacaaggttgagtacaagattgttcacgatgacccagcatccgatgatatacttgataatatcaatcataatgggtctgctcttctcattgaagtttttactgcgctcttacgtttgttcatcaacgaagaaggcgattggagttgcatcgtcgttgaaaactggataatagacgacaagggagtccttatggagagaaaagatgaaagaggggagggggaggcgaagcaaaaacgaaatgctcacggatactttttacaagataaggaaaagatcgacaacctaaaggacacattaaaggaaaacgcaacagaagttcaaaaagaatcagacgctaaaaacgaaacaaattcagaatctgattctaaatctgattctgacagtgaagaacgagatcctaaattagaaaagtgtttgaactaccgcaatgttaactggatagaacgcttgacgaaaaggcaatttaataacagttactggctaataattttactgggagtcttagaagattgtagacatcttcccatgtatacagagtttattgattctttcatagaaaagatcatacccaaagatatatcagctactcaattgcccaaacagctttggagaaatttctgtcgaaagctgtcgttcagtgacaaagtcaatgcgctgtggatacttgtagatctcgtatcgcatttttctccagatatcaaagctgctgtagatgattccatggaactatgtggtcaaattcgtagcgaaagattcaaagttgcgagagagttgaaaacggaggcagccgtcttaagtaatcttcaaggcgacctgcaggcaattcaagagaagttaaataaaacagatgaaaacacaccatcagccgatggtgccgataaaaaagatgattccgaatcaaatagtgaaccaattgatcttattatcattgagaaaaagcaaaagttaattgaagagcaggataaaaaggtacaagctttacaatcagataaaaatttcctcgataattgtctatttgaaaacgatctacaaagattaaagccgttgggattggatcgatacgggaacaggtatttttggctggatcacaatggtgttccatttcctcaatatcctgctggtatgaatgagacgccgaaaagtaacaatagtttgagttatcactccggtcgtttattaattcagggacctaaagcatcatcggcgaaattctttttgaacgtcagtgatgagcaattgagcaattggcaaaaaatcagaaattccgaaggaatatccgaggcaactagggaagtatttggtatctccaaaactagttccggatcttataattacgtagaaaatggaatagaggtcgaactattggacagtaatgatcgcgtaaacccacttatagagctgacacctattcaaaagaaaattatggatgaaacaccttcaaggttgctactatcaccagatcaatggtattgcattgacaagttagaggacttgtcaagaataatggactggttagataattggggtcgcaaagagcatgatctcttgaggcaaatcagacccataatggaacgaattaaaagttcccttagcttgcgcgaccatgcgctgtcactgacagcattcaccaaaaatgaagaaaagttgctaaaggagttagaaaataatgaatttaccgaaaacgaattgaacgttgatagtatggatgttgatgataaaaatagcggtgttaaaagtgaggttgatgtacaggttgatgccgaagagaagagagaagctgtgatagacgaaaagttggaggtgattgcagacgaactcatgaagctagatgatagctcgaaaacacgcaatgttcttaatagaatacaagaattagaagatcagagagatgaactcttggaacagaaaaaatccataataaattcgcagaggccaggcgcgaggattttagcccgttcagaaaggaaaagaaccaaaatctcccgtggtaataaggtgaataagcagattgaaatattgactgacttagtcaattatagacattttaaagctatggaagatgtgatagcttggaaaaacgttttagcaaattcgatatggggttcctcacttcgcaaaaatgcatctggtaataaaaggagtggtgtcattgaaacagtagacgataaattaaaagatatagtgggccaaacctcaagaacagtaacacctgccccaaattaa

SEQ ID NO: 3904 - DNA, 3795 bp, Artificial Sequence
  Description of Artificial Sequence: Synthetic polynucleotide
atggtgttatataaaaggaaacctatattacttcctgatccaaaacctttaccattggatttgaatgtacaagtatggcatattgaagagactggagaatggttttctagttacgaagaatttttagaaaggtttgatttctacacacgccaccattttacatgcgaaatcactggtacttcttgcttgacttttttccaagctttagatagtgaggagacacaattcaaatacgtcgaagacagattcccattaaagttgagagaaccagttgcaagatttttacattttaacggaataagaaggttagatgcattggtggagaaagtttacgcaagatttaaaaatgactttttcccaggagaagttgtttatttacgtaaacagaaagactcttctaccacaagctctaattcccaacaaagtactcctcaacctgatgatatggtcgaaatcaacagtgttggtaatcctggcttaccgcagtaccaataccaaagacgttatgttatcaaagaaaaggtccaatttaacgcaacgataaatccagagagcagggaaattgtgatgcccgctcatactaaatacatgttgatagaagaagcagcttccagtaataaatccttcattgttgatcaaggacaaatttacagggaccgttccactttcactaagcacttaatcaaatgttttttcaagattactttacagagggcatcttctaaaatgggtgcaccttggtgtgtcaaaccggaatatttagcgatgtatggtttaacgatggaatggccaaaagatatgttaaaatataaagaagatgaacctgtcgtagcaagacgttccaacagtgccaatgtttcttccccagaaagtgaaaagaataaacgtcaaagtaaaagcagtggtaaaagtaacaccagtaacgatgcttctaacaaaaaagaaaccaagaaaaaaagaaagccaaccgaagtaaatgattctgagaataattcttctgaagaagacaagaagaagggtcaaaatgtcacaagtgaaacacattctaaaaaaaggaaaaaggaagccaatgaggaaccgaacacggaaaacgtcgaaagcgttcctacaccagctaatgcggagcctcaggctgtaacaataacgagcataatggatgacttggctttgccatatcaacatccaccgaacatctttccaaacttaacgtattataatgaaaaattagaatgtatttctttaggttctacaaaactttccagaccttttgattcttttggaaagcttttacaagcctatcagtttttgaatacgtttggttccaaaatttgtctctctcattttagccttgaccaattcattacttctttgaaatgtacagacccatatgagttaaagggcgaagttgttttagtgaacataagaacgcaaacgtctaaagaacaagaaattgaaaataacggcttaccgatgaaaaacaaagcagagactactactgaggaagactctgaaaacccaagtgactggcaaagaaattcttttattcgtgatatgataatgaaaagaaattccgacaaggttgagtacaagattgttcacgatgacccagcatccgatgatatacttgataatatcaatcataatgggtctgctcttctcattgaagtttttactgcgctcttacgtttgttcatcaacgaagaaggcgattggagttgcatcgtcgttgaaaactggataatagacgacaagggagtccttatggagagaaaagatgaaagaggggagggggaggcgaagcaaaaaagaaatgctcacggatactttttacaagataaggaaaagatcgacaacttgaaggacacattaaaggaaaacgcaacagaagttcaaaaagaaagtgacgctaaaaacgaaacaaattctgaatctgattctaaatctgattctgacagtgaagaaagagatcctaaattagaaaagtgtttgaactaccgcaatgttaactggatagaacgcttgacgaaaaggcaatttaataacagttactggttgataattttattaggagtcttagaagattgtagacatcttcccatgtatacagagtttattgattctttcatagaaaagatcatacccaaagatatatctgctactcaattgcccaaacagctttggagaaatttctgtagaaagctttctttcagtgacaaagtcaatgcgctttggatacttgtagatctcgtatctcatttttctccagatatcaaagctgctgtagatgattccatggaattatgtggtcaaattcgtagcgaaagattcaaagttgcgagagagttgaaaacggaggcagccgtcttaagtaatcttcaaggcgacttacaggcaattcaagagaagttaaataaaacagatgaaaacacaccatctgccgatggtgccgataaaaaagatgattccgaaagtaatagtgaaccaattgatcttattatcattgagaaaaagcaaaagttaattgaagagcaggataaaaaggtacaagctttacaatctgataaaaatttcctcgataattgtttatttgaaaacgatttgcaaagattaaagccgttgggattggatagatacgggaacaggtatttttggcttgatcacaatggtgttccatttcctcaatatcctgctggtatgaatgagacgccgaaaagtaacaatagtttgagttatcactccggtcgtttattaattcagggacctaaagcatcttctgcgaaattctttttgaacgtcagtgatgagcaattgagcaattggcaaaaaatcagaaattccgaaggaatatccgaggcaactagggaagtatttggtatctccaaaactagttccggatcttataattacgtagaaaatggaatagaggtcgaattattggacagtaatgatcgcgtaaacccacttatagagttgacacctattcaaaagaaaattatggatgaaacaccttctaggttgttattatctccagatcaatggtattgcattgacaagttagaggacttgtccagaataatggactggttagataattggggtcgcaaagagcatgatctcttgaggcaaatcagacccataatggaaagaattaaaagttcccttagcttgcgcgaccatgcgttatctttaacagcattcaccaaaaatgaagaaaagttgttgaaggagttagaaaataatgaatttaccgaaaacgaattgaacgttgatagtatggatgttgatgataaaaatagcggtgttaaaagtgaggttgatgtacaggttgatgccgaagagaagagagaagctgtgatagacgaaaagttggaggtgattgcagacgaactcatgaagttggatgatagcagtaaaacacgcaatgttcttaatagaatacaagaattagaagatcagagagatgaactcttggaacagaaaaaatccataataaattctcagaggccaggcgcgaggattttagcccgttctgaaaggaaaagaaccaaaatctcccgtggtaataaggtgaataagcagattgaaatattgactgacttagtcaattatagacattttaaagctatggaagatgtgatagcttggaaaaacgttttagcaaattctatatggggttcctctcttcgcaaaaatgcatctggtaataaaaggagtggtgtcattgaaacagtagacgataaattaaaagatatagtgggccaaacctccagaacagtaacacctgccccaaattga

SEQ ID NO: 3905 - DNA, 4212 bp, Saccharomyces cerevisiae
atgcctaaagaagaagatttccaattacctagaagaagagaggctgctaaaaacgtgaattataatgaaatggaaatagatactaaattagttcaacaaatacaaatagcggaaaaaagtggtgctaagaccaagggtagcaatagccaaactcccaggaattgtaaaaggacaagcaatccagctagtagaaacgagaaattcaagtaccaaaaattccttcatgataagaatacttgctggaactttatccctacattacccccttcgttcagaaagaatagcagattctctaacatacttgatctagatgatgccatgattgacttgaaaaagatgtctcttttcaatacagaatctgtccttttatctgcgaacgacactatttatatgatatcagagcctgctggcgagccttattatgttggcagagttgtaaattttgttagtaaaccagaattttctaacactattcatgaagctataaagacaacatcggtcttccctgctaaattttttcaagttagaatgaattggttttatcgtcctagggatattcaagagcacgtaaatacttttaacccaaggttggtgtatgcatcattacaccaggacatatgtcctatttcatcatacaggggaaaatgtagtatatttcataaagacgaagtttttgatgttcttcctaatgagaaggaatgcattatacgacccaatatcttttactttgatgaactttttgacagatatactttgaaatattacaaagtttacagcacggataaaatattaaataaatggaacagtaagtcgccatttctttatgttttgaataggagatttcgttatatctatacagaaccgaagtatccattggagaacgttttgaagaaatacgttttccatgaactagaggtaaacgaattaagtcctgcagactaccaatgggataaaagatgtcagttctgtaaagaatggtgtatccaaaaggagagcctttcatgtgatgaatgcggcgtttgtgcacatctatactgtatggatccgccacttgacaggaagccgaacaaagacgtcgtttggacctgcttcagttgcttacagaaacaacaaggtactaaggactcgcatgttaggtttctagaagaacaagcactggaactggattttattcgctctgtaagacaaaaaattgaagaaatttctagcaaagctatcaaagagaatgttggttataataccgaaaattgctggtttcaatacttaggaatatattccatttctcatattggtgacgcattaaatgattctatgttttttccatatcctttcaaaccctctagggtaggagtgaagtatcaatggaacggatgtaatcataatgtgccctggaggcggaactcgtatataagtgcaaattcagaagaagagcgaggctcaacgaaaacttcggaactagcatgggtacttgatgcatcaaaaattactactcgaaaattgagtgaatatattgaacaatgcaaaagcgaaatatgccctattctcaatgtgagaggtgagacttgtaatttcattgatgtagtcctaaagaatttattatttacaaattatgatacagcagaggcatttaaaaaatgtaaaagggagctttccagaaaatttttgaaagagccaagttttaccgccgtggagatccgaaagtttgaggaagctgtcgagaaatttgggagtgaattacgcccagtgtgtgagtatgtgggcactcaacctatgtcgatgattgttagattttattacaattggaaaaagactgaaagaggccttaccgtgagagggaaattgagtaagttatcaaagaataaaagaaaaaaagaaatcgctaatcatgaaaatgacgtagagacaaagtatatagatgattcttcttttgatactgagaaactctctttagcagaatcctccttccaatgcatgttttgtaaaacagattactccccgatgtggtatagagttactggaggttcagatgatgaaaagatcaagataagaatgcagacaggagtcaacgaaaaaacagaaatttcagagaaatcgcctgcccatagcaaaaagaatgaaaaacttggcgctctttgcattcgttgtgctcgtatgtggcgaagatacgcaattaagtgggtaccaccgcttgaaacattgagaaaaataacgggaacctgtcagaatagtttttattcagcgatagaagggattatagaggagaataacacaaacaagtttacgttatctccctttcaagctcataataaactactagaatgggaacttgttcaggattcagagctaattatcaggcaaagaatgaaagtttacaagaacccaaattcatttgtgaaaatgaagcggtattccatgacattccacacgcaactctacaaaatggctgtgagatcatatcgaaagaatgagtttcacccggagacgatgcaacgagatcttgagctatttatagaggacaacaaagaggtaagaaaagccatccctgaacaaaagccagaaagagcgaaaaacacaaaggacgaatttcccgtgaacataattcgacaatcacctggtactatcaaaacaagtgatacaagccgaaatcgcaagtgcaacgatgtatttatcgagaaggctagtaataacaatattcctaaaatcactaatgcttcgaatgatttgatagaaatttcaattaaaacaggcggcagttcttctggttcagtgtctgtagataaaggttttaaatttgtcaaatttgataacaaaacatttcagcgattacggaatagcttaaagttagtgaataataagctgccaaaatataatgaaccttcaacgaagaagatcaaaatgatcaatgacatagcgttaagtaatccgttaaacgaaccaaacggggcatcgtacaattatacagttatttcacattctaaggaaacttctgtcgcccttgaaaaataccatgatggtaataaaccgagcaaaatgttagagaaagacatgattttgaaacacactaagaataaaccaaaaaatcctgatacagcatgggcaaataatagcgcaaggactttttgtagtgtctgcaaagaaaaatttaacgacaatgacaactatgaggtagtatgtggtaattgtggacttacagtacactacttctgttatgctattaaactgccgaaagatatgaagaaaaacactaaccttaagacatttaaatggttatgtgacccttgttcaaatgacctcaatcctataatatcaacgacctaccaatgtagtatgtgtcctacgaaggactatgactatgatagatataggagccaatcatttaaaatatgtccagacgcattgaaatgcacgagcttagggacatgggtgcatttggtttgctcacttttcaatgaagatatcaaatatggaaacggacaatcaatgcaacctgcccttaataccactgctgtgcttattaaacatagtagatttacatgtggtgtgtgcaggataaatggaggtgggttagtgaagtgtaacaaatgccaatataggtatcatattacatgtgcacagaacagctccaattttaagcttatgtttgaaaagaaaaatatgtctgtagacaccactctaccgtgcataaaggatgtcaagcttaacgatacatacactttgagacctatactaatatgcgatagacacgatatcagcttagaaggaaacgaactttatccattatcgtacaagcctcaacatactctgtcatacatagaacaatactgcagatattataagtgcgaatctgaccatagtctagtggagttgagatattttgaacagcttagactgcgacacggcgaaatgccaggaaactcacacgactctgctattaaacccaaaatttacgtacttcctttcgaaaggacttgcccacattgtggtacaaacaaaagtttatactggtatgaagatattatttgccattcttgcaatttgagatcaggtgcccaagaactcgattttgatagcgcatctgctaatatctctaacgataacggtttaccagtcgaaattacccagcaattgatggaaggaattgagccagctatgtttgatatcgatatttcagaagctggtaccgacaaaaatacgcatccatcaagccagtaa

SEQ ID NO: 3906 - DNA, 4212 bp, Artificial Sequence
  Description of Artificial Sequence: Synthetic polynucleotide
atgcctaaagaagaagatttccaattacctagaagaagagaggctgctaaaaacgtgaattataatgaaatggaaatagatactaaattagttcaacaaatacaaatagcggaaaaaagtggtgctaagaccaagggtagcaatagccaaactcccaggaattgtaaaaggacaagcaatccagctagtagaaacgagaaattcaagtaccaaaaattccttcatgataagaatacttgctggaactttatccctacattacccccttctttcagaaagaatagcagattctctaacatacttgatttggatgatgccatgattgacttgaaaaagatgtctcttttcaatacagaatctgtccttttatctgcgaacgacactatttatatgatatctgagcctgctggcgagccttattatgttggcagagttgtaaattttgttagtaaaccagaattttctaacactattcatgaagctataaagacaacatctgtcttccctgctaaattttttcaagttagaatgaattggttttatcgtcctagggatattcaagagcacgtaaatacttttaacccaaggttggtgtatgcatctttacaccaggacatatgtcctatttcttcctacaggggaaaatgtagtatatttcataaagacgaagtttttgatgttcttcctaatgagaaggaatgcattataaggcccaatatcttttactttgatgaactttttgacagatatactttgaaatattacaaagtttacagcacggataaaatattaaataaatggaacagtaagtctccatttctttatgttttgaataggagatttcgttatatctatacagaaccgaagtatccattggagaacgttttgaagaaatacgttttccatgaattagaggtaaacgaattaagtcctgcagactaccaatgggataaaagatgtcagttctgtaaagaatggtgtatccaaaaggagagcctttcctgtgatgaatgcggcgtttgtgcacatctttactgtatggatccgccacttgacaggaagccgaacaaagacgtcgtttggacctgcttcagttgcttacagaaacaacaaggtactaaggactctcatgttaggtttttggaagaacaagcattggaattagattttattcgctctgtaagacaaaaaattgaagaaatttctagcaaagctatcaaagagaatgttggttataataccgaaaattgctggtttcaatacttaggaatatattccatttctcatattggtgacgcattaaatgattctatgttttttccatatcctttcaaaccctctagggtaggagtgaagtatcaatggaacggatgtaatcataatgtgccctggaggagaaacagttatataagtgcaaattctgaagaagagagaggctctacgaaaacttctgaattggcatgggtacttgatgcatccaaaattactactagaaaattgagtgaatatattgaacaatgcaaaagcgaaatatgccctattctcaatgtgagaggtgagacttgtaatttcattgatgtagtcttgaagaatttattatttacaaattatgatacagcagaggcatttaaaaaatgtaaaagggagctttccagaaaatttttgaaagagccaagttttaccgccgtggagatcagaaagtttgaggaagctgtcgagaaatttgggagtgaattacgcccagtgtgtgagtatgtgggcactcaacctatgtccatgattgttagattttattacaattggaaaaagactgaaagaggccttaccgtgagagggaaattgagtaagttatccaagaataaaagaaaaaaagaaatcgctaatcatgaaaatgacgtagagacaaagtatatagatgattcttcttttgatactgagaaactctctttagcagaatcctccttccaatgcatgttttgtaaaacagattactccccgatgtggtatagagttactggaggttctgatgatgaaaagatcaagataagaatgcagacaggagtcaacgaaaaaacagaaatttctgagaaatctcctgcccatagcaaaaagaatgaaaaacttggcgctctttgcattcgttgtgctcgtatgtggagaagatacgcaattaagtgggtaccaccgcttgaaacattgagaaaaataacgggaacctgtcagaatagtttttattctgcgatagaagggattatagaggagaataacacaaacaagtttacgttatctccctttcaagctcataataaattattggaatgggaacttgttcaggattctgagttgattatcaggcaaagaatgaaagtttacaagaacccaaattcttttgtgaaaatgaagagatattccatgacattccacacgcaactctacaaaatggctgtgagatcttatagaaagaatgagtttcacccggagacgatgcaaagagatcttgagttatttatagaggacaacaaagaggtaagaaaagccatccctgaacaaaagccagaaagagcgaaaaacacaaaggacgaatttcccgtgaacataattagacaaagtcctggtactatcaaaacaagtgatacaagcagaaatcgcaagtgcaacgatgtatttatcgagaaggctagtaataacaatattcctaaaatcactaatgcttctaatgatttgatagaaatttccattaaaacaggcggcagttcttctggttctgtgtctgtagataaaggttttaaatttgtcaaatttgataacaaaacatttcagagattaagaaatagcttaaagttagtgaataataagttaccaaaatataatgaaccttctacgaagaagatcaaaatgatcaatgacatagcgttaagtaatccgttaaacgaaccaaacggggcaagctacaattatacagttatttctcattctaaggaaacttctgtcgcccttgaaaaataccatgatggtaataaaccgagcaaaatgttagagaaagacatgattttgaaacacactaagaataaaccaaaaaatcctgatacagcatgggcaaataatagcgcaaggactttttgtagtgtctgcaaagaaaaatttaacgacaatgacaactatgaggtagtatgtggtaattgtggacttacagtacactacttctgttatgctattaaattaccgaaagatatgaagaaaaacactaaccttaagacatttaaatggttatgtgacccttgttctaatgacctcaatcctataatatctacgacctaccaatgtagtatgtgtcctacgaaggactatgactatgatagatataggagccaaagttttaaaatatgtccagacgcattgaaatgcacgagcttagggacatgggtgcatttggtttgcagccttttcaatgaagatatcaaatatggaaacggacaatctatgcaacctgcccttaataccactgctgtgcttattaaacatagtagatttacatgtggtgtgtgcaggataaatggaggtgggttagtgaagtgtaacaaatgccaatataggtatcatattacatgtgcacagaacagctccaattttaagcttatgtttgaaaagaaaaatatgtctgtagacaccactttaccgtgcataaaggatgtcaagcttaacgatacatacactttgagacctatattaatatgcgatagacacgatatcagcttagaaggaaacgaactttatccattatcttacaagcctcaacatactttatcttacatagaacaatactgcagatattataagtgcgaatctgaccatagtttagtggagttgagatattttgaacagcttagattaagacacggcgaaatgccaggaaactctcacgactctgctattaaacccaaaatttacgtacttcctttcgaaaggacttgcccacattgtggtacaaacaaaagtttatactggtatgaagatattatttgccattcttgcaatttgagatctggtgcccaagaactcgattttgatagcgcatctgctaatatctctaacgataacggtttaccagtcgaaattacccagcaattgatggaaggaattgagccagctatgtttgatatcgatatttctgaagctggtaccgacaaaaatacgcatccatccagccagtga

SEQ ID NO: 3907 - DNA, 1380 bp, Saccharomyces cerevisiae
atggttttagcaatggaaagtagagtggcaccggaaattcctgggctcattcaacctgggaatgtcacgcaagacttgaagatgatggtctgtaaattattgaattccccaaaacctacgaaaacattccctggttcccagcctgtgtcctttcagcattctgatgtggaagagaagctgcttgcgcatgattactacgtttgtgagaaaacagatggtctgcgggtgttgatgtttatagtgataaatcctgtgacgggtgagcaaggatgctttatgattgatagggaaaataactattatctggttaatggatttaggtttcccagattaccccaaaagaagaaagaagagctgctagagactcttcaagatggcaccttattagatggtgaacttgtcatacaaactaacccaatgacaaaattacaagagttgcgttatttaatgttcgattgtcttgctatcaatggtagatgtctcacacaatcaccaacaagttctagactagcccaccttggaaaagaattttttaaaccatacttcgatttaagagcagcgtaccctaatcgttgtactacttttccgttcaaaatttccatgaaacatatggatttcagttaccaattagtaaaagttgctaaaagtttagataaactaccacatctttctgatggtctgatatttactcctgtgaaggcaccttacactgccggcggaaaagattcattgttattaaaatggaagccagaacaagaaaacaccgtggacttcaaattgattttagatatcccaatggtggaggatccttctttgcctaaagatgatcggaacaggtggtattacaattatgacgttaagccagttttcagcttatatgtctggcaaggcggagctgatgtcaattcacgtttaaaacatttcgaccagcctttcgataggaaggaatttgaaatattagaaagaacatacagaaaatttgcagagttgagcgtttcagatgaggaatggcaaaatttgaagaacctagaacagccattaaatggtagaatagtagagtgcgcaaaaaaccaagagactggggcgtgggaaatgttaagattcagggatgataagttaaatggtaatcatacatcggtggtccagaaagttttggagagtatcaacgattcagtttcattggaggacctcgaggaaattgttggtgatattaaaaggtgctgggacgagagaagagcaaatatggctggtggtagtgggagaccactaccgtctcaaagtcaaaatgcgacattatctacctctaagccagtccattcacagcccccaagtaatgataaggagccaaaatatgtagacgaggatgattggtcggattag

SEQ ID NO: 3908 - DNA, 1380 bp, Artificial Sequence
  Description of Artificial Sequence: Synthetic polynucleotide
atggttttagcaatggaaagtagagtggcaccggaaattcctgggctcattcaacctgggaatgtcacgcaagacttgaagatgatggtctgtaaattattgaattccccaaaacctacgaaaacattccctggttcccagcctgtgtcctttcagcattctgatgtggaagagaagcttcttgcgcatgattactacgtttgtgagaaaacagatggtttgagagtgttgatgtttatagtgataaatcctgtgacgggtgagcaaggatgctttatgattgatagggaaaataactattatttggttaatggatttaggtttcccagattaccccaaaagaagaaagaagagttattggagactcttcaagatggcaccttattagatggtgaacttgtcatacaaactaacccaatgacaaaattacaagagttgcgttatttaatgttcgattgtcttgctatcaatggtagatgtctcacacaatctccaacaagttctagattggcccaccttggaaaagaattttttaaaccatacttcgatttaagagcagcgtaccctaatcgttgtactacttttccgttcaaaatttccatgaaacatatggatttcagttaccaattagtaaaagttgctaaaagtttagataaattaccacatctttctgatggtttgatatttactcctgtgaaggcaccttacactgccggcggaaaagattctttgttattaaaatggaagccagaacaagaaaacaccgtggacttcaaattgattttagatatcccaatggtggaggatccttctttgcctaaagatgatagaaacaggtggtattacaattatgacgttaagccagttttcagcttatatgtctggcaaggcggagctgatgtcaattctcgtttaaaacatttcgaccagcctttcgataggaaggaatttgaaatattagaaagaacatacagaaaatttgcagagttgagcgtttctgatgaggaatggcaaaatttgaagaacttggaacagccattaaatggtagaatagtagagtgcgcaaaaaaccaagagactggggcgtgggaaatgttaagattcagggatgataagttaaatggtaatcatacatctgtggtccagaaagttttggagagtatcaacgattctgtttctttggaggacctcgaggaaattgttggtgatattaaaaggtgctgggacgagagaagagcaaatatggctggtggtagtgggagaccattaccgtctcaaagtcaaaatgcgacattatctacctctaagccagtccattctcagcccccaagtaatgataaggagccaaaatatgtagacgaggatgattggtctgattga

SEQ ID NO: 3909 - DNA, 1353 bp, Saccharomyces cerevisiae
atgctacgtatgtcaacttcaagattcattgggcaaaggctgttcactacggcacgatctctccaggctgctaaaccggcaccaaaaggtaaaactcaaggattttccaaaaaatcatcttcagtctcatcttactcatctgcaaagagagttactcctggttcattgtataaaaactggacaaacaccacgcacaccgctcaattacaacagaccgccgttcctttggcattacctatcttcaactttgatgatatttccaagactttgaataaagtagtatcatattccaacaaacagtacaaatcccttcaccatttgggttccttcaagaagtcgcagttcaatgaactttttcaaaaaccggtttgtctagttcgtgaagatgcaacgaatagctttttgaagaaactagtatctcatcctgttaaaaaatttataatcactggagagccaggggtcgggaaaactgtactactctctcaagcgcatgcatatgcagttgattccaagcaaatcattattaacatatcatatcctgaattattcctgaacggtaggaatgacttttcttatgatgatgatttaaagcttttcatccaaccgatgtatttgaaaaagcttataaggaaaatattgaaggcaaatgaccctgcattgttaaaatctattgagctatccaaagactacaagttctcgaatgcaaacccaaagaatgcctctgtaaaaccatttgtcacattaaacaaaacgaaaaatacagttttagatttgttatccgtaatgacccacccgcataatcgtggaaaactaatgaaagccattattgatgagttatctgtccaatccaaggtgccaatcatgtttacagtggataatttttcaaaagtgttaactactgcatattctgcgtacagaaatacagagaataaacaaatatattccctggatttacaaatgggtaaattgatgatggacattatttcaggagagacgaaatttgctaatggtgagagttctactatattagctatatccggcgttgacaggacaaacaaaactttacccgtggcattgggcaagatcccagtagacccctatgttactagatatcactatgaaccgaagttcgtagaattgctccaaaaaggtaatgtcaccgaattcgaggttcctaaactgaacaaacaggaagttaacgaactaatcgattactacaaacaatcaaatgttttattagacaaggatatcacaggaaaaaagtgggagaacttgattgacgaaaaatatttcctaagtggtaacggtaacccaagagaattattgaaaagtttagtcctttcccataggtga

SEQ ID NO: 3910 - DNA, 1353 bp, Artificial Sequence
  Description of Artificial Sequence: Synthetic polynucleotide
atgcttcgtatgtctacttccagattcattgggcaaaggttgttcactacggcaagatctctccaggctgctaaaccggcaccaaaaggtaaaactcaaggattttccaaaaaatcttcttctgtcagctcttactcttctgcaaagagagttactcctggttctttgtataaaaactggacaaacaccacgcacaccgctcaattacaacagaccgccgttcctttggcattacctatcttcaactttgatgatatttccaagactttgaataaagtagtatcttattccaacaaacagtacaaatcccttcaccatttgggttccttcaagaagtctcagttcaatgaactttttcaaaaaccggtttgtttggttcgtgaagatgcaacgaatagctttttgaagaaattagtatctcatcctgttaaaaaatttataatcactggagagccaggggtcgggaaaactgtattactctctcaagcgcatgcatatgcagttgattccaagcaaatcattattaacatatcttatcctgaattattcttgaacggtaggaatgacttttcttatgatgatgatttaaagcttttcatccaaccgatgtatttgaaaaagcttataaggaaaatattgaaggcaaatgaccctgcattgttaaaatctattgagctttccaaagactacaagttcagtaatgcaaacccaaagaatgcctctgtaaaaccatttgtcacattaaacaaaacgaaaaatacagttttagatttgttatccgtaatgacccacccgcataatcgtggaaaattaatgaaagccattattgatgagttatctgtccaatccaaggtgccaatcatgtttacagtggataatttttccaaagtgttaactactgcatattctgcgtacagaaatacagagaataaacaaatatattccttggatttacaaatgggtaaattgatgatggacattatttctggagagacgaaatttgctaatggtgagagttctactatattagctatatccggcgttgacaggacaaacaaaactttacccgtggcattgggcaagatcccagtagacccctatgttactagatatcactatgaaccgaagttcgtagaattgctccaaaaaggtaatgtcaccgaattcgaggttcctaaattgaacaaacaggaagttaacgaattgatcgattactacaaacaaagcaatgttttattagacaaggatatcacaggaaaaaagtgggagaacttgattgacgaaaaatatttcttaagtggtaacggtaacccaagagaattattgaaaagtttagtcctttcccataggtga

SEQ ID NO: 3911 - DNA, 852 bp, Saccharomyces cerevisiae
atgccaggacacgaattggaagacgtaataaatcaacgtttgaacctatatgatgtattagaattaccgacccccctggacgtccataccatctacgatgatttgccccaaattaaacgcaaatacaggacccttgccctgaagtatcatcctgacaaacacccggacaatccatcaattatacacaaattccacttattatcgaccgcaactaatatcctcaccaatgcagacgtgagaccccattacgaccgctggttaattgagttcctacggaaaacaaacgacattgaaagaaataaacttatacaaaagctggaagaatctgaatcgagtacgatacccaccaccacaccacatcctgatttattgcaaatccaacgccacggcgagctactcaggaaactaaaacatttcaacttgccctatggtgactggaaacatctcaacacacaagaccaagaaaatgcttcgcaacatccgtattacgattgctctactttgagaattgtccttgacaacttcctgcaatcaaataataaatcaaactgcttatctcatttgcgcaatcaagtattcatcacgctaagtgctaatgaaatctacgacatctacttctctgaaagaaacaactactcgaaggatgattcaatcatcatatatactgtattcgatactcccatcacagcgcagcacgtattccgaaactggtcaagtgggaacctcatacccacggtcaaggatatttcgcccttgatcccgctacattactactctgattttaatttggagacggaactgaatgacgatattgcaagactggtctctaatgaacctatcctactcgactag

SEQ ID NO: 3912 - DNA, 852 bp, Artificial Sequence
  Description of Artificial Sequence: Synthetic polynucleotide
atgccaggacacgaattggaagacgtaataaatcaacgtttgaacttatatgatgtattagaattaccgacccccttagacgtccataccatctacgatgatttgccccaaattaaacgcaaatacaggacccttgccttgaagtatcatcctgacaaacacccggacaatccatctattatacacaaattccacttattatctaccgcaactaatatcctcaccaatgcagacgtgagaccccattacgaccgctggttaattgagttcttaagaaaaacaaacgacattgaaagaaataaacttatacaaaagttggaagaatctgaaagtagtacgatacccaccaccacaccacatcctgatttattgcaaatccaacgccacggcgagttactcaggaaattgaaacatttcaacttgccctatggtgactggaaacatctcaacacacaagaccaagaaaatgcttctcaacatccgtattacgattgctctactttgagaattgtccttgacaacttcttacaaagcaataataaaagtaactgcttatctcatttgcgcaatcaagtattcatcacgttgagtgctaatgaaatctacgacatctacttctctgaaagaaacaactactccaaggatgattctatcatcatatatactgtattcgatactcccatcacagcgcagcacgtattcagaaactggtctagtgggaacctcatacccacggtcaaggatatttctcccttgatcccgcttcattactactctgattttaatttggagacggaattgaatgacgatattgcaagattggtctctaatgaacctatcttactcgactga

SEQ ID NO: 3913 - DNA, 384 bp, Saccharomyces cerevisiae
atgtcaagcactaatggaaacgcaccagcgacaccttcctcggatcaaaatcctctccccacgaggttcgaagtggagctcgaatttatccagtcactggcaaacatccaatacgtaacgtacttactcactcaacagcagatctggaagtctcctaacttcaaaaactacttgaaatacctggagtactggtgcaaccccccttattcgcaatgcattgtgtatccaaactgtctcttcattttaaagctgttgaacgggttcatggagtcggcgatcgttaatgaagatggcctgctggaagggctagacgagctgcccaagatcattcaattacaaggcccgcaatggatgaatgaaatggtagaaagatgggccaactga

SEQ ID NO: 3914 - DNA, 384 bp, Artificial Sequence
  Description of Artificial Sequence: Synthetic polynucleotide
atgtctagcactaatggaaacgcaccagcgacaccttccagtgatcaaaatcctctccccacgaggttcgaagtggagctcgaatttatccagtctttggcaaacatccaatacgtaacgtacttactcactcaacagcagatctggaagtctcctaacttcaaaaactacttgaaatacttggagtactggtgcaaccccccttattctcaatgcattgtgtatccaaactgtctcttcattttaaagttgttgaacgggttcatggagtctgcgatcgttaatgaagatggcttattggaagggttggacgagttgcccaagatcattcaattacaaggcccgcaatggatgaatgaaatggtagaaagatgggccaactga

SEQ ID NO: 3915 - DNA, 1143 bp, Saccharomyces cerevisiae
atgtctagcaaatggtttaatgctatacacctactggtgtgcccgttgacggtactggtaggatatctcatgaacgcgtatggctacggtgcggcgctgcaagcaaccctgaataaggatggtctggtaaatgctatgttggtaaagaaagggtggttttggacttccttggtcggatggtggtgtattatacgctaccgtgcggtgccgggggcaaccggcagagaccgaagacacattgtccagtcattcaaaaggtatgccatactgacagtgtggtggtacgtattcacgcaaggtatatggtttggcgtaggccccatcatggacttggtattcgtatatacgggtggccattgtcactatgacgtcttcgatgatgcaggtcacgtgaacgaagacttccagggttctgtcacccggactaatcgcgcgttggcgctcattcacaatgtcctcactttgcacggacaccaccaagaacaccgtcagcaacaactctgggaccgctccatagggtcgatccagggcgccctgcaggcgacgcaaccgaaaaccccaaaaaacgtaacggccagcgctgccgctgccatcaatacttttattcatgaccagatgcacaggtggcaaggtccgttaaccacctcggcacagtgcagacgttttggaggccattgggctggaggacacgatccatccgggcacgtgttcttggccaccttgatgtgcatgtttcttctaggtgagctacgtgtgtttgggcgtcgtgcactggctcacttgtacgcgcagaaatggcagcttgtacgattggtgacccgccttttcgacactggaccgctatggacgtggcggcggtgtggcggcggctcaatgacctgtggcgcccgtttgtggcgtgcgatagtcgagccgcctgtcacgtgcgcggccgccctgctccgtttgacgcgatgcatagcatgcgaccacccagtaatcatactgctgacgctattggtcacgtggttatggcagctgctgttgactgcggtggcgtcccgtttccacaccgtacgtgagcacatgtctggattgctagctgcgtacatagtgacaggccttgtctacgctcgcgacgcagccgcgctacgtccagtatga

SEQ ID NO: 3916 - DNA, 1143 bp, Artificial Sequence
  Description of Artificial Sequence: Synthetic polynucleotide
atgtctagcaaatggtttaatgctatacacttgttggtgtgcccgttgacggtattggtaggatatctcatgaacgcgtatggctacggtgcggcgttgcaagcaaccttgaataaggatggtttagtaaatgctatgttggtaaagaaagggtggttttggacttccttggtcggatggtggtgtattatacgctaccgtgcggtgccgggggcaaccggcagagacagaagacacattgtccagtctttcaaaaggtatgccatattaacagtgtggtggtacgtattcacgcaaggtatatggtttggcgtaggccccatcatggacttggtattcgtatatacgggtggccattgtcactatgacgtcttcgatgatgcaggtcacgtgaacgaagacttccagggttctgtcaccagaactaatcgcgcgttggcgctcattcacaatgtcctcactttgcacggacaccaccaagaacaccgtcagcaacaactctgggaccgctccatagggtctatccagggcgccttgcaggcgacgcaaccgaaaaccccaaaaaacgtaacggccagcgctgccgctgccatcaatacttttattcatgaccagatgcacaggtggcaaggtccgttaaccacctctgcacagtgcagacgttttggaggccattgggctggaggacacgatccatccgggcacgtgttcttggccaccttgatgtgcatgtttcttttgggtgagttgcgtgtgtttgggcgtcgtgcattggctcacttgtacgcgcagaaatggcagcttgtaagattggtgacccgccttttcgacactggaccgttatggacgtggaggagatgtggcggcggctctatgacctgtggcgcccgtttgtggcgtgcgatagtcgagccgcctgtcacgtgcgcggccgccttactccgtttgacgcgttgcatagcatgcgaccacccagtaatcatattattgacgttattggtcacgtggttatggcagttattattgactgcggtggcgtcccgtttccacaccgtacgtgagcacatgtctggattgttggctgcgtacatagtgacaggccttgtctacgctcgcgacgcagccgcgttgcgtccagtatga

SEQ ID NO: 3917 - DNA, 1803 bp, Saccharomyces cerevisiae
atgaagatcacagaaaaattagagcaacatagacagacctctggcaagcccacttactcattcgagtacttcgtcccgaagactacacaaggtgtacagaacctgtatgaccggatggaccggatgtacgaggcttctttgccccaatttattgacatcacctggaatgcaggcggtggacggttgtcacatctgtccacggacttggttgcgacagcgcagtctgtgcttggtttggaaacgtgcatgcaccttacctgcaccaatatgcccatttcgatgattgacgacgctttagaaaacgcttatcactccggttgccagaacatcctagcgctgagaggagatcctcctagggacgcagaaaactggactcccgttgaaggtggcttccagtatgccaaggacttgattaagtatatcaagtccaagtacggtgaccatttcgctatcggcgttgccggctacccggagtgccatccggagttgcctaacaaagacgtgaagcttgatctcgagtatttgaagcagaagatcgacgccggcggcgacttcatcatcactcagatgttttacgatgttgataatttcatcaactggtgttcccaagttagagctgcgggcatggacgtgcccattattcccgggatcatgccgatcactacctacgcggccttcttgagaagggcccaatggggccaaatctccatccctcaacatttctcgtcccgattggatcctatcaaggacgatgacgagttggtccgtgatatcggaactaacttgatcgtggaaatgtgtcaaaaattgctcgacagtggttacgtttctcacttgcacatctacaccatgaacttggaaaaagcgcctctcatgattctggaaagattgaacattctacctacggaatcagagttcaatgcacatccattggccgtgttgccatggagaaaatctttgaatccaaagcgtaaaaacgaggaagtcagacctatcttctggaagagaagaccttactcctatgtcgcaagaacctctcaatgggccgtggacgaattccccaacggtagattcggtgattcgtcttctcctgcgttcggtgacttggatctgtgtggttcagacttgatcaggcaatcagcgaacaaatgtctcgaattatggtccacccctacttccatcaacgacgtcgccttcttggtcatcaactacttgaatggaaacttgaagtgtttaccttggagtgatatccccatcaatgatgaaataaatccaatcaaagcacacttgattgagctgaaccagcattctatcatcactataaactctcaacctcaagtcaacggcattaggtccaatgacaaaattcatggttggggacccaaggatggttacgtttaccagaagcaatatttggaatttatgttgcccaagactaagttgcccaagttgattgacaccttgaaaaacaatgagttcttgacctacttcgccatcgactctcaaggtgacctgctaagtaatcatccagacaactccaagtccaacgctgtgacttggggtattttccccggcagagaaattcttcaacctaccattgtcgagaaaatttcgttcttagcgtggaaggaggagttctatcatatcttgaatgaatggaaactaaacatgaataaatacgataaaccgcatagtgcccaattcattcagtccttgattgacgattactgcttggtcaatattgttgacaatgactacatttctccagatgatcaaatccattccatcctactaagcctataa

SEQ ID NO: 3918 - DNA, 1803 bp, Artificial Sequence
  Description of Artificial Sequence: Synthetic polynucleotide
atgaagatcacagaaaaattagagcaacatagacagacctctggcaagcccacttactctttcgagtacttcgtcccgaagactacacaaggtgtacagaacttatatgacagaatggacagaatgtacgaggcttctttgccccaatttattgacatcacctggaatgcaggcggtggaagattgtctcatttgtccacggacttggttgcgacagcgcagtctgtgcttggtttggaaacgtgcatgcaccttacctgcaccaatatgcccatttccatgattgacgacgctttagaaaacgcttatcactccggttgccagaacatcttagcgttaagaggagatcctcctagggacgcagaaaactggactcccgttgaaggtggcttccagtatgccaaggacttgattaagtatatcaagtccaagtacggtgaccatttcgctatcggcgttgccggctacccggagtgccatccggagttgcctaacaaagacgtgaagcttgatctcgagtatttgaagcagaagatcgacgccggcggcgacttcatcatcactcagatgttttacgatgttgataatttcatcaactggtgttcccaagttagagctgcgggcatggacgtgcccattattcccgggatcatgccgatcactacctacgcggccttcttgagaagggcccaatggggccaaatctccatccctcaacatttctcttccagattggatcctatcaaggacgatgacgagttggtccgtgatatcggaactaacttgatcgtggaaatgtgtcaaaaattgctcgacagtggttacgtttctcacttgcacatctacaccatgaacttggaaaaagcgcctctcatgattttggaaagattgaacattttacctacggaaagtgagttcaatgcacatccattggccgtgttgccatggagaaaatctttgaatccaaagcgtaaaaacgaggaagtcagacctatcttctggaagagaagaccttactcctatgtcgcaagaacctctcaatgggccgtggacgaattccccaacggtagattcggtgattcttcttctcctgcgttcggtgacttggatttatgtggttctgacttgatcaggcaaagtgcgaacaaatgtctcgaattatggtccacccctacttccatcaacgacgtcgccttcttggtcatcaactacttgaatggaaacttgaagtgtttaccttggagtgatatccccatcaatgatgaaataaatccaatcaaagcacacttgattgagttgaaccagcattctatcatcactataaactctcaacctcaagtcaacggcattaggtccaatgacaaaattcatggttggggacccaaggatggttacgtttaccagaagcaatatttggaatttatgttgcccaagactaagttgcccaagttgattgacaccttgaaaaacaatgagttcttgacctacttcgccatcgactctcaaggtgacttattaagtaatcatccagacaactccaagtccaacgctgtgacttggggtattttccccggcagagaaattcttcaacctaccattgtcgagaaaatttctttcttagcgtggaaggaggagttctatcatatcttgaatgaatggaaattgaacatgaataaatacgataaaccgcatagtgcccaattcattcagtccttgattgacgattactgcttggtcaatattgttgacaatgactacatttctccagatgatcaaatccattccatcttattaagcttgtga

SEQ ID NO: 3919 - DNA, 1935 bp, Saccharomyces cerevisiae
atgaatctcaatgaaagctacctagatgctgagataccgaagggtcaattgaagcatagtaaaagtgggaattttgagggtattccaatcgtggcaacgacttcagaaccaacgacatcggttaatctagatgaaacattcttcaagaaggcgcctatagcaatgccaatatgcgatgatcattctgttagtaaatctacctctgtaaattctttgaatacaacatctttggcatccagaagatctcctttgcaaacaaaaaaattgcaagctaaaaataatttattgtcagcagatttggcaaagagcaatgatgatacaacgagagcactaaacagtccaaaaaaggatttcggtccttatttggacagcgagaatgacatcaggagtcgcttggccgaaagcatatattctatggaaacatctataagaggatcggaactacagagacggccgtacgtaagtaacgaaattcctaatgtattcaagttttcgaagttcaatagtaactgcaagttaaatgagagccagactctctgtgacaaaaatttcttcatattcacgtcagcgggtaaaccgatctattgcatgcacggcaaagatgaacagatcatgtcatatacagggctcgttaatacggtaataagctacttccaagtcaatggaccatcggaattgaaaactatatccactttaacttctggtaaaaggcttacttttttggataaatcacctatattactaatggctcaatccgaaagaggcgagtcctcgaacgaattgttgaatcagttggattttttatattcgtatattctttcgtctttaagtgaacgccaattacttaggttattttccaaaagagaaaatttcgacctgagaaattatctagaaagcacagattttgaaaatttagacgaaatatgttcactaatctgtaacagaatgttcccggatttactattgaactctttacaatgcttaccatttaaccattcttcaagattaaagttgcagaatgtggttttacagcaactggagaaaaggcaggacattcccagggggaccttactgtacggcttgataattgcgcctcagaataaattgtgctgtgttcttcgacccagaggccatactttacacactacagatttacatcttctattttgcctaatatctcatcaatttcaaaatttagacgaaactcaggaactttgggtacccatttgttttcccaagttcaattcgagtggttttctttattgttatattaagtttctacctaatgatactcacagcaatgagaaatcggcactagtattaataagtgcacaaaaggatgcattcttttcattgaagtcgtttagtgacgagttgattattaaactcgaagaagagaagctattgaaaaagataaatacttcaaaagggttcaagcttagcgatataccagcaccaatggttcatcatttcatatataaatcgaagcaaaacgttcaatatgttatgccgcacttcgaagtcaacagtaacatcgcactggattcttcacaggggctagaatatgaattgaaattgaagacatactaccaacagttacatggcacggtagtgagagataatggcaatttgttaagtaggtctatgttaaattttgttagatggagttccaaagacaatgaggacttggcgatggacgaaacacaaatggatttttctgaattggatgagtacattattggaaattcatcattcaaacaagaatcggttaatatggtaggaatggcgtgggtgacgcccacttttgaattgtatctgattggaaataatgggattgttgacaaaagggttttattcaagagtgcgagaaaagtagctaattggtgtcaaaaacacgagtcgagactatttataagtgatggggccgtgttttaa

SEQ ID NO: 3920 - DNA, 1935 bp, Artificial Sequence
  Description of Artificial Sequence: Synthetic polynucleotide
atgaatctcaatgaaagctacttggatgctgagataccgaagggtcaattgaagcatagtaaaagtgggaattttgagggtattccaatcgtggcaacgacttctgaaccaacgacatctgttaatttggatgaaacattcttcaagaaggcgcctatagcaatgccaatatgcgatgatcattctgttagtaaatctacctctgtaaattctttgaatacaacatctttggcatccagaagatctcctttgcaaacaaaaaaattgcaagctaaaaataatttattgagtgcagatttggcaaagagcaatgatgatacaacgagagcattgaacagtccaaaaaaggatttcggtccttatttggacagcgagaatgacatcaggagtcgcttggccgaaagcatatattctatggaaacatctataagaggatctgaattacagagaagaccgtacgtaagtaacgaaattcctaatgtattcaagttttccaagttcaatagtaactgcaagttaaatgagagccagactctctgtgacaaaaatttcttcatattcacgtctgcgggtaaaccgatctattgcatgcacggcaaagatgaacagatcatgtcttatacagggctcgttaatacggtaataagctacttccaagtcaatggaccatctgaattgaaaactatatccactttaacttctggtaaaaggcttacttttttggataaatctcctatattattgatggctcaatccgaaagaggcgagtccagtaacgaattgttgaatcagttggattttttatattcttatattctttcttctttaagtgaacgccaattacttaggttattttccaaaagagaaaatttcgacttgagaaattatttggaaagcacagattttgaaaatttagacgaaatatgttctttgatctgtaacagaatgttcccggatttattattgaactctttacaatgcttaccatttaaccattcttctagattaaagttgcagaatgtggttttacagcaattggagaaaaggcaggacattcccagggggaccttattgtacggcttgataattgcgcctcagaataaattgtgctgtgttcttcgtcccagaggccatactttacacactacagatttacatcttttattttgcttaatatctcatcaatttcaaaatttagacgaaactcaggaactttgggtacccatttgttttcccaagttcaatagtagtggttttctttattgttatattaagtttttacctaatgatactcacagcaatgagaaatctgcattggtattaataagtgcacaaaaggatgcattcttttctttgaagagctttagtgacgagttgattattaaactcgaagaagagaagttgttgaaaaagataaatacttctaaagggttcaagcttagcgatataccagcaccaatggttcatcatttcatatataaatccaagcaaaacgttcaatatgttatgccgcacttcgaagtcaacagtaacatcgcattggattcttctcaggggttggaatatgaattgaaattgaagacatactaccaacagttacatggcacggtagtgagagataatggcaatttgttaagtaggtctatgttaaattttgttagatggagttccaaagacaatgaggacttggcgatggacgaaacacaaatggatttttctgaattggatgagtacattattggaaattcttctttcaaacaagaatctgttaatatggtaggaatggcgtgggtgacgcccacttttgaattgtatttgattggaaataatgggattgttgacaaaagggttttattcaagagtgcgagaaaagtagctaattggtgtcaaaaacacgagagcagattatttataagtgatggggccgtgttttga

SEQ ID NO: 3921 - DNA, 765 bp, Saccharomyces cerevisiae
atgtctgctccagaagctcaacaacaaaagagaggtggtttcggtggccgtaacagaggccgtccaaacagaagaggaccaagaaacactgaagaaaagggatgggttccagttaccaaactaggtagattagtcaaggctggtaagattaccaccattgaagaaatcttcttgcactctttgccagtcaaggaattccaaatcattgacactttgttgccaggtttgcaagacgaagtcatgaacatcaagccagttcaaaagcaaaccagagccggtcaaagaaccagatttaaggctgttgtcgttgttggtgactctaacggtcacgttggtttgggtatcaagaccgccaaggaagttgctggtgccatcagagctggtatcattattgccaagttgtccgttatcccaatcagaagaggttactggggtaccaacttgggtcaaccacattctttggccaccaagaccactggtaagtgtggttccgtcactgttagattgatcccagccccaagaggttctggtatcgtcgcttctccagctgtcaaaaagttgttgcaattggctggtgttgaagatgtctacacccaatctaacggtaagactagaactttggaaaacaccttgaaggctgctttcgttgctattggtaacacatacggtttcttgactccaaacttgtgggccgaacaaccattgccagtttctccattggacatctactccgatgaagcttctgctcaaaagaagagattctaa

SEQ ID NO: 3922 - DNA, 765 bp, Artificial Sequence
  Description of Artificial Sequence: Synthetic polynucleotide
atgtctgctccagaagctcaacaacaaaagagaggtggtttcggtggccgtaacagaggccgtccaaacagaagaggaccaagaaacactgaagaaaagggatgggttccagttaccaaattgggtagattagtcaaggctggtaagattaccaccattgaagaaatcttcttgcactctttgccagtcaaggaattccaaatcattgacactttgttgccaggtttgcaagacgaagtcatgaacatcaagccagttcaaaagcaaaccagagccggtcaaagaaccagatttaaggctgttgtcgttgttggtgactctaacggtcacgttggtttgggtatcaagaccgccaaggaagttgctggtgccatcagagctggtatcattattgccaagttgtccgttatcccaatcagaagaggttactggggtaccaacttgggtcaaccacattctttggccaccaagaccactggtaagtgtggttccgtcactgttagattgatcccagccccaagaggttctggtatcgtcgcttctccagctgtcaaaaagttgttgcaattggctggtgttgaagatgtctacacccaatctaacggtaagactagaactttggaaaacaccttgaaggctgctttcgttgctattggtaacacatacggtttcttgactccaaacttgtgggccgaacaaccattgccagtttctccattggacatctactccgatgaagcttctgctcaaaagaagagattctga

SEQ ID NO: 3923 - DNA, 1578 bp, Saccharomyces cerevisiae
atgtctcaagaacagtacacagaaaacttgaaggttatcgttgccgaaaaactggctggtataccaaactttaacgaagatatcaagtatgttgcggagtatattgtcttattgatcgttaacggtggtactgttgaatctgtcgtagacgagctggctagtttgtttgatagtgtttcgagagatacgcttgcaaatgttgttcaaacagcctttttcgcattagaagctctgcaacagggagaaagtgctgaaaatattgtttccaaaattagaatgatgaatgcgcaaagcttgggacaatcggatatcgcacaacagcaacaacagcaacaacaacaacagcaaccagacatcgcgcaacagcaacctcaacagcaacctcaacagcaacctcaacagcaacctcaacagcaacctcaacagcaacctcaacagcaacctcaacagcaacctcaacagcaacctcaacttcaaccacttcagccacaactagggacccagaatgcaatgcagacagatgctcctgcaactccatcccccatatcagccttttccggcgttgttaacgctgcagctccccctcagtttgcgcctgtagataacagccaaaggttcactcaacgtggcggaggcgccgttggaaagaatcgtagaggtggtcgcggtgggaaccgtggaggacgcaacaataattccacacgttttaatccgttagcaaaagcacttggaatggcgggtgagagtaatatgaacttcactccaaccaagaaagaggggcgttgcagattgtttcctcactgtcctcttggtagatcatgcccacatgcacacccaactaaggtatgtaatgaatatccaaattgtccaaagcctcccggaacttgtgagtttttacatccaaatgaagatgaagagttgatgaaggaaatggaaagaactcgtgaagaatttcaaaaaagaaaagctgatttattggcggcaaaaaggaaaccggtacaaactggtatcgttctgtgtaaatttggggctctgtgttccaatccatcatgcccatttggtcatccaacaccagcaaatgaagatgcgaaagtcattgatctaatgtggtgtgacaagaatttgacatgtgataatcctgagtgtagaaaggcccactcttcattgtcgaagatcaaggaagtaaaaccaataagccagaagaaagcagctccacctccggttgaaaagtccttagaacaatgtaagttcggtacgcactgcaccaataaacgttgcaaatatagacatgctcgttctcatattatgtgccgtgaaggagcaaactgtactagaattgattgtttatttggccatccaattaatgaagattgtagatttggtgtcaattgtaagaatatttactgtctattcagacatcctccaggcagagtacttccggaaaagaaaggcgctgcacccaattcaaacgttcctaccaatgaaaggccatttgcattgccagaaaacgcaataattgaaaatgctcctccgcaaaccagttttacgcaccaagaacaagatacggaaatgaactga

SEQ ID NO: 3924 - DNA, 1578 bp, Artificial Sequence
  Description of Artificial Sequence: Synthetic polynucleotide
atgtctcaagaacagtacacagaaaacttgaaggttatcgttgccgaaaaattggctggtataccaaactttaacgaagatatcaagtatgttgcggagtatattgtcttattgatcgttaacggtggtactgttgaatctgtcgtagacgagttggctagtttgtttgatagtgtttctagagatacgcttgcaaatgttgttcaaacagcctttttcgcattagaagctttacaacagggagaaagtgctgaaaatattgtttccaaaattagaatgatgaatgcgcaaagcttgggacaatctgatatcgcacaacagcaacaacagcaacaacaacaacagcaaccagacatcgcgcaacagcaacctcaacagcaacctcaacagcaacctcaacagcaacctcaacagcaacctcaacagcaacctcaacagcaacctcaacagcaacctcaacagcaacctcaacttcaaccacttcagccacaattagggacccagaatgcaatgcagacagatgctcctgcaactccatcccccatatctgccttttccggcgttgttaacgctgcagctccccctcagtttgcgcctgtagataacagccaaaggttcactcaacgtggcggaggcgccgttggaaagaatcgtagaggtggtcgcggtgggaaccgtggaggacgcaacaataattccacacgttttaatccgttagcaaaagcacttggaatggcgggtgagagtaatatgaacttcactccaaccaagaaagaggggcgttgcagattgtttcctcactgtcctcttggtagatcttgcccacatgcacacccaactaaggtatgtaatgaatatccaaattgtccaaagcctcccggaacttgtgagtttttacatccaaatgaagatgaagagttgatgaaggaaatggaaagaactcgtgaagaatttcaaaaaagaaaagctgatttattggcggcaaaaaggaaaccggtacaaactggtatcgttttatgtaaatttggggctctttgttccaatccaagttgcccatttggtcatccaacaccagcaaatgaagatgcgaaagtcattgatttgatgtggtgtgacaagaatttgacatgtgataatcctgagtgtagaaaggcccactcttctttgtccaagatcaaggaagtaaaaccaataagccagaagaaagcagctccacctccggttgaaaagtccttagaacaatgtaagttcggtacgcactgcaccaataaacgttgcaaatatagacatgctcgttctcatattatgtgccgtgaaggagcaaactgtactagaattgattgtttatttggccatccaattaatgaagattgtagatttggtgtcaattgtaagaatatttactgtttgttcagacatcctccaggcagagtacttccggaaaagaaaggcgctgcacccaatagcaacgttcctaccaatgaaaggccatttgcattgccagaaaacgcaataattgaaaatgctcctccgcaaaccagttttacgcaccaagaacaagatacggaaatgaactga

SEQ ID NO: 3925 - DNA, 381 bp, Saccharomyces cerevisiae
atgttttatctaagtgacatcgaggaagaagcctcggctggggctgaaccaacttataatttctgggaagttttgttattctccaatactcaagaaaacctcgtcaccgttgtcggagagttgcacacacttaccgatcgtgtggttcattacaaaattgagcctgaatcaagggaagttactgccacaacactgccatctttgttagcacttttgctagaaaaaaggaaccaggcgagacgtttatatagggatgtgctttcaatgaaaatgtcagaactggactgggacatcgacgatttgttcacacagttacaagaagagctaacaagaactgatgacactctttctatgtatcctaggagaaggttctatcactag

SEQ ID NO: 3926 - DNA, 381 bp, Artificial Sequence
  Description of Artificial Sequence: Synthetic polynucleotide
atgttttatttgagtgacatcgaggaagaagcctctgctggggctgaaccaacttataatttctgggaagttttgttattctccaatactcaagaaaacctcgtcaccgttgtcggagagttgcacacacttaccgatcgtgtggttcattacaaaattgagcctgaaagtagggaagttactgccacaacattaccatctttgttagcacttttgttggaaaaaaggaaccaggcgagacgtttatatagggatgtgctttctatgaaaatgtctgaattagactgggacatcgacgatttgttcacacagttacaagaagagttgacaagaactgatgacactctttctatgtatcctaggagaaggttctatcactga

SEQ ID NO: 3927 - DNA, 2304 bp, Saccharomyces cerevisiae
atgggttccaaaagaagattctcgtccgaacacccggatccagttgagacctctattcctgagcaggccgccgagattgcggaagaattatccaaacagcatcctcttccatccgaagagccacttgtccatcatgatgctggtgaattcaagggcttgcaacgtcaccatacttcagcagaagaggcccaaaaacttgaagatggaaaaataaatccatttaccggtagggagtttacaccaaaatatgttgatatcctgaaaattagaagagaattgccagtacatgcccagagagatgagtttttaaaactttatcaaaataaccagattatggtttttgttggtgaaacaggttccggtaaaacgacacaaattcctcaattcgttttattcgatgagatgccacacttagagaacactcaagttgcatgtactcaacctcgtcgtgtcgcagcaatgtctgttgcacagagagttgctgaggaaatggatgtcaagttgggcgaagaagttggttattctatcagattcgaaaataaaacttctaataaaacgatattgaagtatatgactgatggtatgttgttgagagaggcaatggaagaccatgacttgtcgcgttattcatgtatcattctggatgaagcgcacgaacgtacactagctactgatattttgatgggtcttttgaagcaagtagtcaagaggagacctgatttgaagataattattatgtctgctactctggatgcagagaagttccaacgctacttcaacgatgctccattacttgccgttccgggcagaacatatccagttgagctatactatacaccggaatttcaaagggactatttagattctgccattcgtactgttttgcaaattcatgccactgaagaggctggcgatattttgttatttttaactggtgaagatgaaattgaagacgctgtcagaaagatttccttagaaggtgatcaattggttagagaagagggatgcggacctttatccgtatacccactgtatggttcattaccaccgcatcaacaacaaagaatattcgagcctgctccagagtcacataatggtagaccaggcaggaaagttgttatctccacgaacatcgctgaaacttctttaacaattgatggtattgtctacgtcgttgacccaggattttcaaagcaaaaagtttacaatccaagaattagagttgagtctttacttgtttcccctatctccaaggcttctgcccaacaaagagctggtcgtgctggtcgtacaaggcctggtaaatgtttcagattatacactgaagaggcattccaaaaggaactgatagagcaaagttacccagaaattttacgttccaatttatcctccaccgttctagaactaaaaaaattaggtattgatgacttggtccatttcgattttatggatccaccggctccggaaacaatgatgagagcccttgaagaactaaattatttggcatgtctggacgacgaaggtaacttaacacccctaggtagattggcatcccagtttcccttggatcctatgctagcggtgatgttaattgggtcctttgagttccaatgttctcaagaaatactaactatagtggccatgctatcggttccaaacgtgtttattcgcccaacaaaggacaagaagcgagcagatgatgccaagaatatctttgctcatccagacggtgatcatatcaccttactaaatgtatatcatgcgttcaaatcggatgaagcttatgaatatggtatccataagtggtgccgtgaccactatctaaattacaggtccctttccgctgctgataatatccgctcccaattagaaagattaatgaaccgttacaacctagaattaaacactacagactatgaaagccctaaatactttgacaacatcagaaaggctcttgcgtctgggtttttcatgcaagtagcaaaaaaaagatcgggagctaaaggatacatcacagttaaagataaccaagatgttctgatccatcctagtacggttcttggccacgacgcagaatgggtcatttacaatgaatttgtgctcacatcgaagaactacataagaactgtgacctcggtcaggcccgaatggctgattgaaatagcgcctgcatactacgacttaagcaatttccaaaaaggtgatgtcaaattatctttggaaaggatcaaggaaaaagttgatagattaaacgagttgaaacaaggtaaaaacaaaaagaagagtaagcactccaagaaatag

SEQ ID NO: 3928 - DNA, 2304 bp, Artificial Sequence
  Description of Artificial Sequence: Synthetic polynucleotide
atgggttccaaaagaagattctcttccgaacacccggatccagttgagacctctattcctgagcaggccgccgagattgcggaagaattatccaaacagcatcctcttccatccgaagagccacttgtccatcatgatgctggtgaattcaagggcttgcaacgtcaccatacttctgcagaagaggcccaaaaacttgaagatggaaaaataaatccatttaccggtagggagtttacaccaaaatatgttgatatcttgaaaattagaagagaattgccagtacatgcccagagagatgagtttttaaaactttatcaaaataaccagattatggtttttgttggtgaaacaggttccggtaaaacgacacaaattcctcaattcgttttattcgatgagatgccacacttagagaacactcaagttgcatgtactcaacctcgtcgtgtcgcagcaatgtctgttgcacagagagttgctgaggaaatggatgtcaagttgggcgaagaagttggttattctatcagattcgaaaataaaacttctaataaaacgatattgaagtatatgactgatggtatgttgttgagagaggcaatggaagaccatgacttgtctcgttattcttgtatcattttagatgaagcgcacgaacgtacattggctactgatattttgatgggtcttttgaagcaagtagtcaagaggagacctgatttgaagataattattatgtctgctactttagatgcagagaagttccaacgctacttcaacgatgctccattacttgccgttccgggcagaacatatccagttgagttatactatacaccggaatttcaaagggactatttagattctgccattcgtactgttttgcaaattcatgccactgaagaggctggcgatattttgttatttttaactggtgaagatgaaattgaagacgctgtcagaaagatttccttagaaggtgatcaattggttagagaagagggatgcggacctttatccgtatacccattgtatggttctttaccaccgcatcaacaacaaagaatattcgagcctgctccagagtctcataatggtagaccaggcaggaaagttgttatctccacgaacatcgctgaaacttctttaacaattgatggtattgtctacgtcgttgacccaggattttccaagcaaaaagtttacaatccaagaattagagttgagtctttacttgtttcccctatctccaaggcttctgcccaacaaagagctggtcgtgctggtcgtacaaggcctggtaaatgtttcagattatacactgaagaggcattccaaaaggaattgatagagcaaagttacccagaaattttacgttccaatttatcctccaccgttttggaattgaaaaaattaggtattgatgacttggtccatttcgattttatggatccaccggctccggaaacaatgatgagagcccttgaagaattgaattatttggcatgtttggacgacgaaggtaacttaacacccttaggtagattggcatcccagtttcccttggatcctatgttggcggtgatgttaattgggtcctttgagttccaatgttctcaagaaatattgactatagtggccatgctttctgttccaaacgtgtttattcgcccaacaaaggacaagaagagagcagatgatgccaagaatatctttgctcatccagacggtgatcatatcaccttattgaatgtatatcatgcgttcaaatctgatgaagcttatgaatatggtatccataagtggtgccgtgaccactatttgaattacaggtccctttccgctgctgataatatccgctcccaattagaaagattaatgaaccgttacaacttggaattaaacactacagactatgaaagccctaaatactttgacaacatcagaaaggctcttgcgtctgggtttttcatgcaagtagcaaaaaaaagatctggagctaaaggatacatcacagttaaagataaccaagatgttttgatccatcctagtacggttcttggccacgacgcagaatgggtcatttacaatgaatttgtgctcacatccaagaactacataagaactgtgacctctgtcaggcccgaatggttgattgaaatagcgcctgcatactacgacttaagcaatttccaaaaaggtgatgtcaaattatctttggaaaggatcaaggaaaaagttgatagattaaacgagttgaaacaaggtaaaaacaaaaagaagagtaagcactccaagaaatga

SEQ ID NO: 3929 - DNA, 1506 bp, Saccharomyces cerevisiae
atggttacaaatatggtgaaattgaggaatttaaggagattgtattgttcatcccgtctcttaagaactatacagaacgggagaatttcttctgtttcttcaatatcgttgagtaagaaatatactacaaaatctgccaaagaaggtgaagaaaacgtagaaaggaagcatgaggaggaaaaaaaggatacattaaaaagttccagtgtaccaacttcacgaatatcgagattgttccattatggctcactggcagcaggggtgggcatgaatgccgcagcaaaaggcatatcggaagttgcaaagggcaattctcccacttggaaatctttgattctatcagattcgaatattgacagaattaccaataaattttctaaaatgagaggtgttgcccttaaaatagggcaactattgtcttttcaggatgagaaagtgttgccaaaggaattatacgaaattttatcaagggtacagaatagtgcaaatcatatgcctcaaaggcaattggaaaaggttatggccaaggaattaggtgctaattggaagacaaagttttccaaatttgacaagatacctatggcagctgctagtatcggacaggtacatgcggcagagttgcccagtggtcaaagagtggttgtcaaaattcaatatcctggggttaaagaatccattgattcggatttgaatagtttactaatgttacttacagcctcaagtttattaccgaagggattatttttggataagacaattgccaacgctagaactgagttaaaatgggaatgtgattacaacagagaggctagagctctacaaaagtttgaggcgttgctaaaggatgacccagcgtttgaggttcctcatgtgtttcctgaatatacaaccgataatattataactatgacacgtatggagggaactgaaataatgaaattgcccaaggcatcacaagaaaccaaaaattttatttcggagaatatcatgagactatgtctggaagaaattgccactttcaagtatatgcaaacggatcctaattgggcaaatttcctctataacggtaggacaaagaaaattgaattattggatttcggtgcctccagaccttttgcagaagattttattctaaaatatagaaaacttttaacttacgccacattgagagataggaaaggggcgtacgaaatgtctgtacaactgggctatctcacaggcttagaatcgcagtccatgaaagacgcgcacgtcgatagtgtacttacacttggtgaaccttttaggggtgatgtagataaatctttcgatttcaaggatcaaacagtctcagacaggattagaggtaatatcgggttaatgttgaatgaaagactatgtccgccaccagaggaaacatactcgttacatagaaaatttagtggcatttttcttttgtgtgcaagaatgggtgcgtctgttcattgtgcaaagctttttaaagagatttttgcctataaagtttaa

SEQ ID NO: 3930 - DNA, 1506 bp, Artificial Sequence
  Description of Artificial Sequence: Synthetic polynucleotide
atggttacaaatatggtgaaattgaggaatttaaggagattgtattgttcttcccgtctcttaagaactatacagaacgggagaatttcttctgtttcttctatatctttgagtaagaaatatactacaaaatctgccaaagaaggtgaagaaaacgtagaaaggaagcatgaggaggaaaaaaaggatacattaaaaagttccagtgtaccaacttctagaatatctagattgttccattatggctctttggcagcaggggtgggcatgaatgccgcagcaaaaggcatatctgaagttgcaaagggcaattctcccacttggaaatctttgattttaagtgattctaatattgacagaattaccaataaattttctaaaatgagaggtgttgcccttaaaatagggcaattattgtcttttcaggatgagaaagtgttgccaaaggaattatacgaaattttatctagggtacagaatagtgcaaatcatatgcctcaaaggcaattggaaaaggttatggccaaggaattaggtgctaattggaagacaaagttttccaaatttgacaagatacctatggcagctgctagtatcggacaggtacatgcggcagagttgcccagtggtcaaagagtggttgtcaaaattcaatatcctggggttaaagaatccattgattctgatttgaatagtttattgatgttacttacagcctccagtttattaccgaagggattatttttggataagacaattgccaacgctagaactgagttaaaatgggaatgtgattacaacagagaggctagagctttacaaaagtttgaggcgttgttgaaggatgacccagcgtttgaggttcctcatgtgtttcctgaatatacaaccgataatattataactatgacacgtatggagggaactgaaataatgaaattgcccaaggcatctcaagaaaccaaaaattttatttctgagaatatcatgagattatgtttagaagaaattgccactttcaagtatatgcaaacggatcctaattgggcaaatttcctctataacggtaggacaaagaaaattgaattattggatttcggtgcctccagaccttttgcagaagattttattttgaaatatagaaaacttttaacttacgccacattgagagataggaaaggggcgtacgaaatgtctgtacaattaggctatctcacaggcttagaatctcagtccatgaaagacgcgcacgtcgatagtgtacttacacttggtgaaccttttaggggtgatgtagataaatctttcgatttcaaggatcaaacagtctctgacaggattagaggtaatatcgggttaatgttgaatgaaagattatgtccgccaccagaggaaacatactctttacatagaaaatttagtggcatttttcttttgtgtgcaagaatgggtgcgtctgttcattgtgcaaagctttttaaagagatttttgcctataaagtttga

SEQ ID NO: 3931 - DNA, 438 bp, Saccharomyces cerevisiae
atgccacctgagccagtctggcacatatctgcagtaacagaaaagtttcctactcatggcgctattttatatatatcacttaccttttctttttataaaaaaatgttacgtgtattatggcatatattgttggtgtacggaaaacacgcggggaagagaaagtatagaaaagtgatgacagaaacaaatgactcattatatatgaaaagaaataactgcagcggtgaatatgccacactggcattatcaacaaggagctgttcatttaatatgcaacagaatgattgggtaactatggaaggactatttccttttgtgatggttttgtgtcatttggaaacgaagccaatgaaaataggtatccagcttatactacaagtccctttcatgggtttaggaattcacaaagagaataaagaattctacttgatattatga

SEQ ID NO: 3932 - DNA, 438 bp, Artificial Sequence
  Description of Artificial Sequence: Synthetic polynucleotide
atgccacctgagccagtctggcacatatctgcagtaacagaaaagtttcctactcatggcgctattttatatatatctcttaccttttctttttataaaaaaatgttacgtgtattatggcatatattgttggtgtacggaaaacacgcggggaagagaaagtatagaaaagtgatgacagaaacaaatgactctttatatatgaaaagaaataactgcagcggtgaatatgccacattagcattatctacaaggagctgttcctttaatatgcaacagaatgattgggtaactatggaaggattatttccttttgtgatggttttgtgtcatttggaaacgaagccaatgaaaataggtatccagcttatattgcaagtccctttcatgggtttaggaattcacaaagagaataaagaattctacttgatattatga

SEQ ID NO: 3933 - DNA, 798 bp, Saccharomyces cerevisiae
atgcagccaatttcaataaaagatgtggaaagcgatcaagggaaagtttacattgttaatgccttaaaagatctcgtatgcaagtgccttttagaattcgtggacattcaaattgaaagttttatgtatccggacgatccaaagtgttttacaaggatatttaaagggaacaagatagtcaacgaagcatcagataaagattcgaaagtgagaagttacccatcttcattgggtgttggacactctgctttgtttcctttgatatacataagacaaaaaaccaactccttgcggtttttgaatgatccaaagcaattaccaacaccactggtcgatgatatgaacgcaaaattcaaaggcatcattaaagtttatgaaaatctcattcacttgtaccattcatatcagacggtggattgcaataacatgaatcagcaaaagcttttgggtgatctggtcagtcggggtaatttcatgcttgatatcctccacgggtatgttactattgcatcaacaatagtacgggacagtaaggatgccaatatcttgatagacactgttaatcggttcatccacgataccatattattccacaagcgcataatacataattccaacgcttacacagagtaccatgtaatgaaacgtggcatgcaaagaaaccagagtgaggaaacgttagttgaacttgaattccgaatactggatgtttctgatgttaatctggacaatgaatttgatgactttttacagcatagaaaaacgtctcttaaaataactcatagaagggttatatga

SEQ ID NO: 3934 - DNA, 798 bp, Artificial Sequence
  Description of Artificial Sequence: Synthetic polynucleotide
atgcagccaatttctataaaagatgtggaaagcgatcaagggaaagtttacattgttaatgccttaaaagatctcgtatgcaagtgccttttagaattcgtggacattcaaattgaaagttttatgtatccggacgatccaaagtgttttacaaggatatttaaagggaacaagatagtcaacgaagcatctgataaagattctaaagtgagaagttacccatcttctttgggtgttggacactctgctttgtttcctttgatatacataagacaaaaaaccaactccttgagatttttgaatgatccaaagcaattaccaacaccattagtcgatgatatgaacgcaaaattcaaaggcatcattaaagtttatgaaaatctcattcacttgtaccattcttatcagacggtggattgcaataacatgaatcagcaaaagcttttgggtgatttggtcagtagaggtaatttcatgcttgatatcctccacgggtatgttactattgcaagcacaatagtaagagacagtaaggatgccaatatcttgatagacactgttaatagattcatccacgataccatattattccacaagcgcataatacataattccaacgcttacacagagtaccatgtaatgaaacgtggcatgcaaagaaaccagagtgaggaaacgttagttgaacttgaattcagaatattggatgtttctgatgttaatttggacaatgaatttgatgactttttacagcatagaaaaacgtctcttaaaataactcatagaagggttatatga

SEQ ID NO: 3935 - DNA, 1833 bp, Saccharomyces cerevisiae
atgccagaaagctctagagataagggaaatgcagcaattagcggtaaccgttctgtactttctattgcgtccccaacaaagctaaacatactatcttccgattggtccagaaaccaaggtaaagtttctaaaaattcgctaaagagatcaagttcactgaacattagaaactccaaacgtcccagtttacaagcctctgccaattctatttattcaagacctaagattacaattggggcaccaccgttaataagacgagattcttcatttttcaaagatgaatttgacgctaaaaaagacaaagcaacgttttcggcatactcttctcgttcatatccaacaattggatctgagagcgtagtttcccaaacatctttatcgcaaccgacaacatctagagaagttgatgagcaatttacagtagctgcggatagatatattccaattctacagggagcttcgcaaaacaaggtcgatcctgaaaccttacacgaggcattacctccgccaaacgcgtcgccaatttcacacttaagggcccagactaagattgtcttcaaacaaaatgtagctgaagcgtgtgggttagatatgaataaaagaatactacaatacatgccggaaccaccaaaatgctcttccttgagacaaaaaagctatatcatgaagaaaagaacacattatagttatcagcaggaacaaaaaattcctgatttaattaaattaaggaaaatcaataccaatccggaaagaattcttgatgcacctggtttccaagacgacttttatttaaacttgttaagttggtccaaaaaaaatgtcttagctatagcactagacactgcattatatctgtggaatgccaccactggggatgtttccctgttaacggatttcgaaaacaccacaatatgcagcgttacgtggtctgatgatgattgtcatatctctatcggtaaagaggatgggaacaccgaaatttgggacgttgagaccatgtcattaattagaactatgagatcaggcttaggtgtccgtatcggttcattgtcttggttagatactttgatagctacaggcagtcgtagtggagaaattcaaatcaatgatgtcaggatcaaacagcatattgtatctacatgggcagagcacacaggcgaagtctgcggtttgagctataaaagtgacggattgcaacttgcatctggtggtaatgataacactgtaatgatttgggataccagaacgtccttgcctcaattttccaagaagacgcatactgctgctgtaaaagcactaagctggtgtccatattcgccaaatattctagcctctggaggcggacaaacagataaacacatccatttttggaacagtatcacaggtgcacgagttggctcaatcaataccggatcccaggtgagctctttacattggggccaaagtcatacgtcaaccaatggtggtatgatgaataaagagattgttgccacaggaggtaatccagagaatgcaatctctgtttataattatgaaacaaaattcaaagttgcagaagtagttcatgctcatgaagcaagaatatgctgttctcaattgtcccctgacggaaccacattggccacagtgggaggagatgaaaacttaaaattttataagatatttgatccaagatgtacaggaagatcgagagaagacggattgatggatggtatgctaggacttattggcaaggaaggttgtcgaacaaatgataaggagaatcgttccaaaaattcgagtgagattcatacaaggaggccctctagtaccagccaatatttgatcaggtga

SEQ ID NO: 3936 - DNA, 1833 bp, Artificial Sequence
  Description of Artificial Sequence: Synthetic polynucleotide
atgccagaaagctctagagataagggaaatgcagcaattagcggtaaccgttctgtactttctattgcgtccccaacaaagttgaacatattatcttccgattggtccagaaaccaaggtaaagtttctaaaaattctttgaagagaagtagttctttgaacattagaaactccaaacgtcccagtttacaagcctctgccaattctatttattctagacctaagattacaattggggcaccaccgttaataagaagagattcttcttttttcaaagatgaatttgacgctaaaaaagacaaagcaacgttttctgcatactcttctcgttcttatccaacaattggatctgagagcgtagtttcccaaacatctttatctcaaccgacaacatctagagaagttgatgagcaatttacagtagctgcggatagatatattccaattttacagggagcttctcaaaacaaggtcgatcctgaaaccttacacgaggcattacctccgccaaacgcgtctccaatttctcacttaagggcccagactaagattgtcttcaaacaaaatgtagctgaagcgtgtgggttagatatgaataaaagaatattgcaatacatgccggaaccaccaaaatgctcttccttgagacaaaaaagctatatcatgaagaaaagaacacattatagttatcagcaggaacaaaaaattcctgatttaattaaattaaggaaaatcaataccaatccggaaagaattcttgatgcacctggtttccaagacgacttttatttaaacttgttaagttggtccaaaaaaaatgtcttagctatagcattggacactgcattatatttatggaatgccaccactggggatgtttccttattaacggatttcgaaaacaccacaatatgcagcgttacgtggtctgatgatgattgtcatatctctatcggtaaagaggatgggaacaccgaaatttgggacgttgagaccatgtctttaattagaactatgagaagcggcttaggtgtccgtatcggttctttgtcttggttagatactttgatagctacaggcagtcgtagtggagaaattcaaatcaatgatgtcaggatcaaacagcatattgtatctacatgggcagagcacacaggcgaagtctgcggtttgagctataaaagtgacggattgcaacttgcatctggtggtaatgataacactgtaatgatttgggataccagaacgtccttgcctcaattttccaagaagacgcatactgctgctgtaaaagcattaagctggtgtccatattctccaaatattttagcctctggaggcggacaaacagataaacacatccatttttggaacagtatcacaggtgcaagagttggctccatcaataccggatcccaggtgagctctttacattggggccaaagtcatacgtccaccaatggtggtatgatgaataaagagattgttgccacaggaggtaatccagagaatgcaatctctgtttataattatgaaacaaaattcaaagttgcagaagtagttcatgctcatgaagcaagaatatgctgttctcaattgtcccctgacggaaccacattggccacagtgggaggagatgaaaacttaaaattttataagatatttgatccaagatgtacaggaagatctagagaagacggattgatggatggtatgcttggacttattggcaaggaaggttgtagaacaaatgataaggagaatcgttccaaaaatagtagtgagattcatacaaggaggccctctagtaccagccaatatttgatcaggtga

SEQ ID NO: 3937 - DNA, 969 bp, Saccharomyces cerevisiae
atgaaaccgacacaggattcacaagaaaaggtttctattgaacagcagttagctgtagaatcgataaggaagtttttgaactcgaaaacatcttatgacgtgttgcctgtttcttaccgtttaattgtcttggacacctcgttgttagtgaagaaatcactgaatgttcttttgcaaaatagcattgtctctgcgccattatgggactccaagacttccaggttcgctggacttctaactactacagattttattaatgtcatccagtattacttctccaatccagataagttcgaattagtagacaaattacagttagatggattaaaagatatagagcgtgctctcggtgttgatcaactagatacagcttcaattcatccttctagacccttatttgaggcgtgtcttaagatgttagaatcaagaagtggtagaataccactgatcgatcaagatgaagagacacatagagaaattgtcgttagtgttcttacgcaatatagaattctgaagttcgttgctttaaattgcagggaaacacattttctaaagattccaattggggacttgaacattattacgcaagataacatgaaaagctgtcaaatgaccactccggtcatagacgtcattcagatgcttacccaaggtcgggtttcttccgtccctattattgacgaaaacggctacttaatcaacgtatatgaagcatacgatgtcctaggcttgataaaaggaggcatctacaacgacctgtcattgagcgtcggagaagcccttatgaggagaagtgatgattttgagggtgtttatacatgcactaagaatgataaattatctactattatggataacatcagaaaagcaagggtgcatagattctttgtagttgatgacgtcggacggttggttggtgtcttgacgttaagcgatattctcaaatatatccttctaggtagcaactga

SEQ ID NO: 3938 - DNA, 969 bp, Artificial Sequence
  Description of Artificial Sequence: Synthetic polynucleotide
atgaaaccgacacaggattctcaagaaaaggtttctattgaacagcagttagctgtagaaagtataaggaagtttttgaactccaaaacatcttatgacgtgttgcctgtttcttaccgtttaattgtcttggacacctctttgttagtgaagaaatctttgaatgttcttttgcaaaatagcattgtctctgcgccattatgggactccaagacttccaggttcgctggacttttgactactacagattttattaatgtcatccagtattacttctccaatccagataagttcgaattagtagacaaattacagttagatggattaaaagatatagagcgtgctctcggtgttgatcaattggatacagcttccattcatccttctagacccttatttgaggcgtgtcttaagatgttagaatctagaagtggtagaataccattgatcgatcaagatgaagagacacatagagaaattgtcgttagtgttcttacgcaatatagaattttgaagttcgttgctttaaattgcagggaaacacattttttgaagattccaattggggacttgaacattattacgcaagataacatgaaaagctgtcaaatgaccactccggtcatagacgtcattcagatgcttacccaaggtagagtttcttccgtccctattattgacgaaaacggctacttaatcaacgtatatgaagcatacgatgtccttggcttgataaaaggaggcatctacaacgacttatctttgagcgtcggagaagcccttatgaggagaagtgatgattttgagggtgtttatacatgcactaagaatgataaattatctactattatggataacatcagaaaagcaagggtgcatagattctttgtagttgatgacgtcggaagattggttggtgtcttgacgttaagcgatattctcaaatatatccttttgggtagcaactga

SEQ ID NO: 3939 - DNA, 2178 bp, Saccharomyces cerevisiae
atgcctcaatctactccaagtcaagaagtacagcgtgtaccatgggataataaacctgctttgaagcagataacactccgagcaaccatagcaggtatcgctatagggtctctggtgctaacatcaaattttcaatttggcctgcaaaccggttgggtttccatgatgtccctgccatcggcattgttagcttgtgctttctttaaaaatatctggccattaatatttccgaacgacaggcctttcagtgacgttgaaaatgtatacgtacaaagtatggcagtagctgtcggaacaggcccattagcctttgggtttgtcggcgtcatacctgccatcgagaagttccttactaacgacgaaagtggtggattaagggaacaaggacagtccttcacttttagagaattgttaatatggtccacagccctagcattcttcggtattttttttgcagttcctctaagaaagcaagtaattgttagagagaaacttcccttccccagtggtagcgccacggccactttaatttcagtgctaaatggaactgagattttacaagaggtttctaagtcagagttattggaaatgaggcagaggagattgaatgaatgccctgaagtgctacaacccaacagagatccagaggaggcggattatttaatgaactcttctcatagcgaacttggtgattatacggcaactagccaagatggaagttctatcctttctactggctctgagaactacagagcgaatattattattttattgaaaacttttgttgtttcttcgctttacaccatggtgtcatattttgtaccggtaatacggtctattccagtcttcggaaaatacctctcgaacaattatctctggaattttcagccgtcgcctgcgtatataggccaagggataataatgggtcttccaacagtatcgtatatgcttatcgggtgcttcttaggctggggtgtgttagcaccattggcgagatacaaaagatgggtaccaccagatgctgatgtccacgactgggaggagggagtgcaaggatggattctttggtcgtcgctttcaataatggttgctgacagtgtagtcgcttttattgttgtgacagtgaagtccattgtgaaatttattcttatagatgacaaagctgctttactgaacaacataatcgatgatacatttcaatctatgttactggaggaggaacgcgccattaatagcagcagaagaaatacatatgttgatggaaggcaggacaccgtaagattagtgagtagagataacgaaatagaagtagattcgaagcatttggttcgctataccaccgttatcagtggatgtctagtctcctcgataatatgcattgtttccataatatatttgtttgggatacaagtaattcccctatatgctattatcactgctttgatacttgcgttgtttctatctattctcggtattcgagcacttggagagaccgatctgaatcctgtgagcggcattggtaagatctctcaattgatttttgcctttatcataccaagggatagacctggatcagtgttaatgaacgtggtatcgggaggtattgcagaagcctctgcccaacaggcgggcgatttaatgcaggatttgaaaacggggcacctcctcggcgcctccccaagagctcagttctgtgcccaattgataggggcctgttggtcaattattttgtctagcttcatgtatttgtgctacaataaagtttattcaattccgagtgagcaattcaggataccgacagcagtagtgtggatagattgtgcaagactagtaactggtaaagggctccctgataaggccttggagtgctccatgattctcggagtcatatttgccgttttatcattaatcagaaacacttatagagattacggatacgggtggatattatatattccgtctggtgtagcagtcggtgttggtatatttaattctcccagttttacaattgcaagattcatcggcgggtgggcttcgcatttttggttgaagaatcataggggtgacttaaatgcgaaaacaaaaatgattgtattcagttcggggttggtcttaggtgaaggtatctttagcgtaataaacatgctcttcatctgcttaaatgtccctcactattag

SEQ ID NO: 3940 - DNA, 2178 bp, Artificial Sequence
  Description of Artificial Sequence: Synthetic polynucleotide
atgcctcaatctactccaagtcaagaagtacagcgtgtaccatgggataataaacctgctttgaagcagataacactcagagcaaccatagcaggtatcgctatagggtctttggtgttaacaagtaattttcaatttggcttacaaaccggttgggtttccatgatgtccttgccatctgcattgttagcttgtgctttctttaaaaatatctggccattaatatttccgaacgacaggcctttcagtgacgttgaaaatgtatacgtacaaagtatggcagtagctgtcggaacaggcccattagcctttgggtttgtcggcgtcatacctgccatcgagaagttccttactaacgacgaaagtggtggattaagggaacaaggacagtccttcacttttagagaattgttaatatggtccacagccttggcattcttcggtattttttttgcagttcctttgagaaagcaagtaattgttagagagaaacttcccttccccagtggtagcgccacggccactttaatttctgtgttgaatggaactgagattttacaagaggtttctaagagtgagttattggaaatgaggcagaggagattgaatgaatgccctgaagtgttgcaacccaacagagatccagaggaggcggattatttaatgaactcttctcatagcgaacttggtgattatacggcaactagccaagatggaagttctatcctttctactggctctgagaactacagagcgaatattattattttattgaaaacttttgttgtttcttctctttacaccatggtgtcttattttgtaccggtaataagatctattccagtcttcggaaaatacctctccaacaattatctctggaattttcagccgtctcctgcgtatataggccaagggataataatgggtcttccaacagtatcttatatgcttatcgggtgcttcttaggctggggtgtgttagcaccattggcgagatacaaaagatgggtaccaccagatgctgatgtccacgactgggaggagggagtgcaaggatggattctttggtcctctctttccataatggttgctgacagtgtagtcgcttttattgttgtgacagtgaagtccattgtgaaatttattcttatagatgacaaagctgctttattaaacaacataatcgatgatacatttcaatctatgttattggaggaggaacgcgccattaatagcagcagaagaaatacatatgttgatggaaggcaggacaccgtaagattagtgagtagagataacgaaatagaagtagattctaagcatttggttcgctataccaccgttatcagtggatgtttggtctcctccataatatgcattgtttccataatatatttgtttgggatacaagtaattcccttatatgctattatcactgctttgatacttgcgttgtttttatctattctcggtattagagcacttggagagaccgatttgaatcctgtgagcggcattggtaagatctctcaattgatttttgcctttatcataccaagggatagacctggatctgtgttaatgaacgtggtatctggaggtattgcagaagcctctgcccaacaggcgggcgatttaatgcaggatttgaaaacggggcacctcctcggcgcctccccaagagctcagttctgtgcccaattgataggggcctgttggtctattattttgtctagcttcatgtatttgtgctacaataaagtttattctattccgagtgagcaattcaggataccgacagcagtagtgtggatagattgtgcaagattggtaactggtaaagggctccctgataaggccttggagtgctccatgattctcggagtcatatttgccgttttatctttaatcagaaacacttatagagattacggatacgggtggatattatatattccgtctggtgtagcagtcggtgttggtatatttaattctcccagttttacaattgcaagattcatcggcgggtgggcttctcatttttggttgaagaatcataggggtgacttaaatgcgaaaacaaaaatgattgtattcagttccgggttggtcttaggtgaaggtatctttagcgtaataaacatgctcttcatctgcttaaatgtccctcactattga

SEQ ID NO: 3941 - DNA, 2007 bp, Saccharomyces cerevisiae
atggaaacatgggaagtcatagcatcggtaaaagaagcaacaaaaggccttgacttgagcttagatcatccacttattattaaatccgaggacgtgcccagtaacattctccaattactgcaacagaagaatcgacgtcaattgaaacacatctgcatgaaatcaagaaaagagtattttctactagaggaatatgggccaggattttgggttaagtggccgtacaattatttcaatggttacagcttaccagaaaggcgtacggaagttgtaacgacagttgaaagagaaagagctaagcgtgaaacgttaaaaacatgggacgaattgaaatttaaagagcttcttcatttatggtcagaagaacccaagggctcgtgtaagcttgagaaggacaaagaccttaaactggatatgaatcccccagatatgaaaggcgaatcaaaaattaatgactactattcagaccctaaagagtacatagaaagtaagtattatgatgctcttttttccatacatacgcctctcgcatatttcgtcaagtcaaatttagtaaggctcaaaaatacctgccgaaccaagtacggaagtgacagttacaaaatagcctatcaagccatgctgcaaaaatttcttctctcaattgtacaattcaaagatagacatgataacaggcttttattagagcccttttctagtcccatagcagatgaaaaaaggaagaactgtctcacaaaatttgttatccaagatgaaaacaaaaacagctcaaccattgctgatttatgtgttgtattaaaatcccgcgaaataaagctacaaatattattgctattagagataataggattgaacgatttagattggaattttagagattttgagaaaaagtataaattaaaattgaagaaaagatcacttaatttgacaaaaaagggattagttcgtcgaagatcgaagaaaaaaaccagcgaaaaagacaaaggaatcgagagaataacaacatctttggattattgtgaacagttagacttgtacttagatagagcatgcatcttggacattctactatcaagtgaaacgcccaacccagatgccatagaagcatcaaatggaacaatacaagagcataaaaaaaatatcctagacaaaagcaaagaagcctcattggttgggttcataaattatgttcttattccatatttcaacaaaaaggtaccacacgccgttgaatttataattcaaaagctcaagggaccaagcatgagaccaaagagagccctgaaaaaggtcaacgatagcacaaatgtatcgtcacctaatactgtagaaacgtataacaggttatccacgagtcaacgtgcctctcgctcttcaatcattaattccgtcccatcttcacccgcattgagaagggtggacgctaatttgttcagcagaaaatctatagcttcgcccacccctgaacttttgaattctagaacgaactctaacttgaatgaatttctcgaaagtgaaactagaagcttaaagcgcccttcacaattgggaaggacgaagtctgatctaacgatgaatcatttacaaaaacggcagttttctgtctctgacttaagcacaacaagagtaccgaattcatcaactatcacactcaaaacgcctttctcgcactcaactattaatgcatacaaaactatgaataactcttttcgcagagttgggaaacgtaaagatatcaatgaaacgatacgcctacatgaacgtgtagactctgaggaaaacgtacaagttcaagccactcctgctgtgaaaaaaagaactgtgacacctaataaaaaggcgcaacttcaaagcatcattgaatcgccgctaaatttcaaggatgatgatacgcatgaaggcagaaaaaatacctccaatattacctctactcccactaataagcccccggaaaatagctcaaaaaggagagtaagaagacgtttatttgctccagaatccacatag

SEQ ID NO: 3942 - DNA, 2007 bp, Artificial Sequence
  Description of Artificial Sequence: Synthetic polynucleotide
atggaaacatgggaagtcatagcatctgtaaaagaagcaacaaaaggccttgacttgagcttagatcatccacttattattaaatccgaggacgtgcccagtaacattctccaattattacaacagaagaatagacgtcaattgaaacacatctgcatgaaatctagaaaagagtattttttattggaggaatatgggccaggattttgggttaagtggccgtacaattatttcaatggttacagcttaccagaaaggcgtacggaagttgtaacgacagttgaaagagaaagagctaagcgtgaaacgttaaaaacatgggacgaattgaaatttaaagagcttcttcatttatggtctgaagaacccaagggctcttgtaagcttgagaaggacaaagaccttaaattggatatgaatcccccagatatgaaaggcgaaagtaaaattaatgactactattctgaccctaaagagtacatagaaagtaagtattatgatgctcttttttccatacatacgcctctcgcatatttcgtcaagagcaatttagtaaggctcaaaaatacctgcagaaccaagtacggaagtgacagttacaaaatagcctatcaagccatgttacaaaaatttcttctctccattgtacaattcaaagatagacatgataacaggcttttattagagcccttttctagtcccatagcagatgaaaaaaggaagaactgtctcacaaaatttgttatccaagatgaaaacaaaaacagctctaccattgctgatttatgtgttgtattaaaatcccgcgaaataaagttacaaatattattgttattagagataataggattgaacgatttagattggaattttagagattttgagaaaaagtataaattaaaattgaagaaaagatctcttaatttgacaaaaaagggattagttcgtagaagatccaagaaaaaaaccagcgaaaaagacaaaggaatcgagagaataacaacatctttggattattgtgaacagttagacttgtacttagatagagcatgcatcttggacattttattatccagtgaaacgcccaacccagatgccatagaagcatctaatggaacaatacaagagcataaaaaaaatatcttggacaaaagcaaagaagcctctttggttgggttcataaattatgttcttattccatatttcaacaaaaaggtaccacacgccgttgaatttataattcaaaagctcaagggaccaagcatgagaccaaagagagccttgaaaaaggtcaacgatagcacaaatgtatcttctcctaatactgtagaaacgtataacaggttatccacgagtcaacgtgcctctcgctcttctatcattaattccgtcccatcttctcccgcattgagaagggtggacgctaatttgttcagcagaaaatctatagcttctcccacccctgaacttttgaattctagaacgaactctaacttgaatgaatttctcgaaagtgaaactagaagcttaaagcgcccttctcaattgggaaggacgaagtctgatttgacgatgaatcatttacaaaaaagacagttttctgtctctgacttaagcacaacaagagtaccgaattcttctactatcacactcaaaacgcctttctctcacagtactattaatgcatacaaaactatgaataactcttttcgcagagttgggaaacgtaaagatatcaatgaaacgatacgcttgcatgaacgtgtagactctgaggaaaacgtacaagttcaagccactcctgctgtgaaaaaaagaactgtgacacctaataaaaaggcgcaacttcaaagcatcattgaatctccgttaaatttcaaggatgatgatacgcatgaaggcagaaaaaatacctccaatattacctctactcccactaataagcccccggaaaatagcagtaaaaggagagtaagaagacgtttatttgctccagaatccacatga

SEQ ID NO: 3943 - DNA, 1551 bp, Saccharomyces cerevisiae
atgtctacacagcagcaatcttacacaatttggtctccacaagatactgttaaagatgtcgctgagtcgcttgggttggaaaatatcaacgatgacgtgttgaaagcacttgctatggacgttgaataccgtattctagagattattgaacaggcagtcaagtttaaaagacactctaaaagagatgttttaactacagacgatgtatcgaaggccctgcgtgttctgaatgtggaacctttatatggatattatgatggctctgaagttaataaagctgtatcatttagtaaggttaacacaagtggaggacagtcggtttactacctggatgaggaagaagtagattttgatagattaataaatgagccattaccgcaagtgcctcgtctaccaacttttactacacattggctagcagttgaaggggttcaacctgccataatccaaaatccaaatttgaatgatataagggtatcccaaccaccatttattagaggtgctattgtcactgctttgaatgataacagcctccaaacacctgtaacgtcgacgacagcaagtgcttctgtgacggatacaggcgcctctcaacacctgtctaatgttaaaccaggacagaatactgaagtcaaacctttagtgaaacacgttttatccaaagaattacagatttatttcaataaggtcatttcaaccttgacagcgaagagtcaagctgatgaagctgcacagcatatgaaacaagcagctttgacttcactacgaactgatagtggcctgcaccaactggttccatattttattcaatttattgccgaacaaatcacacaaaatctttccgatttacaattgctaacaacaattttggaaatgatttactctttactaagcaatacttctattttcctggacccttatattcattcgttaatgccttccattttaaccttgctattagcaaaaaaacttggtggatcaccaaaagatgattcgccgcaagaaattcatgaatttttagaaagaacgaatgcactacgtgattttgccgcatctttgttggactatgtattgaaaaaatttcctcaagcatacaaatccctgaagccaagagtaactaggacactgctaaagacatttttggacataaaccgtgtttttgggacttactatgggtgcttaaagggtgtatcggtactagaaggtgaatccatcagattcttcttaggaaacctaaataattgggcgcgcttggtattcaatgaaagcggaataactctagacaatatagaggaacatttgaacgatgactccaatccaactaggaccaaatttactaaagaagaaactcaaatcttggttgatactgtaattagtgcattgttagttctaaaaaaggatttaccagatttgtacgagggtaaaggtgaaaaagttacggatgaggataaggaaaaattgctagagaggtgtggtgtcactattggatttcacattttgaaaagagacgacgcaaaagaattaattagtgcgatattttttggcgaatag

SEQ ID NO: 3944 - DNA, 1551 bp, Artificial Sequence
  Description of Artificial Sequence: Synthetic polynucleotide
atgtctacacagcagcaatcttacacaatttggtctccacaagatactgttaaagatgtcgctgagtctcttgggttggaaaatatcaacgatgacgtgttgaaagcacttgctatggacgttgaataccgtattttagagattattgaacaggcagtcaagtttaaaagacactctaaaagagatgttttaactacagacgatgtatccaaggccttgcgtgttttgaatgtggaacctttatatggatattatgatggctctgaagttaataaagctgtatcctttagtaaggttaacacaagtggaggacagtctgtttactacttggatgaggaagaagtagattttgatagattaataaatgagccattaccgcaagtgcctcgtttgccaacttttactacacattggttggcagttgaaggggttcaacctgccataatccaaaatccaaatttgaatgatataagggtatcccaaccaccatttattagaggtgctattgtcactgctttgaatgataacagcctccaaacacctgtaacgtccacgacagcaagtgcttctgtgacggatacaggcgcctctcaacacttatctaatgttaaaccaggacagaatactgaagtcaaacctttagtgaaacacgttttatccaaagaattacagatttatttcaataaggtcatttctaccttgacagcgaagagtcaagctgatgaagctgcacagcatatgaaacaagcagctttgacttctttaagaactgatagtggcttgcaccaattggttccatattttattcaatttattgccgaacaaatcacacaaaatctttccgatttacaattgttgacaacaattttggaaatgatttactctttattaagcaatacttctattttcttggacccttatattcattctttaatgccttccattttaaccttgttattagcaaaaaaacttggtggatctccaaaagatgattctccgcaagaaattcatgaatttttagaaagaacgaatgcattgcgtgattttgccgcatctttgttggactatgtattgaaaaaatttcctcaagcatacaaatccttgaagccaagagtaactaggacattgttgaagacatttttggacataaaccgtgtttttgggacttactatgggtgcttaaagggtgtatctgtattggaaggtgaatccatcagattcttcttaggaaacttgaataattgggcgcgcttggtattcaatgaaagcggaataactttggacaatatagaggaacatttgaacgatgactccaatccaactaggaccaaatttactaaagaagaaactcaaatcttggttgatactgtaattagtgcattgttagttttgaaaaaggatttaccagatttgtacgagggtaaaggtgaaaaagttacggatgaggataaggaaaaattgttggagaggtgtggtgtcactattggatttcacattttgaaaagagacgacgcaaaagaattaattagtgcgatattttttggcgaatga

SEQ ID NO: 3945 - DNA, 1392 bp, Saccharomyces cerevisiae
atgaggttactagtcagctgtgtggatagtggatccataaaggaagttttgtgtaacatcgggactgacacttccgtacaatcagcactgcagccttttcatgtggcacctcatctagccgaaggattgaaagcttacgttgacaggatgtgggtgatatccgaagatgaagccatcttagcaaggaattcaggggtcgtcgaacttgtaaagatttcgaaacaccttaaagaaaatgaagctctccaggtcgatcccaaaggagaaagcaaaaatgaaaagagcctttccgatgatctacccaaatttgacatatccgagtttgagataaccagctcagtttcagacctttttgatgatgccaaattggaatcactttcaagtaaatctgttaaaagaaccaagttggtggatggttttgtcacattatgtcccataaaaaaggattcgtcgaataacacattcgtagctgctaccaaatcgggattattacatattataaaaaaaggagaagataaaaagttaataaaactagcatcccttggactgaaagcaccagtagaatttcttcagttatatgatctagaagataccgatactgataaatatatatttgcatacggaggggaggagaatttaataaaattagtggaaatagattcgagtttccaatctttaaagcaaatttgggaagccaagaatgttaaaaacgacaggttggatatgagagtcccagtatggcccatggccctaagatttttggagccctcccctggtaaaactgaaaagggtaagctgaactaccagtttgcagccataacccgttggtcccacctcaccaaatacagcacacaacatggcagaaaaccgttcgctcagatagatttattacctaaccgtgaaccattatctcagatggaagtttttgatgccaagggagaaaatgttgtctcttcgttggggaattttcaatctgaaacctttaatgaactgaatgtgattactactgactacaaaaagaatgtttttaaattcgatggtaatggaagaatgttgggcaaggtgggtagagatgatatcactggttcgtcaacctatattcatgtacatgacggcaaatatcttttacaaggtggtttagataggtatgttcggatcttcgatataaaaactaacaaaatgctggtgaaggtttatgttgggtcccgtataaattttattgttatgctggatgacgttgaaatcgagatgccactaagtccaagtgcgaaagctgccaaagggaagcaaaaaaggaaggttacagaacttgaagaagacgcagatgagctttggaataaattggagggaaaggtagctgcttctaaagccagtaagaaaagcaaaatttaa

SEQ ID NO: 3946 - DNA, 1392 bp, Artificial Sequence
  Description of Artificial Sequence: Synthetic polynucleotide
atgaggttattggtcagctgtgtggatagtggatccataaaggaagttttgtgtaacatcgggactgacacttccgtacaaagtgcattacagccttttcatgtggcacctcatttggccgaaggattgaaagcttacgttgacaggatgtgggtgatatccgaagatgaagccatcttagcaaggaatagtggggtcgtcgaacttgtaaagatttccaaacaccttaaagaaaatgaagctctccaggtcgatcccaaaggagaaagcaaaaatgaaaagagcctttccgatgatttgcccaaatttgacatatccgagtttgagataaccagctctgtttctgacctttttgatgatgccaaattggaatctctttccagtaaatctgttaaaagaaccaagttggtggatggttttgtcacattatgtcccataaaaaaggattcttccaataacacattcgtagctgctaccaaaagtggattattacatattataaaaaaaggagaagataaaaagttaataaaattggcatcccttggattgaaagcaccagtagaatttcttcagttatatgatttggaagataccgatactgataaatatatatttgcatacggaggggaggagaatttaataaaattagtggaaatagattctagtttccaatctttaaagcaaatttgggaagccaagaatgttaaaaacgacaggttggatatgagagtcccagtatggcccatggccttgagatttttggagccctcccctggtaaaactgaaaagggtaagttgaactaccagtttgcagccataacccgttggtcccacctcaccaaatacagcacacaacatggcagaaaaccgttcgctcagatagatttattacctaaccgtgaaccattatctcagatggaagtttttgatgccaagggagaaaatgttgtctcttctttggggaattttcaatctgaaacctttaatgaattgaatgtgattactactgactacaaaaagaatgtttttaaattcgatggtaatggaagaatgttgggcaaggtgggtagagatgatatcactggttcttccacctatattcatgtacatgacggcaaatatcttttacaaggtggtttagataggtatgttagaatcttcgatataaaaactaacaaaatgttggtgaaggtttatgttgggtcccgtataaattttattgttatgcttgatgacgttgaaatcgagatgccattaagtccaagtgcgaaagctgccaaagggaagcaaaaaaggaaggttacagaacttgaagaagacgcagatgagctttggaataaattggagggaaaggtagctgcttctaaagccagtaagaaaagcaaaatttga

SEQ ID NO: 3947 - DNA, 1875 bp, Saccharomyces cerevisiae
atgttatcaaggtacaaccgcgttattgaaataaatgggggtaatgcagatatttctctgcccattgtcaaatttccaccgtttaaactcagagctcaattaattgaaaaggaccccgtagtatggctgcatctaatagaaacctatgtaacgtattttgagtatttgatgcaaggtgctaacgttgaattattagatgaatctacacttgatcatcttcgtttatttttgagaacttacttgcatgaaattgctgatgaggaaggaaagttattaagtctcggtatcaaccatgatgtgtctgaacagttatatttactaaaaggctggatattttcattgatcaagaaatgcgggttattacatcttcagatttttggtgactccctgtggaatttgatcaaagtatatgttagacgtaatccagattctattcgtggtttgatcgatggctcattgaaaccacggatcaacacgcaacgtgtacaattggacaaatcgtaccaagttcaacagcatttgaagcagttaatagaatctggaaaatttaaaagaatagatttaaggtgcgttgaagatctgctgtctgccaaatccatgcagccaaataagtttgcggagaacttctttacggcaaattggattgaaattttagaggcattatgggcaaagggacagggccggggtcataaagaggctagagaattgatcattatcagtttattttctgtttctgctgatcgtttactaaaaataactaaagaattaggcataagcaattttgaaactttggcgttatatcctcttttaggaacaatgctcataaatgaaggagtccacaaaaggcttcctgatttgaagagcaagttactatttctgaatttaggggggttgtcaatggacgaaggagaccatatgagctatccaacatcatcaggtactgaagttaatgaagaacaactgtccgcgttgatggaattgttcccccagttttctaaatatcaattatctcaaacgttgcttgcctatgataataacattgaattagtaacgaataaaatatttgaggatcctaccattatcgaagcattctccagagaacctgcggaggaagaagtagagccggtgtcagatggtgataatgcatcctttactgaagaactgagtatattggatagaggagatagctcaaaaaataaagagctagacaaaaagattatctcggagggtgttccggatgaattaagaaataaaactttgacaagagcattgaaacttttatacgaggctgatgaagatgaaagggatgacacttatgatgaagccgatgtgaaccggtccgatccttcgaaaagaattggacttcaagaagacgaagaaagctatgatacaaaagatgattctaatgaagtgcgacaagatcataactatcatattgttgaagcttacttgtggaatctattgaaagaggatccgaaattatttgagagatcaaaaagaggtacaaaagtcaggaaaactatgaaagaaatgacttcatggtcggatgaaaaaatcgaaggttggtgtcggatgttagaaagatctcctacccgagcaagacttttagaaaagaagtttatgttcaaaggaaatagcaaaacagggaaaacgtcttatgttcataatcgtgatagccaaaatgatggaaatgtcgtcaaagaacaagccaaacaaaaaaaatctgaaaatattaagaaacatgaacctcaatctactgaacagaagaaaagacagcatgctaagaatgaaaaaaggaaaggggctagagctaaccataaccgtaagaaggggcacgataaaaaattggctcgtgcgggaaataacgctatttga

SEQ ID NO: 3948 - DNA, 1875 bp, Artificial Sequence
  Description of Artificial Sequence: Synthetic polynucleotide
atgttatctaggtacaaccgcgttattgaaataaatgggggtaatgcagatatttctttacccattgtcaaatttccaccgtttaaactcagagctcaattaattgaaaaggaccccgtagtatggttacatttgatagaaacctatgtaacgtattttgagtatttgatgcaaggtgctaacgttgaattattagatgaatctacacttgatcatcttcgtttatttttgagaacttacttgcatgaaattgctgatgaggaaggaaagttattaagtctcggtatcaaccatgatgtgtctgaacagttatatttattgaaaggctggatattttctttgatcaagaaatgcgggttattacatcttcagatttttggtgactccttatggaatttgatcaaagtatatgttagacgtaatccagattctattcgtggtttgatcgatggctctttgaaaccaagaatcaacacgcaacgtgtacaattggacaaatcttaccaagttcaacagcatttgaagcagttaatagaatctggaaaatttaaaagaatagatttaaggtgcgttgaagatttattatctgccaaatccatgcagccaaataagtttgcggagaacttctttacggcaaattggattgaaattttagaggcattatgggcaaagggacagggccgtggtcataaagaggctagagaattgatcattatcagtttattttctgtttctgctgatcgtttattgaaaataactaaagaattaggcataagcaattttgaaactttggcgttatatcctcttttaggaacaatgctcataaatgaaggagtccacaaaaggcttcctgatttgaagagcaagttactttttttgaatttaggggggttgtccatggacgaaggagaccatatgagctatccaacatcttctggtactgaagttaatgaagaacaattatccgcgttgatggaattgttcccccagttttctaaatatcaattatctcaaacgttgcttgcctatgataataacattgaattagtaacgaataaaatatttgaggatcctaccattatcgaagcattctccagagaacctgcggaggaagaagtagagccggtgtctgatggtgataatgcatcctttactgaagaattaagtatattggatagaggagatagcagtaaaaataaagagttggacaaaaagattatctctgagggtgttccggatgaattaagaaataaaactttgacaagagcattgaaacttttatacgaggctgatgaagatgaaagggatgacacttatgatgaagccgatgtgaacagatccgatccttccaaaagaattggacttcaagaagacgaagaaagctatgatacaaaagatgattctaatgaagtgagacaagatcataactatcatattgttgaagcttacttgtggaatttattgaaagaggatccgaaattatttgagagaagtaaaagaggtacaaaagtcaggaaaactatgaaagaaatgacttcttggtctgatgaaaaaatcgaaggttggtgtagaatgttagaaagatctcctaccagagcaagacttttagaaaagaagtttatgttcaaaggaaatagcaaaacagggaaaacgtcttatgttcataatcgtgatagccaaaatgatggaaatgtcgtcaaagaacaagccaaacaaaaaaaatctgaaaatattaagaaacatgaacctcaatctactgaacagaagaaaagacagcatgctaagaatgaaaaaaggaaaggggctagagctaaccataaccgtaagaaggggcacgataaaaaattggctcgtgcgggaaataacgctatttga

SEQ ID NO: 3949 - DNA, 423 bp, Saccharomyces cerevisiae
atggggctttgcggaagtaaaacccaaccaatgccttcacaaactacgacggtggcaactaaagcaagaacaaaaccaattaatcgtgatacagtcaagtcaaagcaagaacttcgacataaagagaagaaagataaaaagaagaagacacaactaaagagtacaactgtcccggttgtgcaaaggaaagaaggcagcaaattaactgatacaagtgatccgagcaaaaataaagttagcccaaaggaggccgcaaggttagctgctgagaagagatttcaagagacgaatgaaaagtacaataagggcgagttaggcaaaaagctagctcaagagcgtgccaagtctcataagactcgcttaatggaagaggccgagaaaaagcatgctgagagggaaagggaaaacatgatttatgactga

SEQ ID NO: 3950 - DNA, 423 bp, Artificial Sequence
  Description of Artificial Sequence: Synthetic polynucleotide
atggggctttgcggaagtaaaacccaaccaatgccttctcaaactacgacggtggcaactaaagcaagaacaaaaccaattaatcgtgatacagtcaagtccaagcaagaacttcgtcataaagagaagaaagataaaaagaagaagacacaattgaagagtacaactgtcccggttgtgcaaaggaaagaaggcagcaaattaactgatacaagtgatccgagcaaaaataaagttagcccaaaggaggccgcaaggttagctgctgagaagagatttcaagagacgaatgaaaagtacaataagggcgagttaggcaaaaagttggctcaagagcgtgccaagtctcataagactcgcttaatggaagaggccgagaaaaagcatgctgagagggaaagggaaaacatgatttatgactga

SEQ ID NO: 3951 - DNA, 1941 bp, Saccharomyces cerevisiae
atgatgcttagaagaaatgcggtgagatcgttaaaaactatggaaataagcgtaagcaacgttgttaactccggttcgatagcaatgctgagaggtaagcttgccaacgtagttcttagcgaccgtacttaccactccagtccgatatttcataaaaatgtacctaagggcgttttggacaagaagaatgggcgagaacagcgcaaaacagaacagaatgtgtttaatgtggatccagcttctccatggcgccacgagcttctttcgtttgatgagtgtgtatcatctgctttaaagtactctaccacgcctttgcaaaatacatacaaaagaataggaaacaaccaattgaataaaaatccatcattcgccatgttttgggactccatgggcagagcaatggagttatactattctttgagagaatcgcctgatttcaatgcgtaccgggtgtcacgtttgattcatctgctgcataacggtctgaggtcgacgagagaccaattggtaaaattaagtagaaagccagactacgattcgcaatcttttcacaaggaaatgatgaactttctatgtaattcattaaaggatatatctgatgacattttgataggcaaggtgtctgtcagcggatatggagctactcatctattgacttcatttaaagagctgtcatttgacgatgactgtattcgaatttgggaagcgtcaaagaatttgtccgacgagactacttcacaggcattccaagaaccaaaagtggttggttttatgctgccattactttatgcaaaaacgcgttctctgactgagcctaacgagctatataaccaaattattcaatccaaagaatttatccatcccaatctttacagcggactgataaaagtcttcatcaaggcggaagactacgaaaaggcattatccctcttcggccaattatgtgaaaaggctgaagtgaggaattacggttatttaattgaaacgcacttaagcttcattggtgattccaagaatttaacgttggcagaaagtttctttgacaaaattatcaacgatgaaatgccatacaagattattttacaagtctctacagtgaactcttttttgcagaatatatggaaagcacagaacgattttgatcatgtttatagaatatgggaaaaggctgtaaaattttatggtaacactgttaatcctggaattttgtcctcactaaacaacacttttttcacaatattcttcgaaaactatattaatgacaatatcaatggtttccgtaagcttcaagaaatcataacgttttacagtggggtcaaaaaaattgatgaaccattttttaacgttatgttaactagagcatctatctggcacgaacgcagcataatcgattttatcgataaaaactatactttgtaccatattccaagaactattatatcatatagaatactactgaaatcattgggaagcatagacaacacgaataatgaagagattctggatagatggctggagttggtcaagaaactgaatgaattgggccaacaatatatagccaatgctgatctgtccgctttgagggatgccactgtcgtatggtcacaatcaaagagggatgaaaaggtcttttctgcaaaagctaaaggaacaccagcaacgactacgaccacagaagacgacataaaagttccgaagccattggaaaatttgaaaaatgaggattctacttcgaattcagaagacagaatagagctgtacttgaaaatattaaaaagatatacgccctactttcgcgctaccaagcaagtatataggtataccactggatgcgcagagtcatacccaatattaaatgagtatctgagcggttattctgacttgagtgccgaggacattcctgttcctcaactacatagctttattgctaaggagcaatag

SEQ ID NO: 3952 - DNA, 1941 bp, Artificial Sequence
  Description of Artificial Sequence: Synthetic polynucleotide
atgatgcttagaagaaatgcggtgagatctttaaaaactatggaaataagcgtaagcaacgttgttaactccggttccatagcaatgttgagaggtaagcttgccaacgtagttcttagcgaccgtacttaccactccagtccgatatttcataaaaatgtacctaagggcgttttggacaagaagaatgggagagaacagcgcaaaacagaacagaatgtgtttaatgtggatccagcttctccatggcgccacgagcttctttcttttgatgagtgtgtatcttctgctttaaagtactctaccacgcctttgcaaaatacatacaaaagaataggaaacaaccaattgaataaaaatccatctttcgccatgttttgggactccatgggcagagcaatggagttatactattctttgagagaatctcctgatttcaatgcgtacagagtgtctcgtttgattcatttattacataacggtttgaggtctacgagagaccaattggtaaaattaagtagaaagccagactacgattctcaatcttttcacaaggaaatgatgaactttttatgtaattctttaaaggatatatctgatgacattttgataggcaaggtgtctgtcagcggatatggagctactcatcttttgacttcttttaaagagttatcttttgacgatgactgtattagaatttgggaagcgtctaagaatttgtccgacgagactacttctcaggcattccaagaaccaaaagtggttggttttatgcttccattactttatgcaaaaacgcgttctttgactgagcctaacgagttgtataaccaaattattcaatccaaagaatttatccatcccaatctttacagcggattgataaaagtcttcatcaaggcggaagactacgaaaaggcattatccctcttcggccaattatgtgaaaaggctgaagtgaggaattacggttatttaattgaaacgcacttaagcttcattggtgattccaagaatttaacgttggcagaaagtttctttgacaaaattatcaacgatgaaatgccatacaagattattttacaagtctctacagtgaactcttttttgcagaatatatggaaagcacagaacgattttgatcatgtttatagaatatgggaaaaggctgtaaaattttatggtaacactgttaatcctggaattttgtcctctttgaacaacacttttttcacaatattcttcgaaaactatattaatgacaatatcaatggtttccgtaagcttcaagaaatcataacgttttacagtggggtcaaaaaaattgatgaaccattttttaacgttatgttaactagagcatctatctggcacgaacgcagcataatcgattttatcgataaaaactatactttgtaccatattccaagaactattatatcttatagaatattattgaaatctttgggaagcatagacaacacgaataatgaagagattttagatagatggttggagttggtcaagaaattgaatgaattgggccaacaatatatagccaatgctgatttatccgctttgagggatgccactgtcgtatggtctcaatccaagagggatgaaaaggtcttttctgcaaaagctaaaggaacaccagcaacgactacgaccacagaagacgacataaaagttccgaagccattggaaaatttgaaaaatgaggattctacttccaattctgaagacagaatagagttatacttgaaaatattaaaaagatatacgccctactttcgcgctaccaagcaagtatataggtataccactggatgcgcagagagttacccaatattaaatgagtatttgagcggttattctgacttgagtgccgaggacattcctgttcctcaattgcatagctttattgctaaggagcaatga

SEQ ID NO: 3953 - DNA, 450 bp, Saccharomyces cerevisiae
atgtcagccaccagagccaataaagatattttcacactattcgacaagaagggtcaaggcgccattgccaaggattccttgggagattacctgagggcaattggctacaaccccaccaaccagctcgtacaggacatcataaacgcggattcgagcttgagagacgcctctagcttgacgctggaccagattacaggcctaattgaagtcaacgaaaaggaattggatgcaactaccaaggcaaagacagaagacttcgtcaaggcattccaggtcttcgacaaggaaagtacaggcaaggtatccgttggtgacttaaggtacatgctaactggcttgggtgaaaagttaaccgacgctgaagtagacgagctgttgaagggtgttgaagtggacagcaacggagaaattgactacaagaagttcatcgaagatgttttgagacaatga

SEQ ID NO: 3954 - DNA, 450 bp, Artificial Sequence
  Description of Artificial Sequence: Synthetic polynucleotide
atgtctgccaccagagccaataaagatattttcacattgttcgacaagaagggtcaaggcgccattgccaaggattccttgggagattacttgagggcaattggctacaaccccaccaaccagctcgtacaggacatcataaacgcggattctagcttgagagacgcctctagcttgacgcttgaccagattacaggcttaattgaagtcaacgaaaaggaattggatgcaactaccaaggcaaagacagaagacttcgtcaaggcattccaggtcttcgacaaggaaagtacaggcaaggtatccgttggtgacttaaggtacatgttgactggcttgggtgaaaagttaaccgacgctgaagtagacgagttattgaagggtgttgaagtggacagcaacggagaaattgactacaagaagttcatcgaagatgttttgagacaatga

SEQ ID NO: 3955 - DNA, 1131 bp, Saccharomyces cerevisiae
atgtccgatctcgttaccaagttcgaatcgcttattatttcaaagtatccagtttctttcactaaagaacaatctgctcaagctgcccaatgggaatcggttctaaaatctggtcaaatccaaccacacttagatcaattgaatttggtgttaagagacaacaccttcattgtgtccactttgtacccaacatctaccgacgttcacgtcttcgaagtcgccttaccattgattaaggatttagtggcaagctccaaggatgtcaagtcaacttataccacatacagacatattttgagatggattgattacatgcaaaacttgttggaagtgtcgagcactgacaagttagaaataaatcacgatttggacttacctcatgaagttattgagaagaagaaaaaggcacctgcgggtggcgctgctgatgccgcagccaaggcagacgaagatgttagtaagaaggctaaaaagcaagatcatccaagaggtaagcctgatgaagaaacccttaagaaattgagagaggaggcaaaggccaagaaggcagctaagaaggccgccaacgccaaacaacaacaagagcaacaaaataaggccccagaaaagccaaagccatccgcaatagatttccgtgttggttttattcaaaaagccatcaagcacccagatgccgactccctatatgtctctacaattgatgtcggtgatgaagaaggcccaagaactgtttgttctggtttggtcaagcattttcctttggacgctatgcaagaacgttatgttgttgttgtatgcaacttgaaaccagttaacatgagaggtattaaatccactgctatggtattgtgtggttctaacgacgacaaagttgaatttgtcgagccaccaaaggactctaaggccggtgacaaggtgttctttgaaggtttcggtgacgaagctccaatgaagcaattgaatccaaaaaagaagatctgggaacacttacaacctcattttactacaaatgacgggttggaagttatcttcaaagacgaagaagaaaaggaccatcctgtaagaaagttgaccaacgctaagggcgaatcattcaaggttgctagtattgctaatgctcaagtccgttaa

SEQ ID NO: 3956 - DNA, 1131 bp, Artificial Sequence
  Description of Artificial Sequence: Synthetic polynucleotide
atgtccgatctcgttaccaagttcgaatctcttattatttccaagtatccagtttctttcactaaagaacaatctgctcaagctgcccaatgggaatctgttttgaaatctggtcaaatccaaccacacttagatcaattgaatttggtgttaagagacaacaccttcattgtgtccactttgtacccaacatctaccgacgttcacgtcttcgaagtcgccttaccattgattaaggatttagtggcaagctccaaggatgtcaagtctacttataccacatacagacatattttgagatggattgattacatgcaaaacttgttggaagtgagtagcactgacaagttagaaataaatcacgatttggacttacctcatgaagttattgagaagaagaaaaaggcacctgcgggtggcgctgctgatgccgcagccaaggcagacgaagatgttagtaagaaggctaaaaagcaagatcatccaagaggtaagcctgatgaagaaacccttaagaaattgagagaggaggcaaaggccaagaaggcagctaagaaggccgccaacgccaaacaacaacaagagcaacaaaataaggccccagaaaagccaaagccatccgcaatagatttccgtgttggttttattcaaaaagccatcaagcacccagatgccgactccttatatgtctctacaattgatgtcggtgatgaagaaggcccaagaactgtttgttctggtttggtcaagcattttcctttggacgctatgcaagaacgttatgttgttgttgtatgcaacttgaaaccagttaacatgagaggtattaaatccactgctatggtattgtgtggttctaacgacgacaaagttgaatttgtcgagccaccaaaggactctaaggccggtgacaaggtgttctttgaaggtttcggtgacgaagctccaatgaagcaattgaatccaaaaaagaagatctgggaacacttacaacctcattttactacaaatgacgggttggaagttatcttcaaagacgaagaagaaaaggaccatcctgtaagaaagttgaccaacgctaagggcgaatctttcaaggttgctagtattgctaatgctcaagtccgttga

SEQ ID NO: 3957 - DNA, 1461 bp, Saccharomyces cerevisiae
atgaataggattctatctagtgcatcgttgctatccaatgttagcatgccaaggcaaaacaagcataaaattacaaaggcgttatgttatgcaattatagtagcctcaatcggttcaatacaatttggttaccacttgtcggaattaaatgcacctcagcaggtgctttcgtgctcagaatttgacattcccatggagggctatccctatgacagaacatggctgggaaaaagaggatataagcaatgtataccattgaatgatgaacagattggaatcgtgacctccgttttttgcattggaggcattttgggctcttattttgccaccagtctggccaatatttatggaaggaagttctcaagtttaattaactgcacattgaatatcgtcggttcgctgataatcttcaattcgaatagttataggggcttaatcattggtagaattctagtgggtatttcgtgtggctctttgatcgtgattataccccttttcattaaggaagttgctccaagcggttgggaaggtttactgggttcgatgacacaaatctgtatcaggttaggggtcttgttgacacaaggaatagccctcccactgactgattcataccgttggaggtggattttgtttggtagcttccttatcgcggtattgaattttttcatgtggtttatagtcgatgaatctccaaaatggttgttagcacatggaagagtcaccgatgctaagttatctctatgtaagctacgtggcgtgacttttgatgaagccgcacaagagatacaggattggcaactgcaaatagaatctggggatccgttgattgaaccaaccaccacgaactctattagcggttctaattcattatggaaatacttgagggacagaacaaatgtcaagtctcgccatgttatcactgtattgttatttggccaacaattctgcggtataaactccattgtactatatggtaccaagataattagtcaactgtatcctcagcacgcaattaggataaactttttcattagtatggtgaatgtattagtcaccatactagtttctctgctaattcatagtttgccacgtaaaccgcttctgatgacgtccaccgtcttagtttctgttaccgccttcattatgggaatagcaatgaaccataataaaatgaaccttttgattgtgttttcatttatatatatgggcgttttcacgatggggttaaatccgttgccatttataataatgagagaagtatcaaaaccacaggatatggtccttgcgcaaagatatggtaccatttgcaattgggtaggaacttttatcattgcatatactttccctattattcatgatgttttgtcaggttatgttttcatcatttttgctatcatagcatgctcaataagcgcctttatctggaagaaggttccggagaccaagaggagcggctaa

SEQ ID NO: 3958 - DNA, 1461 bp, Artificial Sequence
  Description of Artificial Sequence: Synthetic polynucleotide
atgaataggattttatctagtgcaagtttgttatccaatgttagcatgccaaggcaaaacaagcataaaattacaaaggcgttatgttatgcaattatagtagccagcatcggttccatacaatttggttaccacttgagtgaattaaatgcacctcagcaggtgctttcttgcagtgaatttgacattcccatggagggctatccctatgacagaacatggttaggaaaaagaggatataagcaatgtataccattgaatgatgaacagattggaatcgtgacctccgttttttgcattggaggcattttgggctcttattttgccaccagtttggccaatatttatggaaggaagttctctagtttaattaactgcacattgaatatcgtcggttctttgataatcttcaatagtaatagttataggggcttaatcattggtagaattttggtgggtattagttgtggctctttgatcgtgattataccccttttcattaaggaagttgctccaagcggttgggaaggtttattgggttctatgacacaaatctgtatcaggttaggggtcttgttgacacaaggaatagccctcccattgactgattcttaccgttggaggtggattttgtttggtagcttccttatcgcggtattgaattttttcatgtggtttatagtcgatgaatctccaaaatggttgttagcacatggaagagtcaccgatgctaagttatctttatgtaagttgcgtggcgtgacttttgatgaagccgcacaagagatacaggattggcaattacaaatagaatctggggatccgttgattgaaccaaccaccacgaactctattagcggttctaattctttatggaaatacttgagggacagaacaaatgtcaagtctcgccatgttatcactgtattgttatttggccaacaattctgcggtataaactccattgtattatatggtaccaagataattagtcaattatatcctcagcacgcaattaggataaactttttcattagtatggtgaatgtattagtcaccatattagtttctttattgattcatagtttgccacgtaaaccgcttttgatgacgtccaccgtcttagtttctgttaccgccttcattatgggaatagcaatgaaccataataaaatgaaccttttgattgtgttttcttttatatatatgggcgttttcacgatggggttaaatccgttgccatttataataatgagagaagtatccaaaccacaggatatggtccttgcgcaaagatatggtaccatttgcaattgggtaggaacttttatcattgcatatactttccctattattcatgatgttttgtctggttatgttttcatcatttttgctatcatagcatgctctataagcgcctttatctggaagaaggttccggagaccaagaggagcggctga

SEQ ID NO: 3959 - DNA, 450 bp, Saccharomyces cerevisiae
atgccttccagattcactaagactagaaagcacagaggtcacgtctcagccggtaaaggtcgtatcggtaagcacagaaagcaccccggtggtagaggtatggccggtggtcaacatcaccacagaattaacatggataaataccatccaggttatttcggtaaggttggtatgagatacttccacaagcaacaagctcatttctggaagccagtcttgaacttggacaaattgtggacattgatcccagaagacaagagagaccaatacttgaaatctgcttctaaggaaactgctccagttattgacactttggcagccggttacggtaagatcttgggtaagggtagaattccaaatgttccagttatcgtcaaagctagattcgtctccaagttggctgaagaaaaaatcagagctgctggtggtgttgttgaattgatcgcttaa

SEQ ID NO: 3960 - DNA, 450 bp, Artificial Sequence
  Description of Artificial Sequence: Synthetic polynucleotide
atgccttccagattcactaagactagaaagcacagaggtcacgtctctgccggtaaaggtcgtatcggtaagcacagaaagcaccccggtggtagaggtatggccggtggtcaacatcaccacagaattaacatggataaataccatccaggttatttcggtaaggttggtatgagatacttccacaagcaacaagctcatttctggaagccagtcttgaacttggacaaattgtggacattgatcccagaagacaagagagaccaatacttgaaatctgcttctaaggaaactgctccagttattgacactttggcagccggttacggtaagatcttgggtaagggtagaattccaaatgttccagttatcgtcaaagctagattcgtctccaagttggctgaagaaaaaatcagagctgctggtggtgttgttgaattgatcgcttga

SEQ ID NO: 3961 - DNA, 648 bp, Saccharomyces cerevisiae
atgactgcagttaacatctggaagccagaagataatatacctagggagattttggcaattctttcgaaacctcacccaaattatcagttagcgtttttgaatattatacaacttttgaaaacgcaaagaagaactggttgggttgaccatggtattgacccatgcgaaagtatatctgaccatatgtacagaatgggtttaactaccatgctgattacggacaagaatgttgatcgtaacaaatgtatcagaatcgcacttgttcacgattttgcggagtcattagttggtgatattacacctaatgacccaatgacaaaggaagagaaacatcgcagagaatttgaaactgtcaagtatctctgtgaaagcataataaggccctgcagtgaaagcgcatctagggaaattcttgatgactggttagcatacgaaaagcagacctgtttggaaggaagatatgtcaaagatattgataagtatgaaatgttggttcaatgttttgagtacgaacaaaagtataatggcaagaaggatttgaaacaatttttgggagccatcaatgatataaaaactgatgaagttaaaaaatggacacaatctttactggaagatcgacaagcctttttcgacagtttgaaggagtaa

SEQ ID NO: 3962 - DNA, 648 bp, Artificial Sequence
  Description of Artificial Sequence: Synthetic polynucleotide
atgactgcagttaacatctggaagccagaagataatatacctagggagattttggcaattctttctaaacctcacccaaattatcagttagcgtttttgaatattatacaacttttgaaaacgcaaagaagaactggttgggttgaccatggtattgacccatgcgaaagtatatctgaccatatgtacagaatgggtttaactaccatgttgattacggacaagaatgttgatcgtaacaaatgtatcagaatcgcacttgttcacgattttgcggagtctttagttggtgatattacacctaatgacccaatgacaaaggaagagaaacatcgcagagaatttgaaactgtcaagtatctctgtgaaagcataataaggccctgcagtgaaagcgcatctagggaaattcttgatgactggttagcatacgaaaagcagacctgtttggaaggaagatatgtcaaagatattgataagtatgaaatgttggttcaatgttttgagtacgaacaaaagtataatggcaagaaggatttgaaacaatttttgggagccatcaatgatataaaaactgatgaagttaaaaaatggacacaatctttattggaagatagacaagcctttttcgacagtttgaaggagtga

SEQ ID NO: 3963 - DNA, 1050 bp, Saccharomyces cerevisiae
atgcaaccatttgatagtgggcatgatgatttagttcatgatgtcgtttatgacttttacggaagacatgtggcaacatgctcttctgatcaacatattaaagtttttaaattagacaaggacacgagtaattgggaactcagtgactcatggagagctcacgacagtagtatcgtggccattgattgggccagtccagaatatgggcgcatcattgcttcagcctcttacgataagacggtaaaattatgggaagaagatcccgaccaagaagaatgctctggccgtcgttggaacaagctgtgtaccctgaatgattccaaaggatcactttatagtgtaaaatttgcgccagcgcatttgggcttaaaattagcttgtttgggtaacgatggaatcctcagactttatgatgccttagaaccttctgacctaaggtcatggacactgacttctgagatgaaagtgctatctataccaccagcaaatcatttacagtctgatttttgtctctcttggtgtccttcgagattttctcctgaaaagctcgcagtctctgcattggaacaagcgattatataccaaaggggtaaagacggtaaacttcacgttgcagcaaaacttcccggtcataaaagtttaataagaagtatcagctgggctccttccattggtagatggtatcaactcattgcaacaggttgcaaagatggtagaattagaattttcaaaatcacagaaaaactaagtcccctggcctcagaggagtctttaactaactcaaatatgtttgataatagtgctgatgttgacatggatgcacagggcagatcagactcaaataccgaagagaaagctgagctacaatcaaacttgcaagttgaacttctaagcgagcatgatgaccataatggcgaagtttggtccgtgtcttggaatttaacgggtacaatcttaagcagtgctggggatgatgggaaggtacgtttatggaaagccacttattcaaatgaatttaagtgtatgtcagtaattactgcccaacaataa

SEQ ID NO: 3964 - DNA, 1050 bp, Artificial Sequence
  Description of Artificial Sequence: Synthetic polynucleotide
atgcaaccatttgatagtgggcatgatgatttagttcatgatgtcgtttatgacttttacggaagacatgtggcaacatgctcttctgatcaacatattaaagtttttaaattagacaaggacacgagtaattgggaactcagtgactcttggagagctcacgacagtagtatcgtggccattgattgggccagtccagaatatgggcgcatcattgcttctgcctcttacgataagacggtaaaattatgggaagaagatcccgaccaagaagaatgctctggccgtcgttggaacaagttatgtaccttgaatgattccaaaggatctctttatagtgtaaaatttgcgccagcgcatttgggcttaaaattagcttgtttgggtaacgatggaatcctcagactttatgatgccttagaaccttctgacttgaggagttggacattgacttctgagatgaaagtgttatctataccaccagcaaatcatttacagtctgatttttgtctctcttggtgtccttccagattttctcctgaaaagctcgcagtctctgcattggaacaagcgattatataccaaaggggtaaagacggtaaacttcacgttgcagcaaaacttcccggtcataaaagtttaataagaagtatcagctgggctccttccattggtagatggtatcaactcattgcaacaggttgcaaagatggtagaattagaattttcaaaatcacagaaaaattaagtcccttagcctctgaggagtctttaactaacagtaatatgtttgataatagtgctgatgttgacatggatgcacagggcagaagtgactctaataccgaagagaaagctgagttacaaagtaacttgcaagttgaacttttgagcgagcatgatgaccataatggcgaagtttggtccgtgtcttggaatttaacgggtacaatcttaagcagtgctggggatgatgggaaggtacgtttatggaaagccacttattctaatgaatttaagtgtatgtctgtaattactgcccaacaatga

SEQ ID NO: 3965 - DNA, 1923 bp, Saccharomyces cerevisiae
atgccaccaaaagaagctcccaagaaatggaaggcgccaaaagggccaaaacctacccaccgtaaaaataaaaataagcttgaattaggcagagctattaaatatgcacgtcaaaaagaaaatgccatcgagtatttacctgatggtgaaatgaggttcactaccgataagcatgaggccaactgggttaaattaagatctgtaactcaagaatcagctttagatgaattcttgagtacagctgcactggcagacaaagatttcacggccgatagacattcaaatgttaaaattattagaatggatagcggtaatgattctgcgacatctcaagggttttctatgactaatgagcagcgtggaaatcttaatgcgaagcaaagagcgcttgctaaggatttgattgttccaaggaggcctgaatggaacgagggcatgtccaagtttcagcttgataggcaagaaaaggaagcgtttttagaatggagaagaaaattggcacatttacaagaaagcaatgaagacttgttgttaacaccgtttgaaagaaatatcgaagtttggaaacagttatggagagttgttgaaagatcagatttagttgttcaaattgtagatgcgaggaatccgttgctgtttagatctgtcgatttagaaagatatgtaaaagagtcagatgacagaaaagcaaacttactgctagttaataaagcagatttattgaccaaaaagcaacgtatcgcttgggcaaagtactttatctccaagaatatttcgttcacgttttactctgcattgagagctaatcaattattggagaaacaaaaggaaatgggggaagattatagagaacaagatttcgaggaagctgataaagaagggttcgatgctgatgaaaaagttatggaaaaagttaaaattctgtccattgaccaactggaagaattgtttttatcaaaagctccaaacgagcctttattgccacctctgcccggtcaacctccactgattaatattggtttggttggttatccaaatgtaggtaaatcctccactattaattcgctcgtgggtgccaagaaagtttctgtttcatccacgcctggtaaaacaaaacacttccaaactattaagttatctgattctgtcatgctttgtgactgtcccggtcttgtcttcccaaactttgcatataacaagggtgagctcgtgtgtaatggtgttttacctattgatcaattacgtgattatattggtccagcaggtttagtagcagaaagaataccaaagtattacattgaagcgatttatggtatccatattcaaaccaaatcaagggatgaaggtgggaatggggatataccaactgctcaagaattgttagtcgcatacgccagagctcgtggttatatgactcaaggttacggttctgctgatgaaccaagagcaagtcgttatatattgaaagattacgtcaatgggaaattactgtatgtcaaccctccgccccatctagaggatgatacaccttacactagagaagagtgtgaagaatttaacaaagatttatatgtgttcgacagattaccggacaccagaaaggagcaagtgcaaaatgctgctaaggctaaaggcattgatatcgtggatttagctcgtgatttgaatcagctaacgttttcagctcacactggtggtgacacacaaaaagaagccaaatctgttacgcacggtggtaaacaagctgcattgtacaatgccgctgaggacttggatagagacttcttcaagatgaacaacgtcgaaggtagattaagtacaccattccacaaagttcaaaatagttcagctggtaagagacataacaaaaaaaacaaaagtaaaaatgcgaaaagcaaagtttttagcattgaaaataattag

SEQ ID NO: 3966 - DNA, 1923 bp, Artificial Sequence
  Description of Artificial Sequence: Synthetic polynucleotide
atgccaccaaaagaagctcccaagaaatggaaggcgccaaaagggccaaaacctacccaccgtaaaaataaaaataagcttgaattaggcagagctattaaatatgcacgtcaaaaagaaaatgccatcgagtatttacctgatggtgaaatgaggttcactaccgataagcatgaggccaactgggttaaattaagatctgtaactcaagaatctgctttagatgaattcttgagtacagctgcattggcagacaaagatttcacggccgatagacattctaatgttaaaattattagaatggatagcggtaatgattctgcgacatctcaagggttttctatgactaatgagcagcgtggaaatcttaatgcgaagcaaagagcgcttgctaaggatttgattgttccaaggaggcctgaatggaacgagggcatgtccaagtttcagcttgataggcaagaaaaggaagcgtttttagaatggagaagaaaattggcacatttacaagaaagcaatgaagacttgttgttaacaccgtttgaaagaaatatcgaagtttggaaacagttatggagagttgttgaaagaagtgatttagttgttcaaattgtagatgcgaggaatccgttgttatttagatctgtcgatttagaaagatatgtaaaagagtctgatgacagaaaagcaaacttattattggttaataaagcagatttattgaccaaaaagcaacgtatcgcttgggcaaagtactttatctccaagaatatttctttcacgttttactctgcattgagagctaatcaattattggagaaacaaaaggaaatgggggaagattatagagaacaagatttcgaggaagctgataaagaagggttcgatgctgatgaaaaagttatggaaaaagttaaaattttatccattgaccaattggaagaattgtttttatccaaagctccaaacgagcctttattgccacctttgcccggtcaacctccattgattaatattggtttggttggttatccaaatgtaggtaaatcctccactattaatagtctcgtgggtgccaagaaagtttctgtttcttccacgcctggtaaaacaaaacacttccaaactattaagttatctgattctgtcatgctttgtgactgtcccggtcttgtcttcccaaactttgcatataacaagggtgagctcgtgtgtaatggtgttttacctattgatcaattacgtgattatattggtccagcaggtttagtagcagaaagaataccaaagtattacattgaagcgatttatggtatccatattcaaaccaaatctagggatgaaggtgggaatggggatataccaactgctcaagaattgttagtcgcatacgccagagctcgtggttatatgactcaaggttacggttctgctgatgaaccaagagcaagtcgttatatattgaaagattacgtcaatgggaaattattatatgtcaaccctccgccccatttagaggatgatacaccttacactagagaagagtgtgaagaatttaacaaagatttatatgtgttcgacagattaccggacaccagaaaggagcaagtgcaaaatgctgctaaggctaaaggcattgatatcgtggatttagctcgtgatttgaatcagttaacgttttctgctcacactggtggtgacacacaaaaagaagccaaatctgttacgcacggtggtaaacaagctgcattgtacaatgccgctgaggacttggatagagacttcttcaagatgaacaacgtcgaaggtagattaagtacaccattccacaaagttcaaaatagttctgctggtaagagacataacaaaaaaaacaaaagtaaaaatgcgaaaagcaaagtttttagcattgaaaataattga

SEQ ID NO: 3967 - DNA, 738 bp, Saccharomyces cerevisiae
atggctgaaacttccaacgacccctttctgtcctacgttttgagtagcaaacaattaactaatttgaatcgtctacgaaggaaagcagttacaaaacaactgggatcaagtgacgacaataaggtctcagaggagtttttgaggtatcaacatacttatcaaagagaagcatttgaatatctgcaaacaaaacatgacgcccacaaaataatggagtcacagtacgaacagtaccaaagcagttcaaaaacaagaagatatagtatcgatttagattctgtagatgcagttgacacggaatcgcaaacagaatacccaaatgaggagtttattgatagaaacgaagatagcgaagctgttatggagttgagaaagagattgttggggaagggacagaataagggtttaggatatgaaactacgaaatcagtcgataggcaaattgaggaccaggacacgttgcaacaggatttgattcaggatatgagcaaacttgtgggcagtttgaagcaaggagctgtggcatttcaatcagcacttgatgaagataagcaagttcttggagctgcagagataggtattcaagttgcttctcaaggtttaatggatgttagcggtaaattaaggaaatatgacaagagtaaattgagttacttgttttatattactgttttcatttttatgattctcggactggtgtttacatttatcataattcaattattcccggccctataa

SEQ ID NO: 3968 - DNA, 738 bp, Artificial Sequence
  Description of Artificial Sequence: Synthetic polynucleotide
atggctgaaacttccaacgacccctttctttcctacgttttgagtagcaaacaattaactaatttgaatcgtttaagaaggaaagcagttacaaaacaattaggaagtagtgacgacaataaggtcagtgaggagtttttgaggtatcaacatacttatcaaagagaagcatttgaatatttacaaacaaaacatgacgcccacaaaataatggagagccagtacgaacagtaccaaagcagttctaaaacaagaagatatagtatcgatttagattctgtagatgcagttgacacggaatctcaaacagaatacccaaatgaggagtttattgatagaaacgaagatagcgaagctgttatggagttgagaaagagattgttggggaagggacagaataagggtttaggatatgaaactacgaaatctgtcgataggcaaattgaggaccaggacacgttgcaacaggatttgattcaggatatgagcaaacttgtgggcagtttgaagcaaggagctgtggcatttcaaagtgcacttgatgaagataagcaagttcttggagctgcagagataggtattcaagttgcttctcaaggtttaatggatgttagcggtaaattaaggaaatatgacaagagtaaattgagttacttgttttatattactgttttcatttttatgattctcggattggtgtttacatttatcataattcaattattcccggccttgtga

SEQ ID NO: 3969 - DNA, 1449 bp, Saccharomyces cerevisiae
atggtcaaaagaacagtcgccaccaatggagacgcgtctggcgctcatagagcaaagaaaatgtctaaaactcatgcttctcatatcataaacgctcaagaagactacaagcatatgtacttaagtgtccaaccattggatatattttgctggggtactggttctatgtgtgagcttgggttgggtccactagccaaaaataaggaagttaaaagaccaaggttaaacccatttttacctcgcgatgaggccaagatcatttcttttgcagtcggtggtatgcacaccttagcccttgatgaagaaagcaatgtatggtcctggggttgcaatgacgtgggtgcgttgggcagagatacttccaacgccaaggaacaactcaaggacatggacgccgatgactcaagtgatgacgaagatggtgatttgaacgaattggaatctacgcccgctaaaatcccaagagagtcatttcctcccttagcggagggacacaaggtcgtgcaattggcagctacagacaatatgagttgcgccctgttcagcaatggcgaggtatacgcatggggtactttccgttgcaatgaaggtatcctagggttttaccaagataaaattaaaattcaaaaaactccatggaaagtgcctacattctctaagtacaatattgtccaattagctcccggtaaggatcacatacttttcttagatgaagagggtatggtgttcgcctggggtaacggtcagcaaaaccaattaggaagaaaagttatggaaaggttccgtttaaagactttggatcccagaccatttgggttaagacatgtaaaatacatcgcatctggcgaaaaccattgctttgctttaacaaaagacaacaagttagtaagctgggggttgaatcagtttggtcaatgtggtgtttcagaggatgtggaagacggtgcgcttgttacaaagccaaaaagactagcgctacctgataacgttgttatcagaagcattgctgctggtgaacatcactcattgatcctatcccaagatggcgatttgtattcgtgtggtagactagacatgtttgaagttggtatcccaaaagacaatttacccgaatatacttacaaagatgttcatggaaaagcacgtgccgtgccacttccaactaagttgaataatgttccgaagttcaaaagcgttgcggcggggtctcaccattcagtcgcggtagctcaaaatggcattgcctattcttggggttttggtgaaacctacgccgttggattaggcccttttgaggacgacactgaagttccaaccagaatcaagaatactgctacacaggatcataacatcattttagtcgggtgtggaggccaattttccgtgtctggtggtgttaagctgtctgatgaggacgcagaaaagagagcggatgaaatggatgattaa

SEQ ID NO: 3970 - DNA, 1449 bp, Artificial Sequence
  Description of Artificial Sequence: Synthetic polynucleotide
atggtcaaaagaacagtcgccaccaatggagacgcgtctggcgctcatagagcaaagaaaatgtctaaaactcatgcttctcatatcataaacgctcaagaagactacaagcatatgtacttaagtgtccaaccattggatatattttgctggggtactggttctatgtgtgagcttgggttgggtccattggccaaaaataaggaagttaaaagaccaaggttaaacccatttttacctcgcgatgaggccaagatcatttcttttgcagtcggtggtatgcacaccttagcccttgatgaagaaagcaatgtatggtcctggggttgcaatgacgtgggtgcgttgggcagagatacttccaacgccaaggaacaactcaaggacatggacgccgatgacagcagtgatgacgaagatggtgatttgaacgaattggaatctacgcccgctaaaatcccaagagagtcttttcctcccttagcggagggacacaaggtcgtgcaattggcagctacagacaatatgagttgcgcccttttcagcaatggcgaggtatacgcatggggtactttccgttgcaatgaaggtatcttggggttttaccaagataaaattaaaattcaaaaaactccatggaaagtgcctacattctctaagtacaatattgtccaattagctcccggtaaggatcacatacttttcttagatgaagagggtatggtgttcgcctggggtaacggtcagcaaaaccaattaggaagaaaagttatggaaaggttccgtttaaagactttggatcccagaccatttgggttaagacatgtaaaatacatcgcatctggcgaaaaccattgctttgctttaacaaaagacaacaagttagtaagctgggggttgaatcagtttggtcaatgtggtgtttctgaggatgtggaagacggtgcgcttgttacaaagccaaaaagattagcgttacctgataacgttgttatcagaagcattgctgctggtgaacatcactctttgatcttgtcccaagatggcgatttgtattcttgtggtagattagacatgtttgaagttggtatcccaaaagacaatttacccgaatatacttacaaagatgttcatggaaaagcacgtgccgtgccacttccaactaagttgaataatgttccgaagttcaaaagcgttgcggcggggtctcaccattctgtcgcggtagctcaaaatggcattgcctattcttggggttttggtgaaacctacgccgttggattaggcccttttgaggacgacactgaagttccaaccagaatcaagaatactgctacacaggatcataacatcattttagtcgggtgtggaggccaattttccgtgtctggtggtgttaagttatctgatgaggacgcagaaaagagagcggatgaaatggatgattga

SEQ ID NO: 3971 - DNA, 831 bp, Saccharomyces cerevisiae
atgggtactagcatagtaaatctaaaccaaaagattgaactgcccccaatccaggtcttattcgagtcacttaaccgagaaaatgaaacaaaaccccacttcgaggaacgcaggttatatcaacctaatccttcatttgttcctagaacaaatatagcagttggtagcccagttaacccggttccagtatcatcccctgtttttttcattggtccttctccacagagaagcattcagaatcacaacgctattatgactcaaaacatacgtcagtatccagttatatataataataaccgagaagttatatctacgggtgagagaaattacataataactgtaggggggcctccggtaacttcttcgcagcccgagtatgagcatatctcaactcccaatttctatcaagagcagagactggcacaacctcatccggtaaatgagagtatgatgataggtggttatacaaatcctcagcctattagcatttcccgaggtaaaatgctatccggcaacataagtacgaactcggtccgcggatctaataatggatattccgcaaaagaaaaaaaacataaggcacatggtaagaggtccaatttaccaaaggccaccgtttcaattctaaacaaatggttacatgagcacgtaaacaacccttacccaaccgtgcaggaaaaaagagaactgctcgcgaaaactggtctaactaaacttcaaatttccaattggttcattaatgctaggagaagaaaaatattttctggccagaatgacgcaaataatttcagaagaaaattcagttcttctacaaatttagctaagttctga

SEQ ID NO: 3972 - DNA, 831 bp, Artificial Sequence
  Description of Artificial Sequence: Synthetic polynucleotide
atgggtactagcatagtaaatttgaaccaaaagattgaattgcccccaatccaggtcttattcgagtctcttaacagagaaaatgaaacaaaaccccacttcgaggaacgcaggttatatcaacctaatccttcttttgttcctagaacaaatatagcagttggtagcccagttaacccggttccagtatcttcccctgtttttttcattggtccttctccacagagaagcattcagaatcacaacgctattatgactcaaaacatacgtcagtatccagttatatataataataacagagaagttatatctacgggtgagagaaattacataataactgtaggggggcctccggtaacttcttctcagcccgagtatgagcatatctctactcccaatttctatcaagagcagagattagcacaacctcatccggtaaatgagagtatgatgataggtggttatacaaatcctcagcctattagcatttccagaggtaaaatgctttccggcaacataagtacgaactctgtccgcggatctaataatggatattccgcaaaagaaaaaaaacataaggcacatggtaagaggtccaatttaccaaaggccaccgtttctattttgaacaaatggttacatgagcacgtaaacaacccttacccaaccgtgcaggaaaaaagagaattactcgcgaaaactggtttgactaaacttcaaatttccaattggttcattaatgctaggagaagaaaaatattttctggccagaatgacgcaaataatttcagaagaaaattcagttcttctacaaatttagctaagttctga

SEQ ID NO: 3973 - DNA, 1734 bp, Saccharomyces cerevisiae
atgaacctttttgatgtggctgacttttatataaacaaaattgtgacttcccaatcgaaattgagcgtagccaatgtcaatgaacaccaaaggattaaggttttgctgttggataagaataccacacctacgatatccttatgtgccactcaaagtgagttgttgaagcatgaaatatatctggtagaaagaatagaaaatgagcaacgtgaagtgtccaggcatttaaggtgcttagtttacgttaaacccacagaggaaacactgcaacatctgctgcgtgagttaagaaatcctcggtacggcgagtatcaaatattctttagtaatattgtctctaaatctcaattagaacggctagctgaatctgacgacttggaagctgttactaaggtggaagaaatattccaagacttttttatattaaaccaagatttattttcgtttgatttgcaaccaagagaatttttaagtaataaattggtttggagcgaaggggggctaacaaaatgtaccaacagcttagtttctgtgcttttatccttaaagataaaaccagatatcaggtatgaaggagcaagtaaaatttgtgaaagattggctaaagaagtttcctatgagattggtaaaaacgaaagaactttttttgattttcctgtgatggattcgacacctgtgttactaattttagatcgtaatactgatcctataacacctttacttcaaccttggacctaccaatcaatgatcaatgagtatataggcattaagcggaatatagttgatttatcgaaagtgcctagaattgataaagacctggagaaggtcaccttatcatcaaagcaagatgctttcttcagggataccatgtatttgaattttggtgaattgggtgataaagtaaaacaatatgtgactacatacaaagacaagacacaaaccaacagccaaataaattccattgaggatattaaaaactttattgagaagtatccagagtttagaaaattatctggaaatgttgcaaagcatatggctatagtgggggaattagacagacagttgaagataaaaaatatatgggaaattagtgaaatagaacaaaatctatcagcacacgatgccaatgaagaagatttctccgatttgattaaattgctacaaaatgaagcagttgataagtattacaagttaaagcttgcatgtatttattctttaaacaatcaaaccagctcagacaaaatccgtcaactagttgagattctgtctcaacaacttcctccagaggacgtcaactttttccataaatttaaatcgctttttagccgccaggataaaatgactcaaagtaaccatgacaaggacgatatattaaccgaactagcaagaagatttaatagtagaatgaattctaagagcaacaccgctgaaaacgtctatatgcaacatattccggaaatttcgtcattactaacagatctctctaaaaatgcgttattcagggatcgtttcaaagaaatagatactcaaggccatagagtgatcggaaaccagcagagcaaagatattcctcaggatgtaatattgtttgttattggcggtgtaacttatgaggaggcaaggctagtccatgatttcaatggaacgatgaataacagaatgagggtggttttaggaggcacctctatactttcaactaaagaatatatggattctattagatctgcaaaataa

SEQ ID NO: 3974 - DNA, 1734 bp, Artificial Sequence
  Description of Artificial Sequence: Synthetic polynucleotide
atgaacctttttgatgtggctgacttttatataaacaaaattgtgacttcccaaagtaaattgagcgtagccaatgtcaatgaacaccaaaggattaaggttttgttgttggataagaataccacacctacgatatccttatgtgccactcaaagtgagttgttgaagcatgaaatatatttggtagaaagaatagaaaatgagcaacgtgaagtgtccaggcatttaaggtgcttagtttacgttaaacccacagaggaaacattacaacatttattacgtgagttaagaaatcctcgttacggcgagtatcaaatattctttagtaatattgtctctaaatctcaattagaaagattggctgaatctgacgacttggaagctgttactaaggtggaagaaatattccaagacttttttatattaaaccaagatttattttcttttgatttgcaaccaagagaatttttaagtaataaattggtttggagcgaaggggggttgacaaaatgtaccaacagcttagtttctgtgcttttatccttaaagataaaaccagatatcaggtatgaaggagcaagtaaaatttgtgaaagattggctaaagaagtttcctatgagattggtaaaaacgaaagaactttttttgattttcctgtgatggattctacacctgtgttattgattttagatcgtaatactgatcctataacacctttacttcaaccttggacctaccaatctatgatcaatgagtatataggcattaagagaaatatagttgatttatccaaagtgcctagaattgataaagacttggagaaggtcaccttatcttccaagcaagatgctttcttcagggataccatgtatttgaattttggtgaattgggtgataaagtaaaacaatatgtgactacatacaaagacaagacacaaaccaacagccaaataaattccattgaggatattaaaaactttattgagaagtatccagagtttagaaaattatctggaaatgttgcaaagcatatggctatagtgggggaattagacagacagttgaagataaaaaatatatgggaaattagtgaaatagaacaaaatttaagtgcacacgatgccaatgaagaagatttctccgatttgattaaattgttgcaaaatgaagcagttgataagtattacaagttaaagcttgcatgtatttattctttaaacaatcaaaccagcagtgacaaaatccgtcaattggttgagattttatctcaacaacttcctccagaggacgtcaactttttccataaatttaaatctctttttagccgccaggataaaatgactcaaagtaaccatgacaaggacgatatattaaccgaattggcaagaagatttaatagtagaatgaattctaagagcaacaccgctgaaaacgtctatatgcaacatattccggaaatttcttctttattaacagatctctctaaaaatgcgttattcagggatcgtttcaaagaaatagatactcaaggccatagagtgatcggaaaccagcagagcaaagatattcctcaggatgtaatattgtttgttattggcggtgtaacttatgaggaggcaaggttggtccatgatttcaatggaacgatgaataacagaatgagggtggttttaggaggcacctctatactttctactaaagaatatatggattctattagatctgcaaaatga

SEQ ID NO: 3975 - DNA, 3348 bp, Saccharomyces cerevisiae
atgaataattggcaacatttcttcaacaatccagttgatctttcggaacatttgaagaagccatactttcgcttcgataatagggataaggaaattacagcgattagcttcgatgagaaggcaaacttaatttggagtggagacagctatggttgcatttcgtcatatgatccaacttttcaactttatacaagatataggggccacataggtggaaattccgtgaaggatattctcagtcatcgggatggtattttatctattagtgaagattccttacactttgctaatagaagaggtgttactaaattgaacctcactagcattgatattgctgcatttagcgaattgaacactatgtgctattctcctcattcactgaaaaacaatatctactgtggtggtgacaacacaaattggggaattgcgtccattgacttgaacagaggttgcttagattccctcttgaattactcatctaaagtgaagttaatgtgctctaataataaagttttgtctatcggaagacaaacagggactgtggatttgctagatccaacatcgaatcgtactatcaaatcatttaatgcacactctgcatccatatccgctatggatttacgggataacaccttggttacagtagggaagtccaaaagattttataacttatacgctgacccatttgtgaatgtttacgacttgagaacaatgcgtcaactccctcctgtttccttttctaaaggaacaactatgggatctggaggcgcagattttgttcaattacatcctttgcttcctactgttatgatcgtcgcctcaagttctggttcgtttgatttcatcgacctttccaatccaactttaagaacacaatatgttcatccttgccagtcgattaaaaagttatgtttgtcccccaatggtgacgtattgggtatactagaagctgataatcacctagatacatggagaagatcatcaaacaacatgggaatgtttaccaatacccctgaaatgctagcatatcctgattattttaatgacattacctctgacggcccaatatctgtcgacgatgaaacatatccattgagttctgtggggatgccgtactatcttgataaacttttgtctgcatggccccctgtagtgtttaaaagtgaaggtaccataccgcaattaacaggtaagtcacccttaccatcgagcggcaaattaaaaagtaaccttgctgtgatctcgagccaaaatgagaagttgagcacacaagaatttcctttgttaagatatgatcgcaccaaatacggtatgagaaatgctataccagattacgtttgtctaagagatataaggaaacagataacaagcggtttagaaaccagcgatatacagacatatacctcaatcaacaagtacgaagtaccccctgcatacagtagacttccactgacatcaggtagatttggtactgataattttgattttacgccctttaataacactgagtattcaggattggatccagatgttgataatcactacacaaatgctatcatacaattgtatcgctttattccagaaatgtttaatttcgttgttgggtgtttgaaagacgagaattttgaaacaacgttgctaactgatctaggctacctctttgacatgatggaaagatcacatggaaaaatatgtagttcttccaattttcaggcgtcattgaaatccttaactgataaaagacaattagaaaacggtgaaccacaagaacatttagaagagtatttagaatcgctgtgcataagggaaagtatcgaggattttaattcttctgaaagtattaaacgcaatatgcctcaaaaatttaacagattcctgctctcgcaacttattaaagaggaagcgcagacagtcaaccataatatcaccctaaatcaatgctttggtttggaaacggaaatacgaacagagtgtagctgtgatcactacgacactaccgtcaaacttctaccctccttatcaatatcaggaatcaacaaaaccgtaatcaaacaattgaacaagaaaagcaatggacagaatattttgccttatattgaatatgccatgaaaaatgtaacccaaaagaacagtatttgcccaacctgcggcaaaaccgaaactatcacccaggagtgtactgtcaagaatttaccttcagtgttgtcattagaattatcactattagataccgaattttccaatataaggtcgtcgaaaaactggttaactagtgaattttatggaagcatcattaaaaacaaggcagttctaagatcgacggcgtccgaattgaagggcacaagccacatatttaaatacgaattgaatggttacgtggctaaaatcactgataacaataacgagacgcgtctagtaacatatgtcaaaaaatataatccaaaagagaattgcttcaagtggctcatgtttaatgattatttggttgttgagataacagaggaagaggcgcttaaaatgacatacccttggaaaacaccagaaattatcatatattgtgatgcggaagaattacgaaaacctttcttttctgttgatacgtattccatcaactatgacatacttttccgtgattatttcgcaaacggaataagagatactgcaagacgtgaatataagttattaacacatgatgaggcacctaaatctggaaccttggttgccattgatgccgaatttgtctcattacaaagtgaactatgtgaaatcgatcatcaaggaatcagaagtattattcgacctaaaagaactgctttggccagaatatccattattagaggcgaagaaggagaactgtatggagtaccatttgtcgatgattatgtggtaaacacgaaccacatagaagactatttgacaagatatagtgggattcttcctggtgacttggaccctgaaaagagtaccaaaaggcttgtgagaagaaacgttgtatatcgaaaagtctggcttttaatgcagctcggatgcgtatttgttggtcatggtttgaataatgacttcaaacacattaatattaatgtcccaagaaaccaaattcgcgacactgccatatattttctacaaggaaagagatatctttcattgcgttatctggcatatgtgttgttaggaatgaatatccaagagggaaatcacgattcaattgaagatgcccatactgccttgattctttacaaaaaatatctccacctgaaagaaaaagctatctttgagaaagtactgaacagcgtgtacgaagaaggaagagcccataatttcaaagttccagaaacttcaaagggataa

SEQ ID NO: 3976 - DNA, 3348 bp, Artificial Sequence
  Description of Artificial Sequence: Synthetic polynucleotide
atgaataattggcaacatttcttcaacaatccagttgatctttctgaacatttgaagaagccatactttcgcttcgataatagggataaggaaattacagcgattagcttcgatgagaaggcaaacttaatttggagtggagacagctatggttgcatttcttcttatgatccaacttttcaactttatacaagatataggggccacataggtggaaattccgtgaaggatattctcagtcatagagatggtattttatctattagtgaagattccttacactttgctaatagaagaggtgttactaaattgaacctcactagcattgatattgctgcatttagcgaattgaacactatgtgctattctcctcattctttgaaaaacaatatctactgtggtggtgacaacacaaattggggaattgcgtccattgacttgaacagaggttgcttagattccctcttgaattactcttctaaagtgaagttaatgtgctctaataataaagttttgtctatcggaagacaaacagggactgtggatttgttggatccaacaagtaatcgtactatcaaaagttttaatgcacactctgcatccatatccgctatggatttaagagataacaccttggttacagtagggaagtccaaaagattttataacttatacgctgacccatttgtgaatgtttacgacttgagaacaatgcgtcaactccctcctgtttccttttctaaaggaacaactatgggatctggaggcgcagattttgttcaattacatcctttgcttcctactgttatgatcgtcgcctccagttctggttcttttgatttcatcgacctttccaatccaactttaagaacacaatatgttcatccttgccagagtattaaaaagttatgtttgtcccccaatggtgacgtattgggtatattggaagctgataatcacttggatacatggagaagaagtagtaacaacatgggaatgtttaccaatacccctgaaatgttagcatatcctgattattttaatgacattacctctgacggcccaatatctgtcgacgatgaaacatatccattgagttctgtggggatgccgtactatcttgataaacttttgtctgcatggccccctgtagtgtttaaaagtgaaggtaccataccgcaattaacaggtaagtctcccttaccatccagcggcaaattaaaaagtaaccttgctgtgatcagtagccaaaatgagaagttgagcacacaagaatttcctttgttaagatatgatcgcaccaaatacggtatgagaaatgctataccagattacgtttgtttgagagatataaggaaacagataacaagcggtttagaaaccagcgatatacagacatatacctctatcaacaagtacgaagtaccccctgcatacagtagacttccattaacatctggtagatttggtactgataattttgattttacgccctttaataacactgagtattctggattggatccagatgttgataatcactacacaaatgctatcatacaattgtatcgctttattccagaaatgtttaatttcgttgttgggtgtttgaaagacgagaattttgaaacaacgttgttgactgatttgggctacctctttgacatgatggaaagaagccatggaaaaatatgtagttcttccaattttcaggcgtctttgaaatccttaactgataaaagacaattagaaaacggtgaaccacaagaacatttagaagagtatttagaatctttatgcataagggaaagtatcgaggattttaattcttctgaaagtattaaacgcaatatgcctcaaaaatttaacagattcttactctctcaacttattaaagaggaagcgcagacagtcaaccataatatcaccttgaatcaatgctttggtttggaaacggaaataagaacagagtgtagctgtgatcactacgacactaccgtcaaacttttgccctccttatctatatctggaatcaacaaaaccgtaatcaaacaattgaacaagaaaagcaatggacagaatattttgccttatattgaatatgccatgaaaaatgtaacccaaaagaacagtatttgcccaacctgcggcaaaaccgaaactatcacccaggagtgtactgtcaagaatttaccttctgtgttgtctttagaattaagtttgttagataccgaattttccaatataaggtcctctaaaaactggttaactagtgaattttatggaagcatcattaaaaacaaggcagttttgagatctacggcgtccgaattgaagggcacaagccacatatttaaatacgaattgaatggttacgtggctaaaatcactgataacaataacgagacgcgtttagtaacatatgtcaaaaaatataatccaaaagagaattgcttcaagtggctcatgtttaatgattatttggttgttgagataacagaggaagaggcgcttaaaatgacatacccttggaaaacaccagaaattatcatatattgtgatgcggaagaattaagaaaacctttcttttctgttgatacgtattccatcaactatgacatacttttccgtgattatttcgcaaacggaataagagatactgcaagacgtgaatataagttattaacacatgatgaggcacctaaatctggaaccttggttgccattgatgccgaatttgtctctttacaaagtgaattatgtgaaatcgatcatcaaggaatcagaagtattattagacctaaaagaactgctttggccagaatatccattattagaggcgaagaaggagaattgtatggagtaccatttgtcgatgattatgtggtaaacacgaaccacatagaagactatttgacaagatatagtgggattcttcctggtgacttggaccctgaaaagagtaccaaaaggcttgtgagaagaaacgttgtatatagaaaagtctggcttttaatgcagctcggatgcgtatttgttggtcatggtttgaataatgacttcaaacacattaatattaatgtcccaagaaaccaaattcgcgacactgccatatattttttgcaaggaaagagatatctttctttgcgttatttggcatatgtgttgttaggaatgaatatccaagagggaaatcacgattctattgaagatgcccatactgccttgattctttacaaaaaatatctccacttgaaagaaaaagctatctttgagaaagtattgaacagcgtgtacgaagaaggaagagcccataatttcaaagttccagaaacttctaagggatga

SEQ ID NO: 3977 - DNA, 2754 bp, Saccharomyces cerevisiae
atgaatgtggatgaaagaagccggattgggggtagagagaaggatgcggggcccgggaaaggcattcttaagcagaaccaaagctcgcaaatgacttcaagctttctagagaaccctggtgttcgtattcctaccaggattataacaaaaaaagaagtattagatggtagtaacacgacatccaggatcaatacttctaatttacagagtatggtaaagagaagagtttcattcgctcccgatgttacgttgcatagttttactttcgtacctgaacaaaacaatgaaattaaggaaccaagacgtagaaaaacttcaaccaacagccctactaaaatatctagtcaagaagagcctcttgtaacgtctactcaaatcgatgatgctcgtacggaagaaaaaacagcggcagaagaagatcccgatacatctgggatggaattgacagaacctatagtggcgacaccggatagtaacaaggcttcacagcatgatcccacatcaatggaaatgactgaagtttttcctcggagtatcagacagaaaaatccagatgtagagggagaaagcattgagtcaagtcaacaaatcgatgatgtcgaggcagtgcgagaggaaacaatggaattgacggccatacataatgtacacgactatgattcaatttcaaaagatacagtagagggcgaaccaatagatctgacagaatatgagtctaaaccttacgttccaaacagtgtctcacgcagtaccgggaaatcctctgactatagcgtggaaagaagtaacgataaaagcgacctttcaaaatctgaaaataagacgaattcctctcagccgatggaaattacagatatattccatgctgatccacagaaccctatgagtctacacagcgacaataacatcaataatgatggtaatgagatggaactcacgcaaatacagacaaactttgaccgcgacaatcaccacattgacgaatctcccagcgaaaagcatgcgttttcttctaataagaggcgcaaattggatactgtctctgattatgctgcatcggttacgacaccagtcaaagaggcaaaggatactagtggagaggacaatgatggtgatttagagatgatggagaaaatgtcacccattacatttagcgatgttgataataagattgggacgagatccaatgatgtgttcactattgaacccggtactgaggatactggcatgcaaaccgcgacagacgatgaagaagatggggaaaatgtcgatgataacgggaacaaaatagttgagaaaacaagactccccgaaatagacaaggaagggcagtctggtatagccctgcctactcaagactacactttgcgggaatttataaatgaagtgggggtagggtttttagataccaaactgatagatgatctcgacaagaaggtcaatttcccgcttaacagctttaattttgtggagaatcaaaggatagataacgtattttctgccttctatatcgatatacccattttagaagtggaagcattcagatgcaaggagctttggagaagtattaatgaatccaaggataaattcaaggactttgaggcccaaattgataaatcccatccccctcttctgctccaggagtatttttcctcggatgagaaaatgaagcaattgatgagggaccagctacagttggtcaaaggatattcgaaattggaggcagcaatggaatggtatgaatggaggaaaaagcaactaaatggtctggaattaattttggcagaaaatttgaataccttgaaaagggagtacgaaaaattaaacgaagaagttgaaaaagttaacagcatcagaggcaaaatacgaaaacttaatgaagcaataaaggaagagataaggtccctaaaaaacttaccatccgattcttataagcctactttaatgaatagaataaaaattgaggctttcaaacaagagttaatggaacattccatatcgttgagttcttccaatgattttacccaagaaatgcgttcacttaaattagctattgcaaaaaaatctaatgatatactaactttaagaagtgaagtcgcctctatagacaagaaaattgaaaaacgaaaactgttcacacggtttgacttgccaaaattacgagatactctcaaaattttggagtcattaacgggggtacgctttctgaaattctcaaaggcaacactttcaattgcatttcttcaactggatgatttgagagtggatattaatctagcaaactttaaaaataatccgttaagttctatgaaagttatgaatgacagcaataatgacgatatgagttaccacttattcacaatgttgttgaagaatgttgaagccgaacatcaagatagcatgctttcgaaccttttttttgctatgaaaaagtggagaccattattgaagtatataaaattactaaagctcttgtttccggtgaaaattactcaaactgaggaagaggaagcgcttttgcagttcaaggattatgatagaagaaacaagactgcatttttttacgttatatcccttgtctcatttgctcagggcgtattctcggaaaatgggcaaattccaatgaaagttcacataagtactcaacaagattactcaccgtcacgggaagtcctctctgacaggataacccacaagatcagtggagttcttccttcatttacgaaaagtagaatacatttagagtttacgtaa

SEQ ID NO: 3978 - DNA, 2754 bp, Artificial Sequence
  Description of Artificial Sequence: Synthetic polynucleotide
atgaatgtggatgaaagaagcagaattgggggtagagagaaggatgcggggcccgggaaaggcattcttaagcagaaccaaagctctcaaatgacttccagctttttggagaaccctggtgttcgtattcctaccaggattataacaaaaaaagaagtattagatggtagtaacacgacatccaggatcaatacttctaatttacagagtatggtaaagagaagagtttctttcgctcccgatgttacgttgcatagttttactttcgtacctgaacaaaacaatgaaattaaggaaccaagacgtagaaaaacttctaccaacagccctactaaaatatctagtcaagaagagcctcttgtaacgtctactcaaatcgatgatgctcgtacggaagaaaaaacagcggcagaagaagatcccgatacatctgggatggaattgacagaacctatagtggcgacaccggatagtaacaaggcttctcagcatgatcccacatctatggaaatgactgaagtttttcctagaagtatcagacagaaaaatccagatgtagagggagaaagcattgagagcagtcaacaaatcgatgatgtcgaggcagtgagagaggaaacaatggaattgacggccatacataatgtacacgactatgattctatttccaaagatacagtagagggcgaaccaatagatttaacagaatatgagtctaaaccttacgttccaaacagtgtctctcgcagtaccgggaaatcctctgactatagcgtggaaagaagtaacgataaaagcgacctttctaaatctgaaaataagacgaattcctctcagccgatggaaattacagatatattccatgctgatccacagaaccctatgagtttacacagcgacaataacatcaataatgatggtaatgagatggaactcacgcaaatacagacaaactttgaccgcgacaatcaccacattgacgaatctcccagcgaaaagcatgcgttttcttctaataagaggcgcaaattggatactgtctctgattatgctgcatctgttacgacaccagtcaaagaggcaaaggatactagtggagaggacaatgatggtgatttagagatgatggagaaaatgtctcccattacatttagcgatgttgataataagattgggacgagatccaatgatgtgttcactattgaacccggtactgaggatactggcatgcaaaccgcgacagacgatgaagaagatggggaaaatgtcgatgataacgggaacaaaatagttgagaaaacaagactccccgaaatagacaaggaagggcagtctggtatagccttgcctactcaagactacactttgagagaatttataaatgaagtgggggtagggtttttagataccaaattgatagatgatctcgacaagaaggtcaatttcccgcttaacagctttaattttgtggagaatcaaaggatagataacgtattttctgccttctatatcgatatacccattttagaagtggaagcattcagatgcaaggagctttggagaagtattaatgaatccaaggataaattcaaggactttgaggcccaaattgataaatcccatccccctcttttactccaggagtatttttccagtgatgagaaaatgaagcaattgatgagggaccagttacagttggtcaaaggatattctaaattggaggcagcaatggaatggtatgaatggaggaaaaagcaattgaatggtttggaattaattttggcagaaaatttgaataccttgaaaagggagtacgaaaaattaaacgaagaagttgaaaaagttaacagcatcagaggcaaaataagaaaacttaatgaagcaataaaggaagagataaggtccttgaaaaacttaccatccgattcttataagcctactttaatgaatagaataaaaattgaggctttcaaacaagagttaatggaacattccatatctttgagttcttccaatgattttacccaagaaatgcgttctcttaaattagctattgcaaaaaaatctaatgatatattgactttaagaagtgaagtcgcctctatagacaagaaaattgaaaaaagaaaattattcacaagatttgacttgccaaaattaagagatactctcaaaattttggagtctttaacgggggtacgctttttgaaattctccaaggcaacactttctattgcatttcttcaattggatgatttgagagtggatattaatttggcaaactttaaaaataatccgttaagttctatgaaagttatgaatgacagcaataatgacgatatgagttaccacttattcacaatgttgttgaagaatgttgaagccgaacatcaagatagcatgctttccaaccttttttttgctatgaaaaagtggagaccattattgaagtatataaaattattgaagctcttgtttccggtgaaaattactcaaactgaggaagaggaagcgcttttgcagttcaaggattatgatagaagaaacaagactgcatttttttacgttatatcccttgtcagttttgctcagggcgtattctctgaaaatgggcaaattccaatgaaagttcacataagtactcaacaagattactctccgtctagagaagtcctctctgacaggataacccacaagatcagtggagttcttccttcttttacgaaaagtagaatacatttagagtttacgtga

SEQ ID NO: 3979 - DNA, 3954 bp, Saccharomyces cerevisiae
atgtttaataaaagtgtaaatagtggtttcacctttggaaaccaaaacacatccacaccgacatccactccggcacagccttccagttcccttcaattccctcaaaaatctactgggttatttgggaacgttaatgttaatgcgaatacttcaacacctagcccatctggtggattattcaatgccaattcaaacgctaattctataagtcaacaacccgccaataattcattatttggaaataaaccagcacaaccatcaggtggcttatttggcgctacaaacaatactacttctaaaagtgccggaagcttattcggaaataataatgccacagcaaattctacgggctctacaggtttattcagtggtagcaataatatagcctctagtacccaaaatggtggtttgtttggtaatagcaacaataacaatataacttctaccacgcaaaatggtggtctgttcggtaagcctactacaacccctgctggtgctggcggcctgtttggaaattcctcatcgacaaactcaacgacaggattatttggatcaaataatacacaaagttctacaggtatttttggtcaaaagccgggagcttcaacaactgggggattgtttggaaataatggtgcttcattcccaagatccggtgaaactactggaaccatgtcaaccaacccatatggaattaacataagtaatgttcctatggcagtggctgacatgccaagatctattacgtcttctctatcagatgtgaatggcaagtcagatgcggaacccaaaccaattgaaaatagaagaacatattcgttttcttcctcagtttcagggaacgctcctttaccactcgcctcacagtcaagtttagtgagtagactaagcacgagactgaaagccactcagaaaagcacgtcaccgaatgaaatattttcaccgtcttacagtaaaccgtggctgaatggagcaggttcagctcccttagtagatgactttttttcttcaaagatgacttctttggctccaaatgaaaacagcatctttcctcagaatggttttaatttcctatcctcccaaagggccgacttgacagagctgcgtaaattgaaaattgattccaacagaagtgctgcaaaaaaattaaaactcctctctggtactcccgccatcacaaaaaaacatatgcaagacgaacaagattcatcggaaaatgagccaattgcaaatgctgatagtgtcactaacattgacaggaaagaaaatagagataataatttggataacacttatttgaatggaaaggagcaatcgaataacttgaataaacaagacggcgaaaatactttacaacatgaaaagtcatcaagttttggttattggtgttctccttccccagaacagctggagcgtttgtcattgaagcaattagcggccgtttcaaattttgttatcgggagaagaggttatggttgtattacatttcaacatgatgtggatctcacagcttttaccaaaagctttagagaagaactattcggtaaaattgtaatatttcgttcctctaagacagtagaagtatatcctgacgaagccaccaaaccaatgattgggcatgggttaaacgttcccgctataatcactctagagaatgtttatcctgtagataaaaaaacaaaaaaaccgatgaaagatacgacgaagtttgctgaatttcaagtttttgacaggaaactaagaagcatgagggaaatgaactatatatcctataatccctttggcgggacttggactttcaaagtcaatcattttagcatttgggggttagtcaatgaagaagatgcggaaatagatgaagacgatttgagtaaacaagaagacggcggtgagcaaccattaagaaaggtgcgcacgttagcgcaatcaaaaccatcggataaagaggttatcctcaaaacagatggcacttttggaactctatcaggtaaagacgactctatcgttgaggaaaaggcatacgaacctgatttgtctgatgcggactttgagggaattgaagcttcccctaaacttgacgtttctaaggattgggtagaacaattaattttagctgggtcttcactacgttctgtgtttgccacttctaaagaatttgacgggccatgtcaaaatgaaatagatttactcttttccgaatgcaatgatgaaattgataacgcaaaactcatcatgaaggaaagaagatttacagcctcttatacgtttgcaaaattttcaacaggttcaatgctactgacaaaagatattgttggtaaatcgggcgtttcaattaagcgtttaccaactgagttgcaaagaaaatttttattcgatgacgtctatttagataaagaaattgaaaaggttactatcgaagcaaggaagtcaaacccatacccacaaattagtgaaagctctttactctttaaagatgctttagattatatggaaaaaacctctagtgattacaatctatggaaactttcatctattttattcgaccccgtttcctatccatacaagacggacaatgatcaagtaaaaatggcattattaaaaaaagaaaggcattgtcgattaacttcgtggattgttagccagataggtccggaaattgaagagaaaattaggaattcttctaacgaaatagaacaaatatttctatatttgctcttgaatgatgtcgtaagggcatccaagttagcaattgagtctaagaatggtcatttgagcgttttgatatcctatttgggttcaaacgacccaaggatacgtgatttagcggaattacaattgcaaaagtggtcaactggtggttgtagtatcgacaagaatatctcgaagatttacaaattactaagcggttcaccttttgaaggtttattttctcttaaggaacttgaaagtgaattcagttggttgtgccttttgaatttgacactgtgctacggccagatagatgagtattccttagaatctcttgtgcaatcgcatttagacaagttttctttaccctatgatgatcctattggagttattttccaactatatgctgctaatgaaaatacggagaagctctataaggaggttagacaaagaaccaacgctttagatgttcagttttgctggtacttgattcaaacattgagatttaatggaacacgcgttttttcgaaggaaactagcgatgaggctacattcgcatttgccgctcaacttgaatttgcacaattacatggccactctctttttgtttcttgctttttaaatgatgacaaggcagcagaagataccataaaaaggcttgttatgcgtgaaataacattgttaagagcctctaccaatgatcacattttaaatagattaaagatcccttcgcaattgatattcaatgctcaagctttgaaagatagatatgaaggcaattacctttctgaagtacaaaatctactcctgggttcgtcttatgatttggcagaaatggctattgttacgtcattaggaccaaggctgttgttatcaaacaatcctgtacagaataatgaactgaaaactttgagggaaattcttaacgaatttccagactctgagagggacaaatggagtgtaagtataaacgtatttgaagtatatctaaagcttgtgttggataatgttgaaacgcaggagactatcgattcattaattagtggtatgaagatattttatgatcagtataagcactgtcgtgaagtggccgcatgttgtaatgttatgtcccaagagattgtatcaaaaatattggagaaaaacaatccttcaataggcgattcgaaggccaaattgcttgagctccccctagggcagccagaaaaggcatacttgaggggtgagtttgcccaggatttaatgaagtgtacatataagatataa

SEQ ID NO: 3980 - DNA, 3954 bp, Artificial Sequence
  Description of Artificial Sequence: Synthetic polynucleotide
atgtttaataaaagtgtaaatagtggtttcacctttggaaaccaaaacacatccacaccgacatccactccggcacagccttccagttcccttcaattccctcaaaaatctactgggttatttgggaacgttaatgttaatgcgaatacttctacacctagcccatctggtggattattcaatgccaatagcaacgctaattctataagtcaacaacccgccaataattctttatttggaaataaaccagcacaaccatctggtggcttatttggcgctacaaacaatactacttctaaaagtgccggaagcttattcggaaataataatgccacagcaaattctacgggctctacaggtttattcagtggtagcaataatatagcctctagtacccaaaatggtggtttgtttggtaatagcaacaataacaatataacttctaccacgcaaaatggtggtcttttcggtaagcctactacaacccctgctggtgctggcggcttatttggaaattcctcttctacaaactccacgacaggattatttggaagtaataatacacaaagttctacaggtatttttggtcaaaagccgggagcttctacaactgggggattgtttggaaataatggtgcttctttcccaagatccggtgaaactactggaaccatgtctaccaacccatatggaattaacataagtaatgttcctatggcagtggctgacatgccaagatctattacgtcttctttaagtgatgtgaatggcaagagtgatgcggaacccaaaccaattgaaaatagaagaacatattctttttcttcctctgtttctgggaacgctcctttaccactcgcctctcagagcagtttagtgagtagattgagcacgagattgaaagccactcagaaaagcacgtctccgaatgaaatattttctccgtcttacagtaaaccgtggttaaatggagcaggttctgctcccttagtagatgactttttttcttccaagatgacttctttggctccaaatgaaaacagcatctttcctcagaatggttttaatttcttatcctcccaaagggccgacttgacagagttgcgtaaattgaaaattgattccaacagaagtgctgcaaaaaaattaaaactcctctctggtactcccgccatcacaaaaaaacatatgcaagacgaacaagattcttctgaaaatgagccaattgcaaatgctgatagtgtcactaacattgacaggaaagaaaatagagataataatttggataacacttatttgaatggaaaggagcaaagcaataacttgaataaacaagacggcgaaaatactttacaacatgaaaagagtagtagttttggttattggtgttctccttccccagaacagttggagcgtttgtctttgaagcaattagcggccgtttctaattttgttatcgggagaagaggttatggttgtattacatttcaacatgatgtggatctcacagcttttaccaaaagctttagagaagaattattcggtaaaattgtaatatttcgttcctctaagacagtagaagtatatcctgacgaagccaccaaaccaatgattgggcatgggttaaacgttcccgctataatcactttagagaatgtttatcctgtagataaaaaaacaaaaaaaccgatgaaagatacgacgaagtttgctgaatttcaagtttttgacaggaaattgagaagcatgagggaaatgaactatatatcctataatccctttggcgggacttggactttcaaagtcaatcattttagcatttgggggttagtcaatgaagaagatgcggaaatagatgaagacgatttgagtaaacaagaagacggcggtgagcaaccattaagaaaggtgcgcacgttagcgcaaagtaaaccaagtgataaagaggttatcctcaaaacagatggcacttttggaactttatctggtaaagacgactctatcgttgaggaaaaggcatacgaacctgatttgtctgatgcggactttgagggaattgaagcttcccctaaacttgacgtttctaaggattgggtagaacaattaattttagctgggtcttctttacgttctgtgtttgccacttctaaagaatttgacgggccatgtcaaaatgaaatagatttactcttttccgaatgcaatgatgaaattgataacgcaaaactcatcatgaaggaaagaagatttacagcctcttatacgtttgcaaaattttctacaggttctatgttattaacaaaagatattgttggtaaatctggcgtttctattaagcgtttaccaactgagttgcaaagaaaatttttattcgatgacgtctatttagataaagaaattgaaaaggttactatcgaagcaaggaagtctaacccatacccacaaattagtgaaagctctttactctttaaagatgctttagattatatggaaaaaacctctagtgattacaatttatggaaactttcttctattttattcgaccccgtttcctatccatacaagacggacaatgatcaagtaaaaatggcattattaaaaaaagaaaggcattgtagattaacttcttggattgttagccagataggtccggaaattgaagagaaaattaggaattcttctaacgaaatagaacaaatatttttatatttgctcttgaatgatgtcgtaagggcatccaagttagcaattgagtctaagaatggtcatttgagcgttttgatatcctatttgggttccaacgacccaaggatacgtgatttagcggaattacaattgcaaaagtggtctactggtggttgtagtatcgacaagaatatctccaagatttacaaattattaagcggttctccttttgaaggtttattttctcttaaggaacttgaaagtgaattcagttggttgtgccttttgaatttgacattgtgctacggccagatagatgagtattccttagaatctcttgtgcaatctcatttagacaagttttctttaccctatgatgatcctattggagttattttccaattatatgctgctaatgaaaatacggagaagctctataaggaggttagacaaagaaccaacgctttagatgttcagttttgctggtacttgattcaaacattgagatttaatggaacacgcgttttttccaaggaaactagcgatgaggctacattcgcatttgccgctcaacttgaatttgcacaattacatggccactctctttttgtttcttgctttttaaatgatgacaaggcagcagaagataccataaaaaggcttgttatgcgtgaaataacattgttaagagcctctaccaatgatcacattttaaatagattaaagatcccttctcaattgatattcaatgctcaagctttgaaagatagatatgaaggcaattacctttctgaagtacaaaatttactcttaggttcttcttatgatttggcagaaatggctattgttacgtctttaggaccaaggttattgttatctaacaatcctgtacagaataatgaattgaaaactttgagggaaattcttaacgaatttccagactctgagagggacaaatggagtgtaagtataaacgtatttgaagtatatttgaagcttgtgttggataatgttgaaacgcaggagactatcgattctttaattagtggtatgaagatattttatgatcagtataagcactgtcgtgaagtggccgcatgttgtaatgttatgtcccaagagattgtatccaaaatattggagaaaaacaatccttccataggcgattctaaggccaaattgcttgagctccccttagggcagccagaaaaggcatacttgaggggtgagtttgcccaggatttaatgaagtgtacatataagatatga

SEQ ID NO: 3981 - DNA, 987 bp, Saccharomyces cerevisiae
atgactgagatactaccacatgtaaacgacgaagtgctaccagcagagtatgaacttaatcagccggaaccagaacactgtcctggtccagaatcagacatggcaggtaagtccgatgcttgtggtggctgcgccaataaagaaatatgtgaaagtcttccgaaaggccctgatccagatattccattgatcacagataacttgtcaggaatagaacataaaatattggttttatcaggcaaaggtggcgtaggcaagtcgacatttgccgcaatgctaagttgggcactttcagctgacgaagatttacaagtaggtgccatggatttagatatatgtggaccttctttgccacatatgttaggctgcattaaagaaaccgtccatgaatcgaactccggttggacacctgtctatgtgactgataatttagccaccatgtctattcaatatatgcttccagaagacgattccgccattatatggaggggttcaaaaaagaatttattgataaaaaaatttttaaaggatgttgattgggataaactcgattacttggtaatcgacacaccgcccggaacatctgatgagcacatttcaataaacaagtatatgagagaatctggcatagatggtgcccttgtggtcaccacacctcaggaagtagctttattagatgtacggaaagagatagatttctgtaagaaggctggtatcaatattcttggactagtggaaaatatgagcggatttgtatgtccaaattgcaaaggagagtcccaaatattcaaggctaccacaggtggaggtgaagcactttgtaaggaattgggcatcaaatttttggggtctgttccgttagatccgaggattggcaagagttgtgacatgggtgaaagtttcctggataactatcctgacagcccagcttcgagtgctgtacttaacgttgtggaggctctgcgagatgctgtgggggatgtatag

SEQ ID NO: 3982 - DNA, 987 bp, Artificial Sequence
  Description of Artificial Sequence: Synthetic polynucleotide
atgactgagatattgccacatgtaaacgacgaagtgttaccagcagagtatgaacttaatcagccggaaccagaacactgtcctggtccagaaagtgacatggcaggtaagtccgatgcttgtggtggctgcgccaataaagaaatatgtgaaagtcttccgaaaggccctgatccagatattccattgatcacagataacttgagtggaatagaacataaaatattggttttaagtggcaaaggtggcgtaggcaagagtacatttgccgcaatgttaagttgggcactttctgctgacgaagatttacaagtaggtgccatggatttagatatatgtggaccttctttgccacatatgttaggctgcattaaagaaaccgtccatgaatctaactccggttggacacctgtctatgtgactgataatttagccaccatgtctattcaatatatgcttccagaagacgattccgccattatatggaggggttccaaaaagaatttattgataaaaaaatttttaaaggatgttgattgggataaactcgattacttggtaatcgacacaccgcccggaacatctgatgagcacatttctataaacaagtatatgagagaatctggcatagatggtgcccttgtggtcaccacacctcaggaagtagctttattagatgtaagaaaagagatagatttctgtaagaaggctggtatcaatattcttggattggtggaaaatatgagcggatttgtatgtccaaattgcaaaggagagtcccaaatattcaaggctaccacaggtggaggtgaagcactttgtaaggaattgggcatcaaatttttggggtctgttccgttagatccgaggattggcaagagttgtgacatgggtgaaagtttcttggataactatcctgacagcccagcttccagtgctgtacttaacgttgtggaggctcttagagatgctgtgggggatgtatga

SEQ ID NO: 3983 - DNA, 1266 bp, Saccharomyces cerevisiae
atgtcccagctgacggagttcattagctgtatccctgtggttaatgaagaacaaaatgaagaagatgagcgtggcctctgtaagattcagattgaagatggcgctatgttggaaacattagatgagaacagtctttcagggcttagaatagagaaaatgttggtaagtgaaggtacaggaattttttccaaaagcagttttggaatcaatgatttgcgaatctttacgggagaaaatatcgatgaagagtctaagaaatatgtgtggtatgaactactcaaaatgttaactggtcacaaagtgtacattgcatcgttagacgaaaaagtcgtattcacaaaatggacgtgcagaatgcaagatgatgaggtatggaaagtagttatggagttggagtcatcggcgatcataagaaaaatcgctgaacttaccttgcatccagtcaaaaagggagagattgatttatttgaaatggcagataaactctataaagatatctgttgtgttaacgattcttaccggaatataaaggagagcgattctagcaatagaaatcgagttgaacagctggctcgggaaagggagctattggataagcttttagaaacacgtgatgaaagaaccagagcaatgatggtaaccttgttgaatgagaagaagaagaaaataagagagcttcatgagattctgcgacaaaataatatcaaattgtctgacgatgatgttttagattctgcgcttattaatacggaagtgcaaaagccaatttctgagttaaactctccaggaaaaagaatgaaacgaagaaagacggtagtagagcctcaaaatttacaaaagaagttgaaagacacaagtcggaggagagctaatagaaaaatatctaatcaatccgtgatcaaaatggaagacgacgattttgatgactttcaatttttcggactttctaaaaggccaattattactgctaaagataaactcagtgaaaagtacgatgatattacctcttttggagatgacacacaatcaataagttttgaatctgatagtagcagtgatgttcaaaaacatttagtgtctttagaagacaatggtattcaaatatcagcaggaagatcggatgaagattacggagacatttctggttctgaatctgagactgatgcaagtgcaggggaaaagaagagctccaaccatagtgaacaatccggtaatgatagggaaccttgcttgcagacagaatcggaaacggatatagaaacatag

SEQ ID NO: 3984 - DNA, 1266 bp, Artificial Sequence
  Description of Artificial Sequence: Synthetic polynucleotide
atgtcccagttaacggagttcattagctgtatccctgtggttaatgaagaacaaaatgaagaagatgagcgtggcctctgtaagattcagattgaagatggcgctatgttggaaacattagatgagaacagtctttccgggcttagaatagagaaaatgttggtaagtgaaggtacaggaattttttccaaaagcagttttggaatcaatgatttgagaatctttacgggagaaaatatcgatgaagagtctaagaaatatgtgtggtatgaattactcaaaatgttaactggtcacaaagtgtacattgcatctttagacgaaaaagtcgtattcacaaaatggacgtgcagaatgcaagatgatgaggtatggaaagtagttatggagttggagagttctgcgatcataagaaaaatcgctgaacttaccttgcatccagtcaaaaagggagagattgatttatttgaaatggcagataaactctataaagatatctgttgtgttaacgattcttacagaaatataaaggagagcgattctagcaatagaaatagagttgaacagttagctagagaaagggagttattggataagcttttagaaacacgtgatgaaagaaccagagcaatgatggtaaccttgttgaatgagaagaagaagaaaataagagagcttcatgagattttaagacaaaataatatcaaattgtctgacgatgatgttttagattctgcgcttattaatacggaagtgcaaaagccaatttctgagttaaactctccaggaaaaagaatgaaaagaagaaagacggtagtagagcctcaaaatttacaaaagaagttgaaagacacaagtagaaggagagctaatagaaaaatatctaatcaatccgtgatcaaaatggaagacgacgattttgatgactttcaatttttcggactttctaaaaggccaattattactgctaaagataaactcagtgaaaagtacgatgatattacctcttttggagatgacacacaaagtataagttttgaatctgatagtagcagtgatgttcaaaaacatttagtgtctttagaagacaatggtattcaaatatctgcaggaagaagtgatgaagattacggagacatttctggttctgaatctgagactgatgcaagtgcaggggaaaagaagagctccaaccatagtgaacaatccggtaatgatagggaaccttgcttgcagacagaaagtgaaacggatatagaaacatga

SEQ ID NO: 3985 - DNA, 363 bp, Saccharomyces cerevisiae
atgaaattcatttctacctttctcacttttattttagcggccgtttctgtcactgctagttccgatgaagatatcgctcaggtgccagccgaggccattattggatacttggatttcggaggtgatcatgacatagcttttttaccattcagtaacgctaccgccagtgggctattgtttatcaacaccactattgctgaggcggctgaaaaagagcaaaacaccactttggcgaaaagagaggctgttgccgacgcttggcactggttaaatttgagaccaggccaaccaatgtacaagagagaggccaacgctgatgcttggcactggttgcaactcaagccaggccaaccaatgtactga

SEQ ID NO: 3986 - DNA, 363 bp, Artificial Sequence
  Description of Artificial Sequence: Synthetic polynucleotide
atgaaattcatttctacctttctcacttttattttagcggccgtttctgtcactgctagttccgatgaagatatcgctcaggtgccagccgaggccattattggatacttggatttcggaggtgatcatgacatagcttttttaccattcagtaacgctaccgccagtgggttattgtttatcaacaccactattgctgaggcggctgaaaaagagcaaaacaccactttggcgaaaagagaggctgttgccgacgcttggcactggttaaatttgagaccaggccaaccaatgtacaagagagaggccaacgctgatgcttggcactggttgcaactcaagccaggccaaccaatgtactga

SEQ ID NO: 3987 - DNA, 366 bp, Saccharomyces cerevisiae
atgcatgaggttacccgcacttattatttttttctctttttttttcttagctataaaaggcagatcaatgcagcattcattgctttatttgactttcctttactatttatttactttccatttcttattttagtgttattttataacagtaacgcaaatttaacagccattcgtaacacgtacagtatctcgtcgaggttgaacccctccggggcgttcttgacccatgaagaatgtggattggtgttgcaatatatttattattggcttggactggagaacaaatttatcgatcttgggtgcaacagtctttctgtcgtctgttttttagcagatctaagggtttaccttcgtgtgcccggatga

SEQ ID NO: 3988 - DNA, 366 bp, Artificial Sequence
  Description of Artificial Sequence: Synthetic polynucleotide
atgcatgaggttacccgcacttattatttttttctctttttttttcttagctataaaaggcagatcaatgcagcattcattgctttatttgactttcctttactttttatttactttccatttcttattttagtgttattttataacagtaacgcaaatttaacagccattcgtaacacgtacagtatctcttccaggttgaacccctccggggcgttcttgacccatgaagaatgtggattggtgttgcaatatatttattattggcttggattggagaacaaatttatcgatcttgggtgcaacagtctttctgtcgtctgttttttagcagatttaagggtttaccttcgtgtgcccggatga

SEQ ID NO: 3989 - DNA, 414 bp, Saccharomyces cerevisiae
atgtcaaaagtaccaagaaattttaggttgttagaagaattagaaaagggtgaaaaagggtttggtccagaatcatgtagttatggtttagctgatagcgacgatattaccatgaccaaatggaacggcactattttagggccccctcatagtaatcatgaaaacagaatctattccctttctatagattgtggcccaaactatccagattctcccccaaaggtcactttcatttccaagataaatctaccatgcgtcaatccaactacgggggaggtccaaactgacttccacaccttacgtgactggaaaagagcctacaccatggaaactttattacttgatcttagaaaggaaatggcaaccccagcgaacaagaaattgcgtcaaccgaaggaaggagaaaccttttag

SEQ ID NO: 3990 - DNA, 414 bp, Artificial Sequence
  Description of Artificial Sequence: Synthetic polynucleotide
atgtccaaagtaccaagaaattttaggttgttagaagaattagaaaagggtgaaaaagggtttggtccagaaagttgtagttatggtttagctgatagcgacgatattaccatgaccaaatggaacggcactattttagggccccctcatagtaatcatgaaaacagaatctattccctttctatagattgtggcccaaactatccagattctcccccaaaggtcactttcatttccaagataaatttaccatgcgtcaatccaactacgggggaggtccaaactgacttccacaccttacgtgactggaaaagagcctacaccatggaaactttattacttgatcttagaaaggaaatggcaaccccagcgaacaagaaattgcgtcaaccgaaggaaggagaaaccttttga

SEQ ID NO: 3991 - DNA, 2250 bp, Saccharomyces cerevisiae
atggatgtgagagcggcattgcaatgtttcttcagtgcattgagtggacgattcactggaaaaaaattgggactagagatctattctatccagtacaaaatgagcaatagtggtgggtcctctcctttcttggaaagccctggaggttcgcccgacgtaggcagtacaaatggacaaagtaatcgtcagattcaggcgttacaattcaagctcaatactctacaaaatgagtatgagattgaaaaattgcagctacaaaaacagacgaatatcttagaaaagaaatataaggccacgattgacgaattagagaaagcattgaatgatacaaaatatctttatgaaagcaatgataaattggagcaagagttaaagagtttgaaagaaagatcagctaattcgatgaatgataaagacaaatgcatagaggaattgcgaacaaccctccaaaacaaagatttagaaatggagactttaaggcagcagtatgattcgaagttatcaaaggtcactaaccaatgtgaccatttcaagttggaagcagagagctctcattcgctactgatgaaatatgagaaagaaataaagaggcaaagtgtggatatcaaagatttgcagcatcaagtgatggaaaaggatgatgaattatcttcggtaaaagcatctaagatgataaactcacatccaaactactccaccgaagagttcaacgagctcactgaaatgaacaaaatgatccaagaccaagttcagtatactaaagaattggaactagcgaacatgcaacaagccaatgaattgaaaaaacttaaacaatcccaggacacttctactttttggaaattagaaaatgaaaaactacaaaacaaattaagtcaattacacgtactcgaaagtcaatatgaaaatcttcaattggaaaacatagatctaaaatcgaaattaaccaaatgggaaatttataatgatagtgacgatgatgatgataacaatgttaacaacaatgataataataataataataaaaatgataataataatgataataataatgatacaagtaataacaacaatattaataataacaacagaaccaaaaataacataagaaataaccctgaagagattatccgggactggaaacttaccaaaaaggaatgtttaattttgacagatatgaatgataagttaagattggacaataacaatttaaagctactgaatgatgaaatggctttagagagaaaccaaatactagatttgaacaagaattatgaaaacaacatagtaaatttgaaaagattaaatcacgagttagaacaacagaagagtttatctttcgaagaatgtcgattactgcgcgaacaattagatggcctatattccgcacaaaataatgctttactagaggtcgaaaatagtgaaacacatgcgtcaaacaagaacgtaaacgaagatatgaataatttgatcgatacttataaaaataagacagaagatttaacaaacgaactaaagaagctaaacgatcagttattatcaaattccaatgatgtagaaacacaaagaaaaaagaggaagttgacaagtgaccaaattggtttaaattattcacagaggctcaacgaattgcaactggaaaatgtaagtgtctcgagggagttgagtaaagcacaaactacaattcagctactacaagaaaaattagaaaagttaactaaactaaaggagaaaaaaatacgtatactgcaattacgtgacggccccttcataaaagatcaatttatcaagaaaaacaaattacttcttctagaaaaggaaaatgcagatttacttaacgaattgaaaaagaataatccagcagtggaaacagtacccatttctgtttatgattcactaaatttcgagttgaaacagttcgaacaggaagtttttaagtcaaataaaagattttccagactaaagcaagttttcaataataaatctttggagtttattgacgttgtaaactcattattaggttttaaattggaatttcaacaagatagtcgtgtgaaaatattttcctgtttcaaacctgaaaaatatttgattgctgatctaaatgaaaacactttgaaatctaaccttgatgcagatatagaaggatgggatgatctcatgaatctatgggtggaagatagaggtcaacttccgtgctttttggcaacaataacattgcgtctgtgggaacagcgacaagccaaataa

SEQ ID NO: 3992 - DNA, 2250 bp, Artificial Sequence
  Description of Artificial Sequence: Synthetic polynucleotide
atggatgtgagagcggcattgcaatgtttcttcagtgcattgagtggaagattcactggaaaaaaattgggattggagatctattctatccagtacaaaatgagcaatagtggtgggtcctctcctttcttggaaagccctggaggttctcccgacgtaggcagtacaaatggacaaagtaatcgtcagattcaggcgttacaattcaagctcaatactttacaaaatgagtatgagattgaaaaattgcagttacaaaaacagacgaatatcttagaaaagaaatataaggccacgattgacgaattagagaaagcattgaatgatacaaaatatctttatgaaagcaatgataaattggagcaagagttaaagagtttgaaagaaagatctgctaattctatgaatgataaagacaaatgcatagaggaattgagaacaaccctccaaaacaaagatttagaaatggagactttaaggcagcagtatgattctaagttatccaaggtcactaaccaatgtgaccatttcaagttggaagcagagagctctcattctttattgatgaaatatgagaaagaaataaagaggcaaagtgtggatatcaaagatttgcagcatcaagtgatggaaaaggatgatgaattatcttctgtaaaagcatctaagatgataaactctcatccaaactactccaccgaagagttcaacgagctcactgaaatgaacaaaatgatccaagaccaagttcagtatactaaagaattggaattggcgaacatgcaacaagccaatgaattgaaaaaacttaaacaatcccaggacacttctactttttggaaattagaaaatgaaaaattacaaaacaaattaagtcaattacacgtactcgaaagtcaatatgaaaatcttcaattggaaaacatagatttgaaatctaaattaaccaaatgggaaatttataatgatagtgacgatgatgatgataacaatgttaacaacaatgataataataataataataaaaatgataataataatgataataataatgatacaagtaataacaacaatattaataataacaacagaaccaaaaataacataagaaataaccctgaagagattatcagagactggaaacttaccaaaaaggaatgtttaattttgacagatatgaatgataagttaagattggacaataacaatttaaagttattgaatgatgaaatggctttagagagaaaccaaatattggatttgaacaagaattatgaaaacaacatagtaaatttgaaaagattaaatcacgagttagaacaacagaagagtttatctttcgaagaatgtagattacttcgcgaacaattagatggcttgtattccgcacaaaataatgctttattggaggtcgaaaatagtgaaacacatgcgtccaacaagaacgtaaacgaagatatgaataatttgatcgatacttataaaaataagacagaagatttaacaaacgaattgaagaagttgaacgatcagttattatccaattccaatgatgtagaaacacaaagaaaaaagaggaagttgacaagtgaccaaattggtttaaattattctcagaggctcaacgaattgcaattggaaaatgtaagtgtctccagggagttgagtaaagcacaaactacaattcagttgttgcaagaaaaattagaaaagttaactaaattgaaggagaaaaaaatacgtatattgcaattacgtgacggccccttcataaaagatcaatttatcaagaaaaacaaattacttcttttagaaaaggaaaatgcagatttacttaacgaattgaaaaagaataatccagcagtggaaacagtacccatttctgtttatgattctttgaatttcgagttgaaacagttcgaacaggaagtttttaagagcaataaaagattttccagattaaagcaagttttcaataataaatctttggagtttattgacgttgtaaactctttattaggttttaaattggaatttcaacaagatagtcgtgtgaaaatattttcctgtttcaaacctgaaaaatatttgattgctgatttgaatgaaaacactttgaaatctaaccttgatgcagatatagaaggatgggatgatctcatgaatttatgggtggaagatagaggtcaacttccgtgctttttggcaacaataacattgcgtttatgggaacagagacaagccaaatga

SEQ ID NO: 3993 - DNA, 825 bp, Saccharomyces cerevisiae
atgagggaaggtgattctaattcaaaaaaatctgcggatgttgctgtcctctccatcatccttacgggttcgaccttaacattgatctacacatataaaaggtatttaactcaattcaaaagaacaaatgatataccgcgaagaatatttcgtaaacactggctttatggtaaagtcacgtctgtaggtgacggggacaactttcatttctttcacatgccaggtggtataagaggtggatggggatggttacgacccgtcccacaaatgatcaagaatgattctacggcagaaaagcttgttggagatagcagaaatatgaggtttttcaatttcaattggattacgcatgggaggtccaccaaaagtaaaatacaaaaagctaaaagccagttcttgaagctaaatgtaccttacaaaaataggaaaaacctgccaactattcctataagattatgtggaatcgatgccccagaaagagcacatttcggtaacccagctcaaccgtttggtaatgaagctttaatttggttacaaaaccgaattttgggaaagaaagtatgggtcaagcctttatctatagatcagtacaaccgttgtgtagctcgagtgtcatactgggactggtttggtgggtggaaagacttaagcttagaaatgctcaaggatggattagcggttgtttatgagggtaaagtaaacacagaatttgatgatagagaagataagtatcgatattatgaatttttggcaagatctagaaaaaagggactgtggatccagaataaatttgaaacgcctggtgaatataaaaaacgtatttga

SEQ ID NO: 3994 - DNA, 825 bp, Artificial Sequence
  Description of Artificial Sequence: Synthetic polynucleotide
atgagggaaggtgattctaattctaaaaaatctgcggatgttgctgtcctctccatcatccttacgggttctaccttaacattgatctacacatataaaaggtatttaactcaattcaaaagaacaaatgatataccgaggagaatatttcgtaaacactggctttatggtaaagtcacgtctgtaggtgacggggacaactttcatttctttcacatgccaggtggtataagaggtggatggggatggttaagacccgtcccacaaatgatcaagaatgattctacggcagaaaagcttgttggagatagcagaaatatgaggtttttcaatttcaattggattacgcatgggaggtccaccaaaagtaaaatacaaaaagctaaaagccagttcttgaagttgaatgtaccttacaaaaataggaaaaacttaccaactattcctataagattatgtggaatcgatgccccagaaagagcacatttcggtaacccagctcaaccgtttggtaatgaagctttaatttggttacaaaacagaattttgggaaagaaagtatgggtcaagcctttatctatagatcagtacaaccgttgtgtagctagagtgtcttactgggactggtttggtgggtggaaagacttaagcttagaaatgctcaaggatggattagcggttgtttatgagggtaaagtaaacacagaatttgatgatagagaagataagtatcgttattatgaatttttggcaagatctagaaaaaagggattatggatccagaataaatttgaaacgcctggtgaatataaaaaacgtatttga

SEQ ID NO: 3995 - DNA, 1683 bp, Saccharomyces cerevisiae
atgtcgctgatcagcatcctgtctcccctaattacttccgagggcttagattcaagaatcaaaccttcaccaaaaaaggatgcctctactaccactaagccatcactatggaaaactactgagttcaaattctactacattgcatttctggtcgtggttcccttgatgttctatgctgggttacaagctagttcgcccgaaaatccaaactatgcaagatacgaacgtctcctatctcaaggttggttatttggcagaaaagtagacaatagtgattctcaatataggtttttcagggacaattttgcgctattgtcagttttaatgctagtccacacttctataaaacgcattgtactttattcaacaaatatcactaaattgaggtttgatctgatatttggtttgatctttttagtggccgctcatggtgtcaattcgataagaattttagcccatatgctaattttatatgccatcgcccatgtactaaagaactttagaagaatagccaccatcagcatttggatttatggtatttctacgctttttattaacgacaacttcagagcatatccatttggtaatatttgctcttttttaagcccattggaccattggtatagaggtatcattccaagatgggatgtctttttcaattttactcttttgagagtcttaagttacaacttggacttcttagagaggtgggagaatttacaaaagaagaaaagtccatcctatgaatcaaaagaagctaaatcagccattttgctcaatgaacgtgctagattaactgctgcacaccccatacaggactacagcttaatgaattatattgcatatgttacttacacgccacttttcattgccggccccattataacattcaatgattatgtttaccaatcgaaacataccttgccatcaataaatttcaaattcattttttactatgcggtgagattcgttattgctctcttatctatggagttcattttacactttctccacgttgtggcaatctcaaaaaccaaagcgtgggaaaatgacacacctttccagatttccatgattggcttatttaatttgaatattatttggctaaaactactgattccgtggaggctgtttaggctgtgggctttgctagacggaatcgatacacctgaaaatatgatcaggtgtgttgataacaattacagttcactagcattctggagagcttggcatagaagctacaataagtgggttgtccgttacatatatattcctctaggtggttcaaaaaatagagttttgacatcactagcagtcttttccttcgtagctatatggcatgacatcgaactaaagttattattatggggttggctaatagttttgttcctcttaccagaaatttttgctacccaaattttctctcattataccgacgcagtctggtacagacacgtttgcgctgtcggtgctgttttcaacatatgggttatgatgatcgctaatctttttggattctgcttgggctctgacggtactaaaaaattactaagcgatatgttctgtaccgtatctggtttcaaatttgtaattttggcaagcgttagtttattcatcgcagtacaaataatgtttgaaatcagagaagaagaaaagaggcacggaatttacctaaaatgctga

SEQ ID NO: 3996 - DNA, 1683 bp, Artificial Sequence
  Description of Artificial Sequence: Synthetic polynucleotide
atgtctttgatcagcatcctttctcccttaattacttccgagggcttagattccagaatcaaaccttctccaaaaaaggatgcctctactaccactaagccatctctttggaaaactactgagttcaaattctactacattgcatttttagtcgtggttcccttgatgttctatgctgggttacaagctagttctcccgaaaatccaaactatgcaagatacgaacgtctcttatctcaaggttggttatttggcagaaaagtagacaatagtgattctcaatataggtttttcagggacaattttgcgttattgagtgttttaatgcttgtccacacttctataaaacgcattgtactttattctacaaatatcactaaattgaggtttgatttgatatttggtttgatctttttagtggccgctcatggtgtcaattctataagaattttagcccatatgttgattttatatgccatcgcccatgtattgaagaactttagaagaatagccaccatcagcatttggatttatggtatttctacgctttttattaacgacaacttcagagcatatccatttggtaatatttgctcttttttaagcccattggaccattggtatagaggtatcattccaagatgggatgtctttttcaattttactcttttgagagtcttaagttacaacttggacttcttagagaggtgggagaatttacaaaagaagaaaagtccatcctatgaaagtaaagaagctaaaagtgccattttgctcaatgaacgtgctagattaactgctgcacaccccatacaggactacagcttaatgaattatattgcatatgttacttacacgccacttttcattgccggccccattataacattcaatgattatgtttaccaaagtaaacataccttgccaagtataaatttcaaattcattttttactatgcggtgagattcgttattgctctcttatctatggagttcattttacactttctccacgttgtggcaatctccaaaaccaaagcgtgggaaaatgacacacctttccagatttccatgattggcttatttaatttgaatattatttggttgaaattattgattccgtggaggttatttaggctttgggctttgttggacggaatcgatacacctgaaaatatgatcaggtgtgttgataacaattacagttctttggcattctggagagcttggcatagaagctacaataagtgggttgtccgttacatatatattcctttaggtggttccaaaaatagagttttgacatctttggcagtcttttccttcgtagctatatggcatgacatcgaattgaagttattattatggggttggttgatagttttgttcctcttaccagaaatttttgctacccaaattttctctcattataccgacgcagtctggtacagacacgtttgcgctgtcggtgctgttttcaacatatgggttatgatgatcgctaatctttttggattctgcttgggctctgacggtactaaaaaattattaagcgatatgttctgtaccgtatctggtttcaaatttgtaattttggcaagcgttagtttattcatcgcagtacaaataatgtttgaaatcagagaagaagaaaagaggcacggaatttacttgaaatgctga

SEQ ID NO: 3997 - DNA, 2415 bp, Saccharomyces cerevisiae
atgatgttttggtcctcaaagacgggtatcacgtcaaaatattcattttcatcatcacctactttcacagctgaaccatggagcatttacaccggtcgtcccaaatcttcatcttcatcttcaccttccaaagtatcgatattcatgtttgacaagaagcagttcgaaaactatttgttacactatggtattattaaatccaaatctggatccagagataaagtattaatacaagaagcgtacgaaatattaagaaaccaggccaataacttggccaagctcaagcacccaaatattctgactttaattgaaccattagaagaacatagcaagaatttcatgttcgtcaccgagtttgtcactagctcattggagaccgttttcagagaaaccgatgatgaagagcagaatttcttacaaggtcatgttaaagataatatcgtggtacagcgaggtatattgcaactggtaaatgcactcgattttgttcataaccgcgcaagctttgtacacttgaacattcaacctagggcaatatttatcaatgaaaattctgattggaaaatttccggcttaggctatttagtaaaaataccaccaggcacaaatacctctgaatacttcttacctcaatatgatcccagagttcccccatttatgcatttacaattgaattatacggccccagaaattgtttttgagaataccctaacctttaagaacgattatttttctttaggattgttgatatattttctgtacactggtaaagacttgtttcgcagcgaaaattcgactagtgaatataaattggagtacaacaagtttgaaagcaaaattagtacaatgtcatgggataatatattcagtaaggttccacaaaagttgaggcattgtatacccaagctaataaacagagacatctattccagatatgataacataacgttgattttagattctgagtttttccaagatccgttagtcaaaaccttgaattttttagacgatttacctaccaaaaataacgaagaaaaatacgtattcttagagggtctcgtgaatctgctgccagagtttccgccagcattattgcaaaagaagttcttgcccattttattggaactattaagtcagttttgtgctgagaaggtcgtaagtgataaatgtgtgggtaaaagtttggatttgataatcaagatagggtccactttatctcagttgtcctttcaagagaaggtttatccagttttattgagtgatgcgaactttccagtattattaaaaaaagccaccatctgcctgatcgataatttagacacattgaagcaaaaagttaaacgctctgatttcttggaaaatatactcaagccgctatttaattatgttttacatgactccgaaagtgacattaccgtggtttgtcaagaaaaacttttatcacaaattccgttagctttagaggtacttgattttcctaccgtgaaacaattcttattaccattactatccaatctatttacaaagacaacaagtttaacggtgaaaaacacatgtgttacgtgctttcaaattatgatagagcataaatccatcgattcttatacttgctcagaaaccgtcttgcctttgtttaagtccatgaaaacaagagatccaagaattttatctaagttattgaagctttttgaaacggtgccgttgatcattactgatgaaattgttcttgttgaccaagtactgcctttgatgtggaattattctatggcttcaacgctaacaaagtcacaatattcaggatatacaaaggcaattaacaaaatgtcttcagacatccaaaagcaccatatcgccaaattggatgataaagtcaatgatattggcgaagatgcctttcacaaagtcattgaaccaacaatcatgaagaaggaggaccctgagacagttgcagctaaaaatattgaagtagcagccatgcaaccagttaaaaaaaagactgggtcctcttatggggagacattaccacaatctaaaagtattttaaactccaaacccctaaatcctaaaaatgcccttgcaactagaggctttccaacaaggattctaaactcccctccacagaccccatcaagtcgaactggttcaaaagttatgaccaaaggtggctccaacgacgcttcgagcactaaggtggaagaggaattcaatgaatttcaatccttttcaagcacagggagcatacgtcaaacttccgcaccatcagacgtctggatgaacagtacccccagccctaccccaacatccgcaagtagtaccaatttaccgcctgggttctcgatatccttgcaaccaaacaaaagaaaggatggttcttctgatattccccgaagtaatgtatatggatctttgatataa

SEQ ID NO: 3998 - DNA, 2415 bp, Artificial Sequence
  Description of Artificial Sequence: Synthetic polynucleotide
atgatgttttggtcctccaagacgggtatcacgtccaaatattctttttcttcttctcctactttcacagctgaaccatggagcatttacaccggtcgtcccaaatcttcttcttcttcttctccttccaaagtatctatattcatgtttgacaagaagcagttcgaaaactatttgttacactatggtattattaaatccaaatctggatccagagataaagtattaatacaagaagcgtacgaaatattaagaaaccaggccaataacttggccaagctcaagcacccaaatattttgactttaattgaaccattagaagaacatagcaagaatttcatgttcgtcaccgagtttgtcactagctctttggagaccgttttcagagaaaccgatgatgaagagcagaatttcttacaaggtcatgttaaagataatatcgtggtacagagaggtatattgcaattggtaaatgcactcgattttgttcataaccgcgcaagctttgtacacttgaacattcaacctagggcaatatttatcaatgaaaattctgattggaaaatttccggcttaggctatttagtaaaaataccaccaggcacaaatacctctgaatacttcttacctcaatatgatcccagagttcccccatttatgcatttacaattgaattatacggccccagaaattgtttttgagaataccttaacctttaagaacgattatttttctttaggattgttgatatattttttgtacactggtaaagacttgtttcgcagcgaaaattctactagtgaatataaattggagtacaacaagtttgaaagcaaaattagtacaatgtcttgggataatatattcagtaaggttccacaaaagttgaggcattgtatacccaagttaataaacagagacatctattccagatatgataacataacgttgattttagattctgagtttttccaagatccgttagtcaaaaccttgaattttttagacgatttacctaccaaaaataacgaagaaaaatacgtattcttagagggtctcgtgaatttattaccagagtttccgccagcattattgcaaaagaagttcttgcccattttattggaattattaagtcagttttgtgctgagaaggtcgtaagtgataaatgtgtgggtaaaagtttggatttgataatcaagatagggtccactttatctcagttgtcctttcaagagaaggtttatccagttttattgagtgatgcgaactttccagtattattaaaaaaagccaccatctgcttgatcgataatttagacacattgaagcaaaaagttaaacgctctgatttcttggaaaatatactcaagccgttgtttaattatgttttacatgactccgaaagtgacattaccgtggtttgtcaagaaaaacttttatctcaaattccgttagctttagaggtacttgattttcctaccgtgaaacaattcttattaccattattatccaatttatttacaaagacaacaagtttaacggtgaaaaacacatgtgttacgtgctttcaaattatgatagagcataaatccatcgattcttatacttgcagtgaaaccgtcttgcctttgtttaagtccatgaaaacaagagatccaagaattttatctaagttattgaagctttttgaaacggtgccgttgatcattactgatgaaattgttcttgttgaccaagtattacctttgatgtggaattattctatggcttccacgttgacaaagtctcaatattctggatatacaaaggcaattaacaaaatgtcttctgacatccaaaagcaccatatcgccaaattggatgataaagtcaatgatattggcgaagatgcctttcacaaagtcattgaaccaacaatcatgaagaaggaggaccctgagacagttgcagctaaaaatattgaagtagcagccatgcaaccagttaaaaaaaagactgggtcctcttatggggagacattaccacaatctaaaagtattttaaactccaaacccttgaatcctaaaaatgcccttgcaactagaggctttccaacaaggattttgaactcccctccacagaccccatctagtagaactggttccaaagttatgaccaaaggtggctccaacgacgcttctagcactaaggtggaagaggaattcaatgaatttcaatccttttctagcacagggagcatacgtcaaacttccgcaccatctgacgtctggatgaacagtacccccagccctaccccaacatccgcaagtagtaccaatttaccgcctgggttctctatatccttgcaaccaaacaaaagaaaggatggttcttctgatattcccagaagtaatgtatatggatctttgatatga

SEQ ID NO: 3999 - DNA, 1146 bp, Saccharomyces cerevisiae
atggatgttacatttctaaccaaaaatgttcaaataaatggcactcagtttaaaatattacttcaaaatgggcaaggtgaatgcgcgctaattgcactagctaacgtattattgatatcacctgcccatgctcgctatgcccaagaaatttccagactagtgagaggcaaggaaactgttactttaaacgaacttgtgcaaactctagccgacatgggcgttcaaaatccgaatggtacagatgtggacaaacaacagctactccaaatcctaccacaattatatagcggattgaacatcaacccagaatttaacggatcttttgaggacggcgtagaaatgtcgattttcaggctctacaatgtcggcatcgttcatggatggataatagatggggacaatgatccgaactcttacgaacatgtgtccaaatattcttatatgggcgcgcaaaaagttttggtacagtcgtatgagatccaaaagaataatgcccaatttgaaaacagcgagcaaatccaatctgatgcaccttacttaaaatcgtttctggcaagatctgccacacaattgactgaatatggtctaactcatctcagagaaattttagtagaaagatcgtatgccgtgctttttagaaatgatcacttttgcacattatataaaaacaatggcgaattgtttactttggtcacggatcctacttacagaaatcgcaaggacataaactggcagtcgcttaaatccgtgaatggatcgcaggattcttactacacgggcaacttcattcccacaagtctggaaagaacagaaactactgctaccgggcaaaatgagtcctacatttctaacccattcagtgaccagaatacagggcatgtaactagcaaccaagttaatagtggagcaagcggtgttcaacaaatcgaagatgatgaggaactagctaggaggttacaggaacaagaagatatgcgtgcggcaaataacatgcaaaatggttatgctaataacggtagaaatcatcaaagggaaaggtttgaaagacctgaaaaaaattcaaagaaaaacaagttccttccctttaatgggagtaataaagaaaagaaaagagacaagttgaaaaaaaactgtgtaattatgtga

SEQ ID NO: 4000 - DNA, 1146 bp, Artificial Sequence
  Description of Artificial Sequence: Synthetic polynucleotide
atggatgttacatttttaaccaaaaatgttcaaataaatggcactcagtttaaaatattacttcaaaatgggcaaggtgaatgcgcgttaattgcattggctaacgtattattgatatctcctgcccatgctcgctatgcccaagaaatttccagattagtgagaggcaaggaaactgttactttaaacgaacttgtgcaaactttggccgacatgggcgttcaaaatccgaatggtacagatgtggacaaacaacagttgctccaaatcttgccacaattatatagcggattgaacatcaacccagaatttaacggatcttttgaggacggcgtagaaatgtctattttcaggctctacaatgtcggcatcgttcatggatggataatagatggggacaatgatccgaactcttacgaacatgtgtccaaatattcttatatgggcgcgcaaaaagttttggtacagagttatgagatccaaaagaataatgcccaatttgaaaacagcgagcaaatccaatctgatgcaccttacttaaaaagttttttggcaagatctgccacacaattgactgaatatggtttgactcatctcagagaaattttagtagaaagatcttatgccgtgctttttagaaatgatcacttttgcacattatataaaaacaatggcgaattgtttactttggtcacggatcctacttacagaaatcgcaaggacataaactggcagtctcttaaatccgtgaatggatctcaggattcttactacacgggcaacttcattcccacaagtttagaaagaacagaaactactgctaccgggcaaaatgagtcctacatttctaacccattcagtgaccagaatacagggcatgtaactagcaaccaagttaatagtggagcaagcggtgttcaacaaatcgaagatgatgaggaattggctaggaggttacaggaacaagaagatatgcgtgcggcaaataacatgcaaaatggttatgctaataacggtagaaatcatcaaagggaaaggtttgaaagacctgaaaaaaattctaagaaaaacaagttccttccctttaatgggagtaataaagaaaagaaaagagacaagttgaaaaaaaactgtgtaattatgtga

SEQ ID NO: 4001 - DNA, 963 bp, Saccharomyces cerevisiae
atgggtgatataagaacttttgttttcgctatagaagatacggaaacaacacaaggtttgtgtaaaaccattggccgttcgagttcatttgatcaaaatagtctatgtaagccgtacaatctatattttgatgagccagaactaagcagacagcatgctgtcctatgtataaagacaccaatacccaaaattgaaggagttccctctatagaacaactccgcatctgcattcgggatttgaataacaagactggtacagtaaacttagtgtctgatgggccaaatgatgaaattgatttgaaaaatggtgatgcttttggtttgattgcaattgataatcatccttttcgcgacaaccatcatttagccgccaagttaattttccgaattgaacttgagtatttcgatgaagcaagggaaatcgtaaagtgcactattacaaatgtaacatttggaaagaataatacagtgtcatctttccctattcattctgcaacatccacagaagatagcgattcaagttggtacggattgtcggaagcgagtacgcaaacggaagttgcagatgagtgtcatgaaacgaacaccatattgactcgaggtggtaggttttctatcctttcgttgagaaaaagaggcagcaagcaagaccagaagatctgcagtaactttgatagaaaaatacatgaaacgagttctttcgaagaagaaatcgaagtttgcactgacacagacaccacagaagaaaaagaagaagaagaagaaaaagaagaaggggatgatgaggaaggagaaatagaacttgaaattattagagtaaaaagaataaagggcaggacgaagataaagaagacgcttacttgcttctcgaaaaacaagaaaattattacccctcagcactccaatagtatgtggttactactaatagtaatcttgatttttgaccgcctactatcgaattaa

SEQ ID NO: 4002 - DNA, 963 bp, Artificial Sequence
  Description of Artificial Sequence: Synthetic polynucleotide
atgggtgatataagaacttttgttttcgctatagaagatacggaaacaacacaaggtttgtgtaaaaccattggccgttctagttcttttgatcaaaatagtctttgtaagccgtacaatttatattttgatgagccagaattgagcagacagcatgctgtcttatgtataaagacaccaatacccaaaattgaaggagttccctctatagaacaactccgcatctgcattagagatttgaataacaagactggtacagtaaacttagtgtctgatgggccaaatgatgaaattgatttgaaaaatggtgatgcttttggtttgattgcaattgataatcatccttttcgcgacaaccatcatttagccgccaagttaattttcagaattgaacttgagtatttcgatgaagcaagggaaatcgtaaagtgcactattacaaatgtaacatttggaaagaataatacagtgtcttctttccctattcattctgcaacatccacagaagatagcgattctagttggtacggattgagtgaagcgagtacgcaaacggaagttgcagatgagtgtcatgaaacgaacaccatattgactagaggtggtaggttttctatcctttctttgagaaaaagaggcagcaagcaagaccagaagatctgcagtaactttgatagaaaaatacatgaaacgagttctttcgaagaagaaatcgaagtttgcactgacacagacaccacagaagaaaaagaagaagaagaagaaaaagaagaaggggatgatgaggaaggagaaatagaacttgaaattattagagtaaaaagaataaagggcaggacgaagataaagaagacgcttacttgcttctccaaaaacaagaaaattattacccctcagcactccaatagtatgtggttattattgatagtaatcttgatttttgaccgccttttatccaattga

SEQ ID NO: 4003 - DNA, 393 bp, Saccharomyces cerevisiae
atgtctcaaccggttcaacgcgctgcagcacgctcattccttcaaaaatacatcaataaagaaactttgaaatatattttcacaacacacttctggggtcccgtatcaaatttcggtatcccaattgctgctatatatgatctgaaaaaagaccctacactaatctctggcccaatgacttttgctttagttacctattcaggtgttttcatgaagtatgctctttcagtatcacccaaaaactacttactgtttggatgccaccttattaatgaaactgcgcaattagctcaaggctataggtttctcaaatacacgtatttcacaacagatgaggagaagaaagctctagataaggaatggaaagagaaagaaaaaactggtaaacagtaa

SEQ ID NO: 4004 - DNA, 393 bp, Artificial Sequence
  Description of Artificial Sequence: Synthetic polynucleotide
atgtctcaaccggttcaacgcgctgcagcacgctctttccttcaaaaatacatcaataaagaaactttgaaatatattttcacaacacacttctggggtcccgtatctaatttcggtatcccaattgctgctatatatgatttgaaaaaagaccctacattgatctctggcccaatgacttttgctttagttacctattctggtgttttcatgaagtatgctctttctgtatctcccaaaaactacttactttttggatgccaccttattaatgaaactgcgcaattagctcaaggctataggtttctcaaatacacgtatttcacaacagatgaggagaagaaagctttagataaggaatggaaagagaaagaaaaaactggtaaacagtga

SEQ ID NO: 4005 - DNA, 657 bp, Saccharomyces cerevisiae
atggtgaccggaatatcggaggaaaatgatgatgaagagactttttcggctgttcattcttcaacacccagtattaattctcaatcctacgcgattcctataacagaggaaatgtccagctctttccatgattcgatcagcaccactagcaactcaagtggtagcttcgatagtgatggaagtaacgtttcagatgttgtggagcaaaatgaaatggacaatgaatctaacgttgacgaagatttgttcctagataacgatatccctcagtcaagcaatttgctacccacggatgcccaggatcctggtccaatatttgacgtttctagatatatttttgattctctaaaacaatctattgattctgctgatttctcagaggcactttctctacagaccaaaacctccgctgttataaattcgaaaagcctagagcttaaacaatatattgatgaaatgaagagcaggctcactcaactgcaagagaagtttgaaaatggtgaggctacttcaaaaaaaataaaacgtgatttagaaacttcaagaaagaacatcgactatttaaacgctgctttgcgtgtcgatttccccatagagtttaatcaggcaagagaaaaaattcttgagcgcagattgaatgaagaccatgactgctga

SEQ ID NO: 4006 - DNA, 657 bp, Artificial Sequence
  Description of Artificial Sequence: Synthetic polynucleotide
atggtgaccggaatatctgaggaaaatgatgatgaagagactttttctgctgttcattcttctacacccagtattaattctcaatcctacgcgattcctataacagaggaaatgtccagctctttccatgattctatcagcaccactagcaacagtagtggtagcttcgatagtgatggaagtaacgtttctgatgttgtggagcaaaatgaaatggacaatgaatctaacgttgacgaagatttgttcttggataacgatatccctcagagtagcaatttgttgcccacggatgcccaggatcctggtccaatatttgacgtttctagatatatttttgattctttgaaacaatctattgattctgctgatttcagtgaggcactttctttgcagaccaaaacctccgctgttataaattctaaaagcttagagcttaaacaatatattgatgaaatgaagagcaggctcactcaattacaagagaagtttgaaaatggtgaggctacttctaaaaaaataaaacgtgatttagaaacttccagaaagaacatcgactatttaaacgctgctttgcgtgtcgatttccccatagagtttaatcaggcaagagaaaaaattcttgagcgcagattgaatgaagaccatgactgctga

SEQ ID NO: 4007 - DNA, 1572 bp, Saccharomyces cerevisiae
atgacaaaggaagaaatcgcagacaagaagagaaaggttgtagatgaggaggtaattgaaaaaaagaagagtaagaaacacaaaaaggataagaaagacaagaaggaaaagaaggataaaaagcataaaaagcataagaaggagaagaagggtgagaaggaagtggaagtaccagagaaagaatctgaaaagaaacctgaacctacttctgcagtggctagtgagttttatgttcagagtgaagcactaaccagtcttccacaatctgatattgacgaatatttcaaggaaaatgaaattgctgttgaggattctctggatctagccctacgtccgctattatcatttgattatctttctttagactcttccattcaagcagaaatttccaaatttccaaaaccaacgcctattcaagccgtagcctggccatatttgttatctggtaaagatgttgttggtgttgctgagaccggttctggtaaaacatttgctttcggtgttccagctatcagccatttaatgaacgatcaaaagaaaaggggcatacaggttctagtcatttccccaactagagaacttgcttcccaaatttatgataatctgattgtattaactgacaaggttggtatgcagtgttgttgtgtttatggtggtgttccaaaggatgagcaaagaattcagttaaaaaagtcacaagtggtggttgctacacctggtagattattagacctattgcaggaaggatctgttgacttatctcaagttaattacttagtattagacgaggcagacagaatgttggaaaaaggttttgaagaagacatcaagaatattatcagagaaactgatgcgtccaaaagacaaactctaatgtttaccgctacctggccaaaggaagtccgtgaattagcttccacgttcatgaacaacccaatcaaagtatctattggtaacacggaccaactaactgctaacaaaagaattacacagattgttgaagtggtggacccacgtggaaaagaaagaaagttattggaactgttgaaaaagtaccactctggtccaaaaaagaatgaaaaggtcttgatttttgctctttataagaaggaagctgctcgtgttgaaaggaatttgaaatataacgggtataacgtcgcagctatccatggtgatttgtcccagcaacaaagaacgcaagcattgaatgagttcaaaagcgggaagtctaacttgttactggccaccgacgttgcagcaagaggtttagatataccaaatgttaagacagttattaatttaactttcccattgactgtggaggattatgtccatagaatcggtagaactggtagagctggtcaaacaggcacagcacacactctgttcactgaacaagaaaagcatttggctggtggactggttaacgttttgaatggtgccaatcaacctgttcctgaagatttgataaagttcggtactcacactaagaagaaggaacatagcgcttatggttcattctttaaggacgtcgatttgactaagaaaccaaaaaaaattactttcgattag

SEQ ID NO: 4008 - DNA, 1572 bp, Artificial Sequence
  Description of Artificial Sequence: Synthetic polynucleotide
atgacaaaggaagaaatcgcagacaagaagagaaaggttgtagatgaggaggtaattgaaaaaaagaagagtaagaaacacaaaaaggataagaaagacaagaaggaaaagaaggataaaaagcataaaaagcataagaaggagaagaagggtgagaaggaagtggaagtaccagagaaagaatctgaaaagaaacctgaacctacttctgcagtggctagtgagttttatgttcagagtgaagcattgaccagtcttccacaatctgatattgacgaatatttcaaggaaaatgaaattgctgttgaggattctttagatttggccttgcgtccgttgttatcttttgattatctttctttagactcttccattcaagcagaaatttccaaatttccaaaaccaacgcctattcaagccgtagcctggccatatttgttatctggtaaagatgttgttggtgttgctgagaccggttctggtaaaacatttgctttcggtgttccagctatcagccatttaatgaacgatcaaaagaaaaggggcatacaggttttggtcatttccccaactagagaacttgcttcccaaatttatgataatttaattgtattaactgacaaggttggtatgcagtgttgttgtgtttatggtggtgttccaaaggatgagcaaagaattcagttaaaaaagtctcaagtggtggttgctacacctggtagattattagacttgttgcaggaaggatctgttgacttatctcaagttaattacttagtattagacgaggcagacagaatgttggaaaaaggttttgaagaagacatcaagaatattatcagagaaactgatgcgtccaaaagacaaactttaatgtttaccgctacctggccaaaggaagtccgtgaattagcttccacgttcatgaacaacccaatcaaagtatctattggtaacacggaccaattgactgctaacaaaagaattacacagattgttgaagtggtggacccacgtggaaaagaaagaaagttattggaattattgaaaaagtaccactctggtccaaaaaagaatgaaaaggtcttgatttttgctctttataagaaggaagctgctcgtgttgaaaggaatttgaaatataacgggtataacgtcgcagctatccatggtgatttgtcccagcaacaaagaacgcaagcattgaatgagttcaaaagcgggaagtctaacttgttattagccaccgacgttgcagcaagaggtttagatataccaaatgttaagacagttattaatttaactttcccattgactgtggaggattatgtccatagaatcggtagaactggtagagctggtcaaacaggcacagcacacactttattcactgaacaagaaaagcatttggctggtggattggttaacgttttgaatggtgccaatcaacctgttcctgaagatttgataaagttcggtactcacactaagaagaaggaacatagcgcttatggttctttctttaaggacgtcgatttgactaagaaaccaaaaaaaattactttcgattga

SEQ ID NO: 4009 - DNA, 1692 bp, Saccharomyces cerevisiae
atgagtattcggaatgataatgcttccggtggctatatgcagccggatcaatcttcgaacgcttctatgcacaaaagagacttaagagttgaggaggaaataaagccattggatgatatggatagcaagggtgctgtagcagcagatggtgaagttcatctaagaaagtcattttcgttgtggtcaattcttggtgttggattcggtttgactaattcctggttcggtatttctacatcgatggttgcaggtatatcttctggtggacccatgatgattgtttacggtataattattgttgccctgatttctatttgcattggtacctcgttgggtgaattatcttccgcatatccgcacgccggtggtcagttttggtggtctttgaagcttgcccctcctaagtacaaaagatttgcggcctacatgtgcggttcatttgcttacgcaggatccgtgttcacaagtgcttcaactacgttatccgttgctaccgaagtggttggtatgtacgctctgacgcaccctgaattcatcccaaagagatggcatatattcgtttgctttgaattgttgcatttgttcttgatgtttttcaactgttacggtaaatccttacctatcatttcatcttcctctctatacatttccctactatcctttttcacaattacaattactgtattggcatgttctcatggaaagttcaacgatgcaaagtttgtttttgccacatttaataatgaaacaggttggaagaacggcggtatcgcctttattgtcggtttgattaacccagcttggtcattttcgtgccttgactgtgcaacccatatggcgtttgaagttgaaaaaccagaaagagttattcccattgctatcatgggaacagtcgccattgggtttgtcacttccttttgttatgttatcgctatgttcttctctatacaagatctggacgctgtcttgtcttctacaacaggcgccccaatcttggacatttataatcaggcattgggtaataaatcaggtgcgattttcctgggttgcttgattctatttacctcttttggttgcgtcattgcttgtcacacttggcaggcaaggttatgttggtcatttgccagggacaatggtcttccattatcccgtttatggtcgcaagttaacccacacactggtgtacctttgaacgctcatttaatgtcatgcgcttggataaccctcattggcctactttatttggcttccagtacggcttttcagtccttaattacaggttgtattgcatttttattgttatcctacatcattccggttatatgtttacttgctaaaaagcgtaacatagctcatggtccattctggcttggaaaatttggatttttttcaaacattgttcttttgggttggactgtcttttctgtggtctttttttcctttccaccagttttacctgtgacaaaggataacatgaactatgtttgtgtagttattgttggttatactgcgtattcgattctttactggaaatacaagggtaagaaggaattccacgctttagaagaatctgagaacgaacaggctgaatatagtaataacttcgataccattgaagatagtcgagaattttccgttgcggcctctgacgttgaactcgaaaatgaacacgtaccgtggggaaagaagtga

SEQ ID NO: 4010 - DNA, 1692 bp, Artificial Sequence
  Description of Artificial Sequence: Synthetic polynucleotide
atgagtattagaaatgataatgcttccggtggctatatgcagccggatcaatcttccaacgcttctatgcacaaaagagacttaagagttgaggaggaaataaagccattggatgatatggatagcaagggtgctgtagcagcagatggtgaagttcatttaagaaagagcttttctttgtggtctattcttggtgttggattcggtttgactaattcctggttcggtatttctacatctatggttgcaggtatatcttctggtggacccatgatgattgtttacggtataattattgttgccttaatttctatttgcattggtacctctttgggtgaattatcttccgcatatccgcacgccggtggtcagttttggtggtctttgaagcttgcccctcctaagtacaaaagatttgcggcctacatgtgcggttcttttgcttacgcaggatccgtgttcacaagtgcttccactacgttatccgttgctaccgaagtggttggtatgtacgctttgacgcaccctgaattcatcccaaagagatggcatatattcgtttgctttgaattgttgcatttgttcttgatgtttttcaactgttacggtaaatccttacctatcatttcttcttcctctttgtacatttccttattatcctttttcacaattacaattactgtattggcatgttctcatggaaagttcaacgatgcaaagtttgtttttgccacatttaataatgaaacaggttggaagaacggcggtatcgcctttattgtcggtttgattaacccagcttggtctttttcttgccttgactgtgcaacccatatggcgtttgaagttgaaaaaccagaaagagttattcccattgctatcatgggaacagtcgccattgggtttgtcacttccttttgttatgttatcgctatgttcttctctatacaagatttggacgctgtcttgtcttctacaacaggcgccccaatcttggacatttataatcaggcattgggtaataaatctggtgcgattttcttgggttgcttgattttatttacctcttttggttgcgtcattgcttgtcacacttggcaggcaaggttatgttggtcttttgccagggacaatggtcttccattatcccgtttatggtctcaagttaacccacacactggtgtacctttgaacgctcatttaatgagttgcgcttggataaccctcattggccttctttatttggcttccagtacggcttttcagtccttaattacaggttgtattgcatttttattgttatcctacatcattccggttatatgtttacttgctaaaaagcgtaacatagctcatggtccattctggcttggaaaatttggatttttttccaacattgttcttttgggttggactgtcttttctgtggtctttttttcctttccaccagttttacctgtgacaaaggataacatgaactatgtttgtgtagttattgttggttatactgcgtattctattctttactggaaatacaagggtaagaaggaattccacgctttagaagaatctgagaacgaacaggctgaatatagtaataacttcgataccattgaagatagtagagaattttccgttgcggcctctgacgttgaactcgaaaatgaacacgtaccgtggggaaagaagtga

SEQ ID NO: 4011 - DNA, 735 bp, Saccharomyces cerevisiae
atggccgctgaaaaaatcttgaccccagaatctcagttgaagaagtctaaggctcaacaaaagactgctgaacaagtcgctgctgaaagagctgctcgtaaggctgctaacaaggaaaagagagccattattttggaaagaaacgccgcttaccaaaaggaatacgaaactgctgaaagaaacatcattcaagctaagcgtgatgccaaggctgctggttcctactacgtcgaagctcaacacaagttggtcttcgttgtcagaatcaagggtattaacaagatcccacctaagccaagaaaggttctacaattgctaagattgacaagaatcaactctggtacattcgtcaaagttaccaaggctactttggaactattgaagttgattgaaccatacgttgcttacggttacccatcgtactctactattagacaattggtctacaagagaggtttcggtaagatcaacaagcaaagagttccattgtccgacaatgctatcatcgaagccaacttgggtaagtatggtatcttgtccattgacgatttgattcacgaaatcatcactgttggtccacacttcaagcaagctaacaactttttgtggccattcaagttgtccaacccatctggtggttggggtgtcccaagaaagttcaagcactttatccaaggtggttctttcggtaaccgtgaagaattcatcaacaaattggttaagtccatgaactaa

SEQ ID NO: 4012 - DNA, 735 bp, Artificial Sequence
  Description of Artificial Sequence: Synthetic polynucleotide
atggccgctgaaaaaatcttgaccccagaatctcagttgaagaagtctaaggctcaacaaaagactgctgaacaagtcgctgctgaaagagctgctcgtaaggctgctaacaaggaaaagagagccattattttggaaagaaacgccgcttaccaaaaggaatacgaaactgctgaaagaaacatcattcaagctaagcgtgatgccaaggctgctggttcctactacgtcgaagctcaacacaagttggtcttcgttgtcagaatcaagggtattaacaagatcccacctaagccaagaaaggttttgcaattgttaagattgacaagaatcaactctggtacattcgtcaaagttaccaaggctactttggaattattgaagttgattgaaccatacgttgcttacggttacccatcttactctactattagacaattggtctacaagagaggtttcggtaagatcaacaagcaaagagttccattgtccgacaatgctatcatcgaagccaacttgggtaagtatggtatcttgtccattgacgatttgattcacgaaatcatcactgttggtccacacttcaagcaagctaacaactttttgtggccattcaagttgtccaacccatctggtggttggggtgtcccaagaaagttcaagcactttatccaaggtggttctttcggtaaccgtgaagaattcatcaacaaattggttaagtccatgaactga

SEQ ID NO: 4013 - DNA, 1164 bp, Saccharomyces cerevisiae
atgagtaacggtgcgtttgatgctatttttgagtacgcatggggccaaattgacaaacccatcagtggagactttatatatggtaaagatttgccaaagctaatcgagataattgagaatatctttcaaaaggcacagaaaagtggttcctatgagcttcgattgccattgttttcagaaatcaataaagatttgtttcgcacgttttctaatacaaaaaccttctttaaaatacacaaagaagaatttgacgatatcttcttcaatttggttaatcaccccctcagggaaatcttagaaaacgcgttcattggtgtagattctattccaagtgattttatcgtaagcatgaatttgaattcaccttccaaatttctggttgagaacaagaacaagaatacagagggggctggaatttcgacacctaggaagaagcttactgaatcacctatcaagctgttaagcaggaataatataggaaaggccttagaggtgcaggtggaggaattgaaaagagaactaactgcgaaacaaagcctccttcaggaaaatgaacgacaagtaagcgaattgaaaataaggctcgaaacttatcaagaaaagtatgcttccatacaacagcggttcagcgacttacagaaagctagacaagtggaagataatcaaaatagctccagaacatctgacccaggatcacctctggtaacgggaatcgatcaaaaagccattctggaagagtttagaagaagattacagagacaaacagacaccatatctttcctaaaggatcaaatacggcgagaaagggggctcaattgcagtaacgataaggtatcacattcaaaacgaaaacatgcaaccactgatggtgatgggactttcaagaattttatttccgcggttccctccaacatatgggtaaaagcaacaataagaattatagtctgtttcgctttactggcaggtgtcctaccatacattagaaaatacgtatatgctcatgacacaccatcccaaaactcaaggttacaattatcatggtgggaaaatagtggcatattaagcaagattgtatggttctttgaagatcagacagatttagaaactgaataccgttcaaatgccaatgtggatgacgcatatagtagagtattcggcatttaa

SEQ ID NO: 4014 - DNA, 1164 bp, Artificial Sequence
  Description of Artificial Sequence: Synthetic polynucleotide
atgagtaacggtgcgtttgatgctatttttgagtacgcatggggccaaattgacaaacccatcagtggagactttatatatggtaaagatttgccaaagttaatcgagataattgagaatatctttcaaaaggcacagaaaagtggttcctatgagcttagattgccattgttttctgaaatcaataaagatttgtttcgcacgttttctaatacaaaaaccttctttaaaatacacaaagaagaatttgacgatatcttcttcaatttggttaatcaccccctcagggaaatcttagaaaacgcgttcattggtgtagattctattccaagtgattttatcgtaagcatgaatttgaattctccttccaaatttttggttgagaacaagaacaagaatacagagggggctggaatttctacacctaggaagaagcttactgaatctcctatcaagcttttaagcaggaataatataggaaaggccttagaggtgcaggtggaggaattgaaaagagaattgactgcgaaacaaagcctccttcaggaaaatgaaagacaagtaagcgaattgaaaataaggctcgaaacttatcaagaaaagtatgcttccatacaacagagattcagcgacttacagaaagctagacaagtggaagataatcaaaatagctccagaacatctgacccaggatctcctttggtaacgggaatcgatcaaaaagccattttggaagagtttagaagaagattacagagacaaacagacaccatatctttcttgaaggatcaaataagaagagaaagggggctcaattgcagtaacgataaggtatctcattctaaaagaaaacatgcaaccactgatggtgatgggactttcaagaattttatttccgcggttccctccaacatatgggtaaaagcaacaataagaattatagtctgtttcgctttattggcaggtgtcttgccatacattagaaaatacgtatatgctcatgacacaccatcccaaaacagcaggttacaattatcttggtgggaaaatagtggcatattaagcaagattgtatggttctttgaagatcagacagatttagaaactgaataccgttccaatgccaatgtggatgacgcatatagtagagtattcggcatttga

SEQ ID NO: 4015 - DNA, 2502 bp, Saccharomyces cerevisiae
atgaataatgctgcaaatacagggacgaccaatgagtcaaacgtgagcgatgctccccgtattgagcctttaccaagcttgaatgatgatgacattgaaaaaatcttacaaccgaacgatatctttacgaccgatcgtaccgatgcaagtactacatcttccacagccattgaagatattattaacccctcattggatccgcagtcagcagcatcgccggttccttcttcctcttttttccatgactcaaggaaaccttccaccagtacacatttagtaaggagaggtactccattgggaatttaccaaaccaatctatacggtcacaatagcagagaaaatactaatcctaatagtacattattatcttctaagttactcgcgcatccaccagttccttatgggcaaaatcccgatttactacaacatgctgtgtacagggcacagccgtcaagtggaaccactaacgcgcaaccgcgccaaaccacaagaagatatcaatcccataaatcacggcctgcatttgttaataaactatggagcatgttaaacgatgattctaatacgaaacttatacagtgggcggaggatggaaaatcttttattgtcacgaatagggaggaatttgtgcaccaaattttaccaaaatattttaaacattccaatttcgcttcctttgtaagacaattgaacatgtatggatggcataaagttcaagatgtcaagtcaggatcaattcaaagtagttcagatgataagtggcaatttgaaaatgaaaacttcattagaggtagagaagatttgctggaaaaaataatcaggcagaaaggttcctccaataaccataatagccctagtggtaacggtaatccagcgaatggtagcaacatccctctggacaatgccgcaggaagtaataatagcaataataacatcagtagtagtaattcattttttaacaatggtcatttattgcagggtaaaacactaagattaatgaacgaagcgaatcttggagataagaatgatgtcaccgcgattttgggggaattagagcaaataaaatataaccagattgcaatttccaaagatttactaagaataaacaaagataatgagttattatggcaagagaatatgatggccagggaaagacatagaacccaacagcaagccttggaaaaaatgttcagattcttgacatctatagtcccacacttagatcccaaaatgattatggacgggctgggagatccgaaagttaataatgaaaagctaaacagtgcgaataacattgggttaaatcgcgacaacacaggcactatagatgaactaaaatccaacgattctttcataaacgatgatcgtaattctttcaccaatgctacaaccaacgcccgtaataacatgagtcccaacaatgatgacaatagtattgacaccgctagcactaataccaccaacagaaagaaaaatatagatgaaaacatcaaaaataacaacgacataattaatgacattatatttaataccaaccttgccaacaatctcagcaattacaattccaacaataatgctggctcgccaataaggccctataaacaaagatatcttttgaaaaatagagccaattcctcgacatcgagtgagaatccaagcctaacgccctttgatatcgaatctaataatgaccgcaaaatttcagaaattccttttgatgacgaagaagaagaagaaacggattttaggccttttacctcgcgagatcctaataaccaaacgagtgaaaacacttttgatccaaacagatttacgatgctctctgatgatgatttaaaaaaagattctcataccaatgacaataaacacaacgaaagtgatcttttttgggacaacgtacatagaaatatagacgaacaagatgcaagactccagaacttggaaaatatggttcacatactttctcctggatatcctaataagtcgttcaacaacaaaacttcctcgacaaacactaattccaatatggaaagtgctgtcaacgttaatagccctggtttcaacttacaggattatttaactggagagtctaattcccccaattctgttcattctgttccctccaatggcagcggctccacaccgttgcccatgccaaatgataatgacaccgagcacgcaagtacaagtgtcaatcaaggcgaaaatggaagcggattaacgcccttcctcacggtagatgatcacacactaaacgacaataacactagtgagggaagtacaagggtgtcccccgatataaagttcagcgccactgaaaacactaaagtgagtgataacctgccaagctttaatgaccacagttattccacccaggccgacacggcgcccgagaacgctaagaaaagatttgtggaggaaataccggaaccggctatagtcgaaatacaggacccgacagagtacaacgatcaccgcctgcccaaacgagctaagaaatag

SEQ ID NO: 4016 - DNA, 2502 bp, Artificial Sequence
  Description of Artificial Sequence: Synthetic polynucleotide
atgaataatgctgcaaatacagggacgaccaatgagagcaacgtgagcgatgctccccgtattgagcctttaccaagcttgaatgatgatgacattgaaaaaatcttacaaccgaacgatatctttacgaccgatcgtaccgatgcaagtactacatcttccacagccattgaagatattattaacccctctttggatccgcagtctgcagcaagtccggttccttcttcctcttttttccatgacagcaggaaaccttccaccagtacacatttagtaaggagaggtactccattgggaatttaccaaaccaatctttacggtcacaatagcagagaaaatactaatcctaatagtacattattatcttctaagttactcgcgcatccaccagttccttatgggcaaaatcccgatttattacaacatgctgtgtacagggcacagccgtccagtggaaccactaacgcgcaaccgcgccaaaccacaagaagatatcaatcccataaaagcaggcctgcatttgttaataaattatggagcatgttaaacgatgattctaatacgaaacttatacagtgggcggaggatggaaaatcttttattgtcacgaatagggaggaatttgtgcaccaaattttaccaaaatattttaaacattccaatttcgcttcctttgtaagacaattgaacatgtatggatggcataaagttcaagatgtcaagagtggatctattcaaagtagttctgatgataagtggcaatttgaaaatgaaaacttcattagaggtagagaagatttgttggaaaaaataatcaggcagaaaggttcctccaataaccataatagccctagtggtaacggtaatccagcgaatggtagcaacatccctttggacaatgccgcaggaagtaataatagcaataataacatcagtagtagtaattctttttttaacaatggtcatttattgcagggtaaaacattaagattaatgaacgaagcgaatcttggagataagaatgatgtcaccgcgattttgggggaattagagcaaataaaatataaccagattgcaatttccaaagatttattaagaataaacaaagataatgagttattatggcaagagaatatgatggccagggaaagacatagaacccaacagcaagccttggaaaaaatgttcagattcttgacatctatagtcccacacttagatcccaaaatgattatggacgggttgggagatccgaaagttaataatgaaaagttgaacagtgcgaataacattgggttaaatcgcgacaacacaggcactatagatgaattgaaatccaacgattctttcataaacgatgatcgtaattctttcaccaatgctacaaccaacgcccgtaataacatgagtcccaacaatgatgacaatagtattgacaccgctagcactaataccaccaacagaaagaaaaatatagatgaaaacatcaaaaataacaacgacataattaatgacattatatttaataccaaccttgccaacaatctcagcaattacaattccaacaataatgctggctctccaataaggccctataaacaaagatatcttttgaaaaatagagccaattcctctacatctagtgagaatccaagcttaacgccctttgatatcgaatctaataatgaccgcaaaatttctgaaattccttttgatgacgaagaagaagaagaaacggattttaggccttttacctctagagatcctaataaccaaacgagtgaaaacacttttgatccaaacagatttacgatgctctctgatgatgatttaaaaaaagattctcataccaatgacaataaacacaacgaaagtgatcttttttgggacaacgtacatagaaatatagacgaacaagatgcaagactccagaacttggaaaatatggttcacatactttctcctggatatcctaataagagtttcaacaacaaaacttcctctacaaacactaattccaatatggaaagtgctgtcaacgttaatagccctggtttcaacttacaggattatttaactggagagtctaattcccccaattctgttcattctgttccctccaatggcagcggctccacaccgttgcccatgccaaatgataatgacaccgagcacgcaagtacaagtgtcaatcaaggcgaaaatggaagcggattaacgcccttcctcacggtagatgatcacacattgaacgacaataacactagtgagggaagtacaagggtgtcccccgatataaagttcagcgccactgaaaacactaaagtgagtgataacttaccaagctttaatgaccacagttattccacccaggccgacacggcgcccgagaacgctaagaaaagatttgtggaggaaataccggaaccggctatagtcgaaatacaggacccgacagagtacaacgatcaccgcttgcccaaaagagctaagaaatga

SEQ ID NO: 4017 - DNA, 2073 bp, Saccharomyces cerevisiae
atggaaggcttcaatccggctgacatagaacatgcgtcaccgattaattcatctgacagccattcatcctcctttgtatatgctctacccaaaagtgctagtgaatatgtagtcaaccataatgagggtcgtgcaagtgcaagtggaaatccagccgcagtgccgtctcccataatgacactgaatctcaaaagcacacattccctcaatattgatcagcatgttcatacctcaacatcgccgacggaaactattgggcatattcatcatgtggaaaagctgaatcaaaacaatttgattcatctggatccagtacccaactttgaagataagtccgatattaagccttggttgcaaaagattttttatcctcaaggaatagaacttgtgatagaaaggtcggacgcatttaaagttgtcttcaagtgtaaagctgctaaaaggggaaggaacgcgagaaggaaaagaaaagataagcccaaaggacaggaccacgaagacgagaaatccaagatcaatgatgacgaattagaatatgcgagtccttctaatgccacagtaaccaatgggcctcaaacatcgcccgatcaaacatcctccataaagccaaagaaaaaaagatgtgtatcgaggtttaataactgtccgtttagagtacgagctacttattcgttaaagaggaaaagatggagcattgttgtaatggacaataaccattcacatcagctaaagtttaaccctgattccgaagagtacaaaaaattcaaagaaaaattaagaaaggataatgacgtagatgcaatcaagaaattcgacgaattggaatacagaactttggccaatttgcccattccaacagctacaatcccctgtgattgtggtttaacaaatgaaatacaaagtttcaatgtcgtattgcccactaacagtaatgttacttcatcagcatcctcttcaactgtatcgtccatatcccttgattcatcgaatgcatctaaaaggccatgcttaccctctgtaaataacaccggtagtatcaataccaataacgtaaggaaaccgaaaagccagtgtaagaataaagacacactcttaaaaagaaccaccatgcagaactttctcacaactaaatcaaggctgcgtaagaccggtacgccaacatcttcgcaacactcatctacagcattttcaggatatattgatgatcctttcaatttgaatgaaatcttgccactgccggcatccgatttcaagctaaacactgtaacaaatttgaacgaaattgactttacgaacatttttaccaaatcgccgcatccacatagcgggtctacccatccaagacaagtcttcgaccaattggacgattgttcctctatactcttctctccattaactacaaacacgaataatgaatttgaaggagagtcagatgattttgttcattctccatatttgaactcagaggcagatttcagccaaattcttagtagtgctcccccagtccatcatgacccaaatgaaacacatcaggaaaaccaggatattattgatagatttgctaatagttcccaagaacataatgagtatattctacaatatttgacgcactccgatgctgctaaccacaataacatcggcgttccaaacaacaattcacattcgctaaatactcagcataacgtttctgatctgggcaactcacttttaagacaagaagctttagttggcagctcttcaacaaaaatcttcgacgaattgaaatttgtacaaaatggcccacacggttctcaacatcctatagattttcaacatgttgaccatcgtcatctcagctctaatgaacctcaagtacgatcacatcaatatggtccgcaacagcagccaccgcagcaattgcaatatcaccaaaatcagccccacgacggccataaccacgaacagcaccaaacagtacaaaaggatatgcaaacgcatgaatcgctagaaataatgggaaacacattattggaagagttcaaagacattaaaatggtgaacggcgagttgaagtatgtgaagccagaagattag

SEQ ID NO: 4018 - DNA, 2073 bp, Artificial Sequence
  Description of Artificial Sequence: Synthetic polynucleotide
atggaaggcttcaatccggctgacatagaacatgcgtccccgattaattcttctgacagccattcttcctcctttgtatatgctcttcccaaaagtgctagtgaatatgtagtcaaccataatgagggtcgtgcaagtgcaagtggaaatccagccgcagtgccgtctcccataatgacattaaatctcaaaagcacacattccctcaatattgatcagcatgttcatacctctacatctccgacggaaactattgggcatattcatcatgtggaaaagttgaatcaaaacaatttgattcatttggatccagtacccaactttgaagataagtccgatattaagccttggttgcaaaagattttttatcctcaaggaatagaacttgtgatagaaaggagtgacgcatttaaagttgtcttcaagtgtaaagctgctaaaaggggaaggaacgcgagaaggaaaagaaaagataagcccaaaggacaggaccacgaagacgagaaatccaagatcaatgatgacgaattagaatatgcgagtccttctaatgccacagtaaccaatgggcctcaaacatctcccgatcaaacatcctccataaagccaaagaaaaaaagatgtgtaagtaggtttaataactgtccgtttagagtaagagctacttattctttaaagaggaaaagatggagcattgttgtaatggacaataaccattctcatcagttgaagtttaaccctgattccgaagagtacaaaaaattcaaagaaaaattaagaaaggataatgacgtagatgcaatcaagaaattcgacgaattggaatacagaactttggccaatttgcccattccaacagctacaatcccctgtgattgtggtttaacaaatgaaatacaaagtttcaatgtcgtattgcccactaacagtaatgttacttcttctgcatcctcttctactgtatcttccatatcccttgattcttccaatgcatctaaaaggccatgcttaccctctgtaaataacaccggtagtatcaataccaataacgtaaggaaaccgaaaagccagtgtaagaataaagacacactcttaaaaagaaccaccatgcagaactttctcacaactaaatctaggttacgtaagaccggtacgccaacatcttctcaacactcttctacagcattttctggatatattgatgatcctttcaatttgaatgaaatcttgccattaccggcatccgatttcaagttgaacactgtaacaaatttgaacgaaattgactttacgaacatttttaccaaatctccgcatccacatagcgggtctacccatccaagacaagtcttcgaccaattggacgattgttcctctatactcttctctccattaactacaaacacgaataatgaatttgaaggagagtctgatgattttgttcattctccatatttgaacagtgaggcagatttcagccaaattcttagtagtgctcccccagtccatcatgacccaaatgaaacacatcaggaaaaccaggatattattgatagatttgctaatagttcccaagaacataatgagtatattttacaatatttgacgcactccgatgctgctaaccacaataacatcggcgttccaaacaacaattctcattctttgaatactcagcataacgtttctgatttgggcaactctcttttaagacaagaagctttagttggcagctcttctacaaaaatcttcgacgaattgaaatttgtacaaaatggcccacacggttctcaacatcctatagattttcaacatgttgaccatcgtcatctcagctctaatgaacctcaagtaagaagccatcaatatggtccgcaacagcagccaccgcagcaattgcaatatcaccaaaatcagccccacgacggccataaccacgaacagcaccaaacagtacaaaaggatatgcaaacgcatgaatctttggaaataatgggaaacacattattggaagagttcaaagacattaaaatggtgaacggcgagttgaagtatgtgaagccagaagattga

SEQ ID NO: 4019 - DNA, 369 bp, Saccharomyces cerevisiae
atgactacgtttagattttgtcgtgactgcaacaatatgttgtaccctcgtgaggataaagaaaataaccggttgttatttgaatgcagaacatgctcgtatgtagaagaagcgggcagtccattggtctacaggcatgaattgattaccaacattggtgaaactgcgggagtggtgcaagatattggttccgatcccactcttccgagatctgatagagaatgtcccaaatgtcactctcgggaaaatgtgttttttcaatcacaacaaagaagaaaggatacttcgatggttttattctttgtgtgcttatcttgctcacacatatttacttcagatcaaaaaaacaaaaggacgcagttttcatga

SEQ ID NO: 4020 - DNA, 369 bp, Artificial Sequence
  Description of Artificial Sequence: Synthetic polynucleotide
atgactacgtttagattttgtcgtgactgcaacaatatgttgtaccctcgtgaggataaagaaaataacagattgttatttgaatgcagaacatgctcttatgtagaagaagcgggcagtccattggtctacaggcatgaattgattaccaacattggtgaaactgcgggagtggtgcaagatattggttccgatcccactcttccgagatctgatagagaatgtcccaaatgtcactctagagaaaatgtgttttttcaatctcaacaaagaagaaaggatacttctatggttttattctttgtgtgcttatcttgctcccacatatttacttctgatcaaaaaaacaaaaggacgcagtttagttga

SEQ ID NO: 4021 - DNA, 585 bp, Saccharomyces cerevisiae
atgtccttacgtatactagcgaagagatcttcttctatctggatgaaaacgcgcgttacaccagcgctaatttctcctattactatcacaacccgtttcaattctacgactacaacagcaccatcacataaggatgatgtaaggccagttgatcctaaaatttctaaaattgtacaggacatttcacaattgactcttttggaaacttccagtttaatcaacgagctgaaaaccgtattgaacattccagaaatttccatgcctatgggcggattcatggcaggcgctgcaggcgcaggtgctggtaatgtacctagctccactggtgaagctggtagtggtgctgaagaagaagctaagcctgaggcaaagaccgtgtttacggtgaagttggactcgttcgacacgaagactaaggctaaagtcatcaaggaagtcaagggattattggggctttcattagttgaagctaagaaattcgttgaagctgcaccaaaggtcttgaaagaaaatgtcgccaaggatgatgctgaaaagattaagaaaaccttggaagacttaggagctaaggtcagtttagaatga

SEQ ID NO: 4022 - DNA, 585 bp, Artificial Sequence
  Description of Artificial Sequence: Synthetic polynucleotide
atgtccttacgtatattggcgaagagatcttcttctatctggatgaaaacgcgcgttacaccagcgttaatttctcctattactatcacaacccgtttcaattctacgactacaacagcaccatctcataaggatgatgtaaggccagttgatcctaaaatttctaaaattgtacaggacatttctcaattgactcttttggaaacttccagtttaatcaacgagttgaaaaccgtattgaacattccagaaatttccatgcctatgggcggattcatggcaggcgctgcaggcgcaggtgctggtaatgtacctagctccactggtgaagctggtagtggtgctgaagaagaagctaagcctgaggcaaagaccgtgtttacggtgaagttggactctttcgacacgaagactaaggctaaagtcatcaaggaagtcaagggattattggggctttctttagttgaagctaagaaattcgttgaagctgcaccaaaggtcttgaaagaaaatgtcgccaaggatgatgctgaaaagattaagaaaaccttggaagacttaggagctaaggtcagtttagaatga

SEQ ID NO: 4023 - DNA, 1155 bp, Saccharomyces cerevisiae
atgtccactgctgtgactttttttggccagcatgtcttgaacagagtttcgttcttaagatgttcgaaagagttcatcaaaaaatcattgaaccatgactctaccgtttttatcccatttatcgaaggggaagccctcatttcgcccgaaaatggtgacctagttcagctttctaattctgtaaagtcttacaagaatattttgtcagcaatagttcctttatacactactttattgaacacaactcgctcaagaagcgatgaatcaggcatcaatgtaacatttttaggtctcctggaaggcacagattctgcatttaattttgaatggtctaatatttcttacaaaggaacaccatattttggattagatatccgtgttactgagagcacactcttcaagaaagtcgactttgagcctattttttcctatccgaaggtgaccagagatcacattttcaaacaaacaaatgaggatgcttcactttattcacaaggtaagatgtatctggattggctagcaaagtacaaattctgtcccggttgtgggtctccgttattcccagtagaggcaggaactaagcttcagtgttctaatgaaaatcggaatgtatactgtaatgtgagagatgcaagaattaataacgtttgcttcccaagaactgatccaacggtcattatagccttgaccaattcggattactctaagtgttgtctggcaagatcaaaaaaaaggtacggtgattttgtattgtattcaacaatagcaggttttatggagccatcagaaaccatagaggaggcttgtatcagagaaatatgggaggaaacaggcatttcatgcaaaaatattgatatagtccggtcacagccctggccttacccttgcagtttgatgattggctgtttaggcatagttcaattcaattccaaaaatgaggttatcaacctgaatcatgacgacgaattattggatgctcaatggtttgatacaactgaaatcattcaagctttggataagtacgccggcgggtatcgtgttccattcaaaaatgatatcaatttacctggaagtactaccattgccttccaattaatcaatcatgtttgcgagaactataaaaacttacgtaagacctcatcgagccatctatag

SEQ ID NO: 4024 - DNA, 1155 bp, Artificial Sequence
  Description of Artificial Sequence: Synthetic polynucleotide
atgtccactgctgtgactttttttggccagcatgtcttgaacagagtttctttcttaagatgttctaaagagttcatcaaaaaatctttgaaccatgactctaccgtttttatcccatttatcgaaggggaagccctcatttctcccgaaaatggtgacttggttcagctttctaattctgtaaagtcttacaagaatattttgagtgcaatagttcctttatacactactttattgaacacaactcgctccagaagcgatgaaagtggcatcaatgtaacatttttaggtctcttggaaggcacagattctgcatttaattttgaatggtctaatatttcttacaaaggaacaccatattttggattagatatccgtgttactgagagcacactcttcaagaaagtcgactttgagcctattttttcctatccgaaggtgaccagagatcacattttcaaacaaacaaatgaggatgcttctctttattctcaaggtaagatgtatttggattggttggcaaagtacaaattctgtcccggttgtgggtctccgttattcccagtagaggcaggaactaagcttcagtgttctaatgaaaatagaaatgtatactgtaatgtgagagatgcaagaattaataacgtttgcttcccaagaactgatccaacggtcattatagccttgaccaattctgattactctaagtgttgtttggcaagaagtaaaaaaaggtacggtgattttgtattgtattctacaatagcaggttttatggagccatctgaaaccatagaggaggcttgtatcagagaaatatgggaggaaacaggcatttcttgcaaaaatattgatatagtcagaagccagccctggccttacccttgcagtttgatgattggctgtttaggcatagttcaattcaattccaaaaatgaggttatcaacttgaatcatgacgacgaattattggatgctcaatggtttgatacaactgaaatcattcaagctttggataagtacgccggcgggtatcgtgttccattcaaaaatgatatcaatttacctggaagtactaccattgccttccaattaatcaatcatgtttgcgagaactataaaaacttacgtaagacctcttctagccatttgtga

SEQ ID NO: 4025 - DNA, 1974 bp, Saccharomyces cerevisiae
atgaggtcaggcgatgcagagattaaaggaattaagcccaaagttattgaggaatattctttatctcagggaagtggtccttccaacgattcatggaaaagtttaatgtcgtccgcgaaggacactcctttgcagtatgatcacatgaatcgcgaaagtctaaaaaaatacttcaatccgaatgcacaactcattgaagatcctttggataaaccgattcagtatagagtgtgcgaaaaatgtgggaaacccttagctttgacagcaattgtagaccacttagaaaaccattgtgcgggagcatctggaaaaagtagcacagatccaagagatgagagtactagggaaacgatacgaaatggagtagaatcaactgggagaaataataacgacgatgacaatagcaatgataataacaatgatgatgatgatgatgacgataacgacgacaacgaagatgatgatgacgctgatgatgacgacgataattccaatggtgccaattacaagaagaatgactcttcttttaaccctttgaaaagatccacatctatggaatctgcgaacacaccaaatatggacacgaaaagatcgaaaactgggactcctcaaaccttcagctcttccataaaaaaacaaaagaaagtcaaacaaagaaacccaactgaaaagcatttaattgatttcaacaaacagtgtggtgtagagttgccggaaggtggttactgtgcacgttcgctgacatgtaagtcccattcaatgggtgcaaagagggctgtctctggtcgttccaagccctacgacgtcttgctagcagattatcatagagaacatcaaacaaaaattggtgcagctgctgagaaacgtgctaagcaacaagaattacaaaaattacaaaagcagatacaaaaagagcagaaaaaacatactcagcaacagaaacaaggtcaaaggtctaagcaaagaaatgtgaatggtgggaaatcagccaaaaatggtggtaagagtactgtacacaatggtaacaatatcaatgagataggacacgttaacctaactcctgaagaggaaacaacacaggttctaaatggggtatcccgatctttcccactgccactagagtcaacggtactatcgtcagttagatacaggactaaatattttagaatgagggaaatgtttgcttcctccttttctgtgaaaccaggatatacatctccaggttacggtgcgatccattctcgtgtaggatgcttggatttggatagaacaacagattacaaatttcgtgttaggactccacagccaattaatcacctcacaaaccaaaacctcaatccgaaacaaatacaaagactacaacaacagagagctctacaggctcagcttctttctcaacaacagcaacagcagcaacagcagcagcaacatcactcaccccaagcgcaggcccaggccagtacccaacaacctactcaaggtatggtgcccaatcatttccccggcggggcaacgaattcatcatttaatgccaatgtgtcgagcaagcaaattcagcagcagcagcagcagcagcagcacaagtctcaagacacaggtctcacgccgctggagatacaatcacaacaacaaaaactacgacaacaacaactacaacaacagaagtttgaagctgctgcttcatatttagccaacgctaccaaattaatgcaagaatcaaatcaagatagccatttatctggcacccacaacaataatagtagtaaaaacggtaacaataacctcatgacgatgaaagcctccataagctctcccaatactagcgtaaatagtatccaatctccccctagtgtcaacagcgtcaatggctccgggcaaggtgtatctaccggtattaatgtctctggcaataacgggagaattgaagtaggtattggaaattctgtgaacccctacaatggcagaataaattaa

SEQ ID NO: 4026 - DNA, 1974 bp, Artificial Sequence
  Description of Artificial Sequence: Synthetic polynucleotide
atgaggagtggcgatgcagagattaaaggaattaagcccaaagttattgaggaatattctttatctcagggaagtggtccttccaacgattcttggaaaagtttaatgtcttccgcgaaggacactcctttgcagtatgatcacatgaatcgcgaaagtttgaaaaaatacttcaatccgaatgcacaactcattgaagatcctttggataaaccgattcagtatagagtgtgcgaaaaatgtgggaaacccttagctttgacagcaattgtagaccacttagaaaaccattgtgcgggagcatctggaaaaagtagcacagatccaagagatgagagtactagggaaacgataagaaatggagtagaatctactgggagaaataataacgacgatgacaatagcaatgataataacaatgatgatgatgatgatgacgataacgacgacaacgaagatgatgatgacgctgatgatgacgacgataattccaatggtgccaattacaagaagaatgactcttcttttaaccctttgaaaagatccacatctatggaatctgcgaacacaccaaatatggacacgaaaagaagtaaaactgggactcctcaaaccttcagctcttccataaaaaaacaaaagaaagtcaaacaaagaaacccaactgaaaagcatttaattgatttcaacaaacagtgtggtgtagagttgccggaaggtggttactgtgcacgttctttaacatgtaagtcccattctatgggtgcaaagagggctgtctctggtcgttccaagccctacgacgtcttgttggcagattatcatagagaacatcaaacaaaaattggtgcagctgctgagaaacgtgctaagcaacaagaattacaaaaattacaaaagcagatacaaaaagagcagaaaaaacatactcagcaacagaaacaaggtcaaaggtctaagcaaagaaatgtgaatggtgggaaaagtgccaaaaatggtggtaagagtactgtacacaatggtaacaatatcaatgagataggacacgttaacttgactcctgaagaggaaacaacacaggttttgaatggggtatccagatctttcccattaccattggagtctacggtattatcttctgttagatacaggactaaatattttagaatgagggaaatgtttgcttcctccttttctgtgaaaccaggatatacatctccaggttacggtgcgatccattctcgtgtaggatgcttggatttggatagaacaacagattacaaatttcgtgttaggactccacagccaattaatcacctcacaaaccaaaacctcaatccgaaacaaatacaaagattacaacaacagagagctttacaggctcagcttctttctcaacaacagcaacagcagcaacagcagcagcaacatcactccccccaagcgcaggcccaggccagtacccaacaacctactcaaggtatggtgcccaatcatttccccggcggggcaacgaattcttcttttaatgccaatgtgagtagcaagcaaattcagcagcagcagcagcagcagcagcacaagtctcaagacacaggtctcacgccgttagagatacaatctcaacaacaaaaacttagacaacaacaattacaacaacagaagtttgaagctgctgcttcttatttagccaacgctaccaaattaatgcaagaaagtaatcaagatagccatttatctggcacccacaacaataatagtagtaaaaacggtaacaataacctcatgacgatgaaagcctccataagctctcccaatactagcgtaaatagtatccaatctccccctagtgtcaacagcgtcaatggctccgggcaaggtgtatctaccggtattaatgtctctggcaataacgggagaattgaagtaggtattggaaattctgtgaacccctacaatggcagaataaattga

SEQ ID NO: 4027 - DNA, 1512 bp, Saccharomyces cerevisiae
atgattgaaaaggataaaagaacgattgcttttattcatccagacctaggtattgggggcgctgaaaggttagtcgtcgatgcagcattaggtctacagcaacaaggacatagtgtaatcatctatactagtcactgtgataaatcacattgtttcgaagaagttaaaaacggccaattaaaagtcgaagtttatggtgattttttaccgacaaactttttgggtcgtttttttattgttttcgcaacaattagacagctttatttagttattcaattgatcctacagaaaaaagtgaatgcgtaccaattaattatcattgatcaactgtctacatgtattccgcttctgcatatctttagttctgccactttgatgttttattgtcatttccccgaccaattattggctcaaagagctgggctattgaagaaaatatacagactaccatttgacttaatagaacagttttccgtgagtgctgccgatactgttgtggtaaattcaaatttcactaagaatacgttccaccaaacgttcaagtatttatccaatgatccagacgtcatttatccatgcgtggatttatcaacaatcgaaattgaagatattgacaagaaatttttcaaaacagtgtttaacgaaggcgatagattttacctaagtataaatcgttttgagaaaaaaaaggatgttgcgctggctataaaggcttttgcgttatctgaagatcaaatcaatgacaacgttaagttagttatttgcggtggttatgacgagagggttgcagaaaatgtggagtacttgaaggaactacagtctctggccgatgaatacgaattatcccatacaaccatatactaccaagaaataaagcgcgtctccgatttagagtcattcaaaaccaataatagtaaaattatatttttaacttccatttcatcatctctgaaagaattactgctcgaaagaaccgaaatgttattgtatacaccagcatatgagcactttggtattgttcctttagaagccatgaaattaggtaagcctgtactagcagtaaacaatggaggtcctttggagactatcaaatcttacgttgctggtgaaaatgaaagttctgccactgggtggctaaaacctgccgtccctattcaatgggctactgcaattgatgaaagcagaaagatcttgcagaacggttctgtgaactttgagaggaatggcccgctaagagtcaagaaatacttttctagggaagcaatgactcagtcatttgaagaaaacgtcgagaaagtcatatggaaagaaaaaaagtattatccttgggaaatattcggtatttcattctctaattttattttgcatatggcatttataaaaattctacccaataatccatggcccttcctatttatggccacttttatggtattatattttaagaactacttatggggaatttactgggcatttgtattcgctctctcctacccttatgaagaaatataa

SEQ ID NO: 4028 - DNA, 1512 bp, Artificial Sequence
  Description of Artificial Sequence: Synthetic polynucleotide
atgattgaaaaggataaaagaacgattgcttttattcatccagacttgggtattgggggcgctgaaaggttagtcgtcgatgcagcattaggtttacagcaacaaggacatagtgtaatcatctatactagtcactgtgataaatctcattgtttcgaagaagttaaaaacggccaattaaaagtcgaagtttatggtgattttttaccgacaaactttttgggtcgtttttttattgttttcgcaacaattagacagctttatttagttattcaattgatcttacagaaaaaagtgaatgcgtaccaattaattatcattgatcaattatctacatgtattccgcttttacatatctttagttctgccactttgatgttttattgtcatttccccgaccaattattggctcaaagagctgggttattgaagaaaatatacagattaccatttgacttaatagaacagttttccgtgagtgctgccgatactgttgtggtaaatagtaatttcactaagaatacgttccaccaaacgttcaagtatttatccaatgatccagacgtcatttatccatgcgtggatttatctacaatcgaaattgaagatattgacaagaaatttttcaaaacagtgtttaacgaaggcgatagattttacttgagtataaatcgttttgagaaaaaaaaggatgttgcgttagctataaaggcttttgcgttatctgaagatcaaatcaatgacaacgttaagttagttatttgcggtggttatgacgagagggttgcagaaaatgtggagtacttgaaggaattacagtctttggccgatgaatacgaattatcccatacaaccatatactaccaagaaataaagcgcgtctccgatttagagagtttcaaaaccaataatagtaaaattatatttttaacttccatttcttcttctttgaaagaattacttctcgaaagaaccgaaatgttattgtatacaccagcatatgagcactttggtattgttcctttagaagccatgaaattaggtaagcctgtattggcagtaaacaatggaggtcctttggagactatcaaatcttacgttgctggtgaaaatgaaagttctgccactgggtggttgaaacctgccgtccctattcaatgggctactgcaattgatgaaagcagaaagatcttgcagaacggttctgtgaactttgagaggaatggcccgttaagagtcaagaaatacttttctagggaagcaatgactcagtcttttgaagaaaacgtcgagaaagtcatatggaaagaaaaaaagtattatccttgggaaatattcggtatttctttctctaattttattttgcatatggcatttataaaaattttgcccaataatccatggcccttcttatttatggccacttttatggtattatattttaagaactacttatggggaatttactgggcatttgtattcgctctctcctacccttatgaagaaatatga

SEQ ID NO: 4029 - DNA, 1686 bp, Saccharomyces cerevisiae
atgtcgctttttttcaagccagtaatttcaccacagtggtctttccccgtgcttctcaagataggagtgcgttcttatgcgggaggcccaagaacaaagcataaaggaaactctccattagcttcagtgcctacaggcagtagtaataaaaaccgaaaacagaaggccaaaggcaaaaaaggtaacaaaaagaatgaccctgaccaagcattcaactttggagagtatggtggattgaaaaaagacgtcgagatgaatatggacagtacgaataaactcattcaaaaaatatcgaatttcgaccaattgcttatacttccacctgtcagagacgctgtgaaagaaatcatttccaaagagtccctgaagctacaagatagtaggaaaaaaaccagtgaaaatataataccgagtcccattcaaacagtggccattaagagaatatccaaaaatttaatggatccaaagttacaaatacatgcgattgccgctgagacaggttcaggtaagaccatggcctacttgatacctttaatagactatttgaaaagacaggagttggaaactcccgaattatgggaaacattaagaaaaaacgttctgattcggtccatcatactggtgcctacgcatgaattggttgaccaagtatacgaaactgtttccaagacgaaaaccttgttaggcttaaactctttcaagtgggacaaggccacatcatatcgtgatttattagagaacattaaaaatagaatagatattttagtcactactccgggaaaactactgaacctgttctccataagaatgataactagacctgataaagtcttgtccaaagtgggtttcgtagtactagatgaagctgacacacttctagataggtcatggcttgaagaaacgcactccgcaataaagagaattcctaacattaatcaccttattttctgttccgctactattcctcaagagtttaataaaacaatgcaaagactatttcctacagtggttcctataatgacacccagactgcataagttaccattcgctttggactttaaagttataaattctgccttaagtcctttcaagggatccaagatcaaagcattggcacaaactttatatgctatttcaaatgatgacacggaaccagggttcgagaaaagatgcattatctttgttaacgaaaaaaagaatgttcctgaaattgttaacctattgaataagaaattcggtcataatgccatcggtttaactggtgaagatacatttgaagaaagatccgagaaaattatgccctttttatcaccaccgcgaccactttcggaggtggttgctcagagtacttcacctcccacttccttgaagaaatttgaaattcctgattccaacatcgtcatcggcaaattgaaaaacacaaattctaatggtaccgcacccagtaacaagtctttgcatgtactcgtaaccaccgacctcatggcaagagggctcaatttcaaaggtgtacggaatgttgttctctacgatgtacccaaaacgtcaatagacctgatacaccgagtgggcagaactgctagaatgaaacagggcggccgcgtatttatgctaactgacagtaaaacaaaatcttgggctaaagctcttccaaagatcatcaaaaagcaccagagattatcatga

SEQ ID NO: 4030 - DNA, 1686 bp, Artificial Sequence
  Description of Artificial Sequence: Synthetic polynucleotide
atgtctctttttttcaagccagtaatttctccacagtggtctttccccgtgcttctcaagataggagtgcgttcttatgcgggaggcccaagaacaaagcataaaggaaactctccattagcttctgtgcctacaggcagtagtaataaaaacagaaaacagaaggccaaaggcaaaaaaggtaacaaaaagaatgaccctgaccaagcattcaactttggagagtatggtggattgaaaaaagacgtcgagatgaatatggacagtacgaataaactcattcaaaaaatatccaatttcgaccaattgcttatacttccacctgtcagagacgctgtgaaagaaatcatttccaaagagtccttgaagttacaagatagtaggaaaaaaaccagtgaaaatataataccgagtcccattcaaacagtggccattaagagaatatccaaaaatttaatggatccaaagttacaaatacatgcgattgccgctgagacaggttctggtaagaccatggcctacttgatacctttaatagactatttgaaaagacaggagttggaaactcccgaattatgggaaacattaagaaaaaacgttttgattagatccatcatattggtgcctacgcatgaattggttgaccaagtatacgaaactgtttccaagacgaaaaccttgttaggcttaaactctttcaagtgggacaaggccacatcttatcgtgatttattagagaacattaaaaatagaatagatattttagtcactactccgggaaaattattaaacttgttctccataagaatgataactagacctgataaagtcttgtccaaagtgggtttcgtagtattggatgaagctgacacacttttagataggagttggcttgaagaaacgcactccgcaataaagagaattcctaacattaatcaccttattttctgttccgctactattcctcaagagtttaataaaacaatgcaaagattatttcctacagtggttcctataatgacacccagattacataagttaccattcgctttggactttaaagttataaattctgccttaagtcctttcaagggatccaagatcaaagcattggcacaaactttatatgctatttctaatgatgacacggaaccagggttcgagaaaagatgcattatctttgttaacgaaaaaaagaatgttcctgaaattgttaaccttttgaataagaaattcggtcataatgccatcggtttaactggtgaagatacatttgaagaaagatccgagaaaattatgccctttttatctccaccgaggccactttctgaggtggttgctcagagtacttctcctcccacttccttgaagaaatttgaaattcctgattccaacatcgtcatcggcaaattgaaaaacacaaattctaatggtaccgcacccagtaacaagtctttgcatgtactcgtaaccaccgacctcatggcaagagggctcaatttcaaaggtgtaagaaatgttgttctctacgatgtacccaaaacgtctatagacttgatacacagagtgggcagaactgctagaatgaaacagggcggccgcgtatttatgttgactgacagtaaaacaaaatcttgggctaaagctcttccaaagatcatcaaaaagcaccagagattatcctga

SEQ ID NO: 4031 - DNA, 1113 bp, Saccharomyces cerevisiae
atgctcttaggttactgtggcagcggatactatggaatgcaatacaacccaccacacaagacgattgaaggtgagattctcaccaagctcttcgacgtaggagccatttccgaagaaaattcattggcaccgaagaaaaattcctttatggcagcggcaagaacagacaagggtgtacacgctatgttgaatctactgtcgctaaagatcacattgcgagaggacacagtagcgaagttaaacgccgcactaccgcccgaaatacgcgtgtggggtatccagcctgtcaataaaaagtttaatgctagatccgcgtgcgattctcgatggtaccaataccttatcccagaatttatactcattggtccaccccggagttctcttttgcatcgaaacgtggggggatgctaccgcgaagacggctcgcaagaggtgtgggatacgttcctggaacagacgcgtgggagatttagcggggatgagctgtgccgtttgcaggacactgcacagaaactaagcgagagcgatcctttggtacaagactacgtggggctattgagcggtacccttagcggctactgcttgtcgccctcgaagctggacgcgtttgaggcagccatgcaggagtacgtgggaacgcataattttcacaactttaccacaggaaagctttggggggatcctagtgctcagcgccatatcaaaaaggttgtagtgtcgcaggcctcaccgggatggatatgtgtgcggatccacgggcagtcgtttatgttgcatcagattcgacgaatggtagcgcttgccgtacttgcagcccgttgccaattgccgcctaatattgtacgtaactattttaacgccgggcctaggaaatacattccgagggcgcccgcacaaggcctattattagagggacctgtgtttgacgggtataacactaagttgcgcaatttgctgtattgcgaaatccgcccggacgatatcactcttgagcgcatgtgccgtttccgagaacgccagatctgtactgcgatcgcacacgaggagacacagcgtcacgtgttttgccattttgtacgacaaatgaaccgcctggccacgcctctaatctag

SEQ ID NO: 4032 - DNA, 1113 bp, Artificial Sequence
  Description of Artificial Sequence: Synthetic polynucleotide
atgctcttaggttactgtggcagcggatactatggaatgcaatacaacccaccacacaagacgattgaaggtgagattctcaccaagctcttcgacgtaggagccatttccgaagaaaattctttggcaccgaagaaaaattcctttatggcagcggcaagaacagacaagggtgtacacgctatgttgaatttattaagtttgaagatcacattgagagaggacacagtagcgaagttaaacgccgcattaccgcccgaaatacgcgtgtggggtatccagcctgtcaataaaaagtttaatgctagatccgcgtgcgattctcgttggtaccaataccttatcccagaatttatactcattggtccacccagaagttctcttttgcatagaaacgtggggggatgctaccgcgaagacggctctcaagaggtgtgggatacgttcttggaacagacgcgtgggagatttagcggggatgagctctgccgtttgcaggacactgcacagaaattaagcgagagcgatcctttggtacaagactacgtggggttattgagcggtacccttagcggctactgcttgagcccctccaagttggacgcgtttgaggcagccatgcaggagtacgtgggaacgcataattttcacaactttaccacaggaaagctttggggggatcctagtgctcagcgccatatcaaaaaggttgtagtgtcccaggcctctccgggatggatatgtgtgagaatccacgggcagtcttttatgttgcatcagattagaagaatggtagcgcttgccgtacttgcagcccgttgccaattgccgcctaatattgtacgtaactattttaacgccgggcctaggaaatacattccgagggcgcccgcacaaggcttattattagagggacctgtgtttgacgggtataacactaagttgcgcaatttgttatattgcgaaatccgcccggacgatatcactcttgagcgcatgtgccgtttcagagaacgccagatctgtactgcgatcgcacacgaggagacacagcgtcacgtgttttgccattttgtaaggcaaatgaaccgcttggccacgcctttgatctga

SEQ ID NO: 4033 - DNA, 3537 bp, Saccharomyces cerevisiae
atgtcgcaaagaaaattcgccggcttgagagataacttcaatctcttgggtgaaaagaacaaaatattggtggctaatagaggagaaattccaatcagaatttttcgtaccgctcatgaactgtctatgcagacggtagctatatattctcatgaagatcgtctttcaacgcacaaacaaaaggctgacgaagcatacgtcataggtgaagtaggccaatatacccccgtcggcgcttatttggccattgacgaaatcatttccattgcccaaaaacaccaggtagatttcatccatccaggttatgggttcttgtctgaaaattcggaatttgccgacaaagtagtgaaggccggtatcacttggattggccctccagctgaagttattgactccgtgggtgataaggtctcagctagaaacctggcagcaaaagctaatgtgcccaccgttcctggtacaccaggtcctatagaaactgtagaggaagcacttgacttcgtcaatgaatacggctacccggtgatcattaaggccgcctttggtggtggtggtagaggtatgagagtcgttagagaaggtgacgacgtggcagatgcctttcaacgtgctacctccgaagcccgtactgccttcggtaatggtacctgctttgtggaaagattcttggacaagccaaagcatattgaagttcaattgttggccgataaccacggaaacgtggttcatcttttcgaaagagactgttccgtgcagagaagacaccaaaaggttgtcgaagtggccccagcaaagactttaccccgtgaagtccgtgacgccattttgacagatgcagttaaattggccaaagagtgtggctacagaaatgcgggtactgctgaattcttggttgataaccaaaatagacactatttcattgaaattaatccaagaatccaagtggaacataccatcacagaagaaattaccggtatagatattgtggcggctcagatccaaattgcggcaggtgcctctctaccccagctgggcctattccaggacaaaattacgactcgtggctttgccattcagtgccgtattaccacggaagaccctgctaagaacttccaaccagataccggtagaatagaagtgtaccgttctgcaggtggtaatggtgttagactggatggtggtaacgcctatgcaggaacaataatctcacctcattacgactcaatgctggtcaaatgctcatgctccggttccacctacgaaatcgttcgtagaaaaatgattcgtgcattaatcgagttcagaattagaggtgtcaagaccaacattcccttcctattgactcttttgaccaatccagtatttattgagggtacatactggacgacttttattgacgacaccccacaactgttccaaatggtttcatcacaaaacagagcccaaaaacttttacattacctcgccgacgtggcagtcaatggttcatctatcaagggtcaaattggcttgccaaaattaaaatcaaatccaagtgtcccccatttgcacgatgctcagggcaatgtcatcaacgttacaaagtctgcaccaccatccggatggaggcaagtgctactagaaaaggggccagctgaatttgccagacaagttagacagttcaatggtactttattgatggacaccacctggagagacgctcatcaatctctacttgcaacaagagtcagaacccacgatttggctacaatcgctccaacaaccgcacatgcccttgcaggtcgtttcgccttagaatgttggggtggtgccacattcgatgttgcaatgagatttttgcatgaggatccatgggaacgtttgagaaaattaagatctctggtgcctaatattccattccaaatgttattgcgtggtgccaatggtgtggcttattcttcattgcctgacaatgctattgaccatttcgtcaagcaagccaaggataatggtgttgatatatttagagtctttgatgccttaaatgacttggaacaattgaaggtcggtgtagatgctgtgaagaaggcaggtggtgttgtagaagccactgtttgtttctctggggatatgcttcagccaggcaagaaatacaatttggattactacttggaaattgctgaaaaaattgtccaaatgggcactcatatcctgggtatcaaagatatggcaggtaccatgaagccagcagctgccaaactactgattggatctttgagggctaagtaccctgatctcccaatacatgttcacactcacgattctgcaggtactgctgttgcatcaatgactgcgtgtgctctggcgggcgccgatgtcgttgatgttgccatcaactcaatgtctggtttaacttcacaaccatcaatcaatgctctgttggcttcattagaaggtaatattgacactggtattaacgttgagcatgtccgtgaactagatgcatattgggcagagatgagattgttatactcttgtttcgaggctgacttgaagggcccagatccagaagtttatcaacatgaaatcccaggtggtcaattgacaaacttgttgtttcaagcccaacaattgggtcttggagaacaatgggccgaaacaaaaagagcttacagagaagccaattatttattgggtgatattgtcaaagttaccccaacttcgaaggtcgttggtgatctggcacaatttatggtctccaataaattaacttccgatgatgtgagacgcctggctaattctttggatttccctgactctgttatggatttcttcgaaggcttaatcggccaaccatatggtgggttcccagaaccatttagatcagacgttttaaggaacaagagaagaaagttgacttgtcgtccaggcctggaactagagccatttgatctcgaaaaaattagagaagacttgcagaatagatttggtgatgttgatgagtgcgacgttgcttcttataacatgtacccaagagtttatgaagacttccaaaagatgagagaaacgtatggtgatttatctgtattgccaacaagaagctttttgtctccactagagactgacgaagaaattgaagttgtaatcgaacaaggtaaaacgctaattatcaagctacaggctgtgggtgatttgaacaaaaagaccggtgaaagagaagtttactttgatttgaatggtgaaatgagaaaaattcgtgttgctgacagatcacaaaaagtggaaactgttactaaatccaaagcagacatgcatgatccattacacattggtgcaccaatggcaggtgtcattgttgaagttaaagttcataaaggatcactaataaagaagggccaacctgtagccgtattaagcgccatgaaaatggaaatgattatatcttctccatccgatggacaagttaaagaagtgtttgtctctgatggtgaaaatgtggactcttctgatttattagttctattagaagaccaagttcctgttgaaactaaggcatga

SEQ ID NO: 4034 - DNA, 3537 bp, Artificial Sequence
  Description of Artificial Sequence: Synthetic polynucleotide
atgtctcaaagaaaattcgccggcttgagagataacttcaatctcttgggtgaaaagaacaaaatattggtggctaatagaggagaaattccaatcagaatttttcgtaccgctcatgaattatctatgcagacggtagctatatattctcatgaagatcgtctttctacgcacaaacaaaaggctgacgaagcatacgtcataggtgaagtaggccaatatacccccgtcggcgcttatttggccattgacgaaatcatttccattgcccaaaaacaccaggtagatttcatccatccaggttatgggttcttgtctgaaaattctgaatttgccgacaaagtagtgaaggccggtatcacttggattggccctccagctgaagttattgactccgtgggtgataaggtctctgctagaaacttggcagcaaaagctaatgtgcccaccgttcctggtacaccaggtcctatagaaactgtagaggaagcacttgacttcgtcaatgaatacggctacccggtgatcattaaggccgcctttggtggtggtggtagaggtatgagagtcgttagagaaggtgacgacgtggcagatgcctttcaacgtgctacctccgaagcccgtactgccttcggtaatggtacctgctttgtggaaagattcttggacaagccaaagcatattgaagttcaattgttggccgataaccacggaaacgtggttcatcttttcgaaagagactgttccgtgcagagaagacaccaaaaggttgtcgaagtggccccagcaaagactttaccccgtgaagtccgtgacgccattttgacagatgcagttaaattggccaaagagtgtggctacagaaatgcgggtactgctgaattcttggttgataaccaaaatagacactatttcattgaaattaatccaagaatccaagtggaacataccatcacagaagaaattaccggtatagatattgtggcggctcagatccaaattgcggcaggtgcctctttaccccagttaggccttttccaggacaaaattacgactcgtggctttgccattcagtgccgtattaccacggaagaccctgctaagaacttccaaccagataccggtagaatagaagtgtaccgttctgcaggtggtaatggtgttagattagatggtggtaacgcctatgcaggaacaataatctctcctcattacgactccatgcttgtcaaatgctcttgctccggttccacctacgaaatcgttcgtagaaaaatgattcgtgcattaatcgagttcagaattagaggtgtcaagaccaacattcccttcttgttgactcttttgaccaatccagtatttattgagggtacatactggacgacttttattgacgacaccccacaattattccaaatggtttcttctcaaaacagagcccaaaaacttttacattacctcgccgacgtggcagtcaatggttcttctatcaagggtcaaattggcttgccaaaattaaaatctaatccaagtgtcccccatttgcacgatgctcagggcaatgtcatcaacgttacaaagtctgcaccaccatccggatggaggcaagtgcttttagaaaaggggccagctgaatttgccagacaagttagacagttcaatggtactttattgatggacaccacctggagagacgctcatcaatctttacttgcaacaagagtcagaacccacgatttggctacaatcgctccaacaaccgcacatgcccttgcaggtcgtttcgccttagaatgttggggtggtgccacattcgatgttgcaatgagatttttgcatgaggatccatgggaacgtttgagaaaattaagatctttggtgcctaatattccattccaaatgttattgcgtggtgccaatggtgtggcttattcttctttgcctgacaatgctattgaccatttcgtcaagcaagccaaggataatggtgttgatatatttagagtctttgatgccttaaatgacttggaacaattgaaggtcggtgtagatgctgtgaagaaggcaggtggtgttgtagaagccactgtttgtttctctggggatatgcttcagccaggcaagaaatacaatttggattactacttggaaattgctgaaaaaattgtccaaatgggcactcatatcttgggtatcaaagatatggcaggtaccatgaagccagcagctgccaaattattgattggatctttgagggctaagtaccctgatctcccaatacatgttcacactcacgattctgcaggtactgctgttgcatctatgactgcgtgtgctttggcgggcgccgatgtcgttgatgttgccatcaactccatgtctggtttaacttctcaaccatccatcaatgctttattggcttctttagaaggtaatattgacactggtattaacgttgagcatgtccgtgaattagatgcatattgggcagagatgagattgttatactcttgtttcgaggctgacttgaagggcccagatccagaagtttatcaacatgaaatcccaggtggtcaattgacaaacttgttgtttcaagcccaacaattgggtcttggagaacaatgggccgaaacaaaaagagcttacagagaagccaattatttattgggtgatattgtcaaagttaccccaacttctaaggtcgttggtgatttggcacaatttatggtctccaataaattaacttccgatgatgtgagacgcttagctaattctttggatttccctgactctgttatggatttcttcgaaggcttaatcggccaaccatatggtgggttcccagaaccatttagaagtgacgttttaaggaacaagagaagaaagttgacttgtcgtccaggccttgaattagagccatttgatctcgaaaaaattagagaagacttgcagaatagatttggtgatgttgatgagtgcgacgttgcttcttataacatgtacccaagagtttatgaagacttccaaaagatgagagaaacgtatggtgatttatctgtattgccaacaagaagctttttgtctccattggagactgacgaagaaattgaagttgtaatcgaacaaggtaaaacgttgattatcaagttacaggctgtgggtgatttgaacaaaaagaccggtgaaagagaagtttactttgatttgaatggtgaaatgagaaaaattcgtgttgctgacagatctcaaaaagtggaaactgttactaaatccaaagcagacatgcatgatccattacacattggtgcaccaatggcaggtgtcattgttgaagttaaagttcataaaggatctttgataaagaagggccaacctgtagccgtattaagcgccatgaaaatggaaatgattatatcttctccatccgatggacaagttaaagaagtgtttgtctctgatggtgaaaatgtggactcttctgatttattagttttattagaagaccaagttcctgttgaaactaaggcatga

SEQ ID NO: 4035 - DNA, 744 bp, Saccharomyces cerevisiae
atgagtgagcaaagccaattagatgattcgactatagacaaactgattccacagattttcaatgagatgagatctaacctcaataacacgaccaataaatttccaaaaagcacaggaggtggagcaagcgataatatttcggctaacagcaattctataagatcgtttaattcaatcacaacgcaatccttactcaaagaatcagaatcgttagataaaataacagcaatgataaaaaatgttacggccgcattaaaaaataacttgccagtatacgttaatcaagtacatgaggtatgtaaatctacgaattccattttagattcatggatcaacattcattctcaagctggttatattcataaattgatgagcgatcaaacctatttaaagctaattaatgatagactgcacaatgaaaatgtaaacacaaatgatgaagatgggagtactttacacaacgtgatagcgttgaaaaagaaggagatcttggatttgagacaaaaattagaaaataggaagggtgaaaaggatgctgcaccagcaaagccaccaaatcaaggcttaaatccaaggtacggtgtgcaatctggtagaaggcccgttccttcggcaggaatttcaaataacggaagagtaagaaagacccatgttcctgcctcgaaaagacctagtggtataccaagagtaactaacaggtggactaagcccactgctagcagctcaaggaagatgtttcgctaa

SEQ ID NO: 4036 - DNA, 744 bp, Artificial Sequence
  Description of Artificial Sequence: Synthetic polynucleotide
atgagtgagcaaagccaattagatgattctactatagacaaattgattccacagattttcaatgagatgagatctaacctcaataacacgaccaataaatttccaaaaagcacaggaggtggagcaagcgataatatttctgctaacagcaattctataagatcttttaattccatcacaacgcaatccttactcaaagaaagtgaatctttagataaaataacagcaatgataaaaaatgttacggccgcattaaaaaataacttgccagtatacgttaatcaagtacatgaggtatgtaaatctacgaattccattttagattcttggatcaacattcattctcaagctggttatattcataaattgatgagcgatcaaacctatttaaagttgattaatgatagattgcacaatgaaaatgtaaacacaaatgatgaagatgggagtactttacacaacgtgatagcgttgaaaaagaaggagatcttggatttgagacaaaaattagaaaataggaagggtgaaaaggatgctgcaccagcaaagccaccaaatcaaggcttaaatccaaggtacggtgtgcaatctggtagaaggcccgttccttctgcaggaatttctaataacggaagagtaagaaagacccatgttcctgcctccaaaagacctagtggtataccaagagtaactaacaggtggactaagcccactgctagcagcagtaggaagatgtttcgctga

SEQ ID NO: 4037 - DNA, 1926 bp, Saccharomyces cerevisiae
atgtacaacgagcaggtgaactctggaaagtctataaaagaaaaggaacgttatttggatgccctattgaaaatacttaaggataatccagttaccttaaaggaaattggctgggatctgccaaagggtttattgcagtttttctcacgcaaaaacatcaatgtcaatatacatctagtttttagtccccttgtttctagtgtgatggaatgcttcaatgagctagccatcaatggaaatccgaaagaatgcttgttgaccgcttgcgaattggtgtcaacactccatatagtcttaactgaaactggcgactccgatgaagagaatgaagatttaaatgactccaatagaaatgatgcgtcaaacattactgatgagctgtcagttatcactccggagattgggcactatatggccaaaaatacagtagaattcattccaaatttgaaaatttacgttctctttgaatttatgagtttattgttgaaacgtgtggacactttatatccatctaaatttctagccatggtaacttctgcaattattaagtatgtaacaaccaacgttcaggctatggatgatccacactttattttgcgcatagtgtacaatttttgtactaattactctccagctcaaccatctgctagtctgaccgatggtattagtacaaacgatcttgaaaaaattcatgatgatgaatctgccttacagaaaaaactactggctaatctgagcgtattcgtgattagcaactgcctaaaaaatcatccaggtaatattgacaagatatatttcaaaacattgatgcataaaaaaacagatgaaaatgaaatcgatgcttcagttttacagatatgccaccaatactacgagtatgtcacatcattggatgtccacatgaaagaacttttagaaaagtgcctggtagaatcaagaagcatctataactctcttctcatgaacccggccgcttccacgcccgaattcaaagaagaaattaaccaactagtatatgaggtatcttacgcatatcaaatcaagaaactagctgacgaaaagaacttagagctggaccaatatggagttgtgattctatctgcaatacattattctaaaaatggtactcacttattgccgcaaattgatatccaaagcgcaatttacctctatctacggtgtacgacagcttctttattttcagaaatatacgaaaataagtttttggaaagttcagtacgctactggctatgggtatccacaaccgagacttccacagagaaaataaagtgtgccttacaagaacttccagggcacattaccacggcctttttgcagatgttactgatgaaaacttgcaatgaatctaataacgacactaagttgaccgaaattactcttctgaggaggttactctatctcatgcccgaaagcacatcttttacgttcatctttgaaactctactacattgtccatatataactgcaaagattgctgttcttgacattctaagagatatgatgattagatctcctgaggctgctaatcgtgacgaaactgtcggtttaatcgaacaacagaatcctgggaataccgctaatagtgtaccgataatgccaactctacctccaagaccttacatcactattaatgaagatcgcatggcttccattcatagcattgctttaatatgtttttctgccgccaagcaaaagaaaagaacgcaaggtgatttactcttggtactaacatatatgaaattttttgttagtttaaggaacaaatgggatttgggtctgttaacactcatcaataaagaaatctccgaatcatttcaaggagaaggtgagcctgaattagcattcatcaacatttccaataatactctgggagaatatatagaagagatgaacatacgctcgtaa

SEQ ID NO: 4038 - DNA, 1926 bp, Artificial Sequence
  Description of Artificial Sequence: Synthetic polynucleotide
atgtacaacgagcaggtgaactctggaaagtctataaaagaaaaggaacgttatttggatgccttattgaaaatacttaaggataatccagttaccttaaaggaaattggctgggatttaccaaagggtttattgcagtttttcagtcgcaaaaacatcaatgtcaatatacatttggtttttagtccccttgtttctagtgtgatggaatgcttcaatgagttggccatcaatggaaatccgaaagaatgcttgttgaccgcttgcgaattggtgtctacactccatatagtcttaactgaaactggcgactccgatgaagagaatgaagatttaaatgactccaatagaaatgatgcgtccaacattactgatgagttaagtgttatcactccggagattgggcactatatggccaaaaatacagtagaattcattccaaatttgaaaatttacgttctctttgaatttatgagtttattgttgaaacgtgtggacactttatatccatctaaatttttggccatggtaacttctgcaattattaagtatgtaacaaccaacgttcaggctatggatgatccacactttattttgcgcatagtgtacaatttttgtactaattactctccagctcaaccatctgctagtttaaccgatggtattagtacaaacgatcttgaaaaaattcatgatgatgaatctgccttacagaaaaaattattagctaatttgagcgtattcgtgattagcaactgcttgaaaaatcatccaggtaatattgacaagatatatttcaaaacattgatgcataaaaaaacagatgaaaatgaaatcgatgcttctgttttacagatatgccaccaatactacgagtatgtcacatctttggatgtccacatgaaagaacttttagaaaagtgcttagtagaatctagaagcatctataactctcttctcatgaacccggccgcttccacgcccgaattcaaagaagaaattaaccaattggtatatgaggtatcttacgcatatcaaatcaagaaattggctgacgaaaagaacttagagttggaccaatatggagttgtgattttatctgcaatacattattctaaaaatggtactcacttattgccgcaaattgatatccaaagcgcaatttacctctatcttcgctgtacgacagcttctttattttctgaaatatacgaaaataagtttttggaaagttctgtacgctactggttatgggtatccacaaccgagacttccacagagaaaataaagtgtgccttacaagaacttccagggcacattaccacggcctttttgcagatgttattgatgaaaacttgcaatgaatctaataacgacactaagttgaccgaaattactcttttgaggaggttactctatctcatgcccgaaagcacatcttttacgttcatctttgaaactttattacattgtccatatataactgcaaagattgctgttcttgacattttaagagatatgatgattagatctcctgaggctgctaatcgtgacgaaactgtcggtttaatcgaacaacagaatcctgggaataccgctaatagtgtaccgataatgccaactttacctccaagaccttacatcactattaatgaagatcgcatggcttccattcatagcattgctttaatatgtttttctgccgccaagcaaaagaaaagaacgcaaggtgatttactcttggtattaacatatatgaaattttttgttagtttaaggaacaaatgggatttgggtttattaacactcatcaataaagaaatctccgaaagttttcaaggagaaggtgagcctgaattagcattcatcaacatttccaataatactttgggagaatatatagaagagatgaacatacgctcttga

SEQ ID NO: 4039 - DNA, 1476 bp, Saccharomyces cerevisiae
atgtctaagtatcaaattaattgcataagataccggcactttctcaggacatctaatatctcgcagatccctgatttcacgaaatactgcattggtcccgtaaatgaagaattggcaccttacatcatggaaaccatgaaggcatacccttcaaattccgaatatatcaatccgcagcattactatcataatagaacggtattagtagaaaattacttaaaacgaagtccaaatccagtatcattaacgcagttagcgcaatattatgacgattctaccaagctgaccagaaccaagatcatcaattccgggaaatttgtaaaagaagaactggtaattaggatcgcgcataaattaaatcaattgcaacaacttccatttaatgttgtgaacaacttccattttgttcaagtttatgagtcatattacaatatttttgaaagctttagaaaatatccgactataagaactttagaggacgcttctcaatttgcagattttatcaaaaatatgctagaaggcttcaatactctaaacttaccacatttgataatgggggctttagaatgtacaattttggatctttatcctcgtgaaaaaatggaccaactactatctgatctgttaagagctcgaatatcaagaagattgattgtagaggaacacgtcagtatcacagccaactacactagtggtaaggaggaaaataccttggtattgggtgatatttttcaagaatgtagcgctaaaaaatatttattggaagccagtgaggaatctcaaaaatttatccaagatatgtactttaaagacattcccatgccagaatttattatcgaaggtgacactcaactaagcttttactttttgcctacacatttgaagtatttgttaggggagatccttcgaaatacttacgaagcaaccatgaaacactatattcgtaagggattagaaaagccggaaccaatcatagtaactgtagtaagtaacgatgaatcctatttgtttagaatttcagataaagctgggggcgtcctccatgatgatgaaaatctatggtcattcggtaaatcgaaagaaagggctcaagaatccctaaataattttcacaagttacctggtttacaaacagtatctatttatgacgaagtacattcccatactaaatataactccaaactgaagtcattgcagtcaataacattaaaaccgtacatgcacacgtcgctagaaccaatgagttatcctagcatcataaatgggcacatcaaatatgaaactcccctaattgaattgttaaagcggtcttttagatacaagcttgggattgggttagccatgtgtaaagtgtatgctgaatattggaacggcgacctttcattgcattcaatgcctggatatggtaccgatgttgtattaaaattaggcaacttgatgaagcatacgaagaaactacaattagataaagtgtga

SEQ ID NO: 4040 - DNA, 1476 bp, Artificial Sequence
  Description of Artificial Sequence: Synthetic polynucleotide
atgtctaagtatcaaattaattgcataagatacagacactttctcaggacatctaatatctctcagatccctgatttcacgaaatactgcattggtcccgtaaatgaagaattggcaccttacatcatggaaaccatgaaggcatacccttccaattccgaatatatcaatccgcagcattactatcataatagaacggtattagtagaaaattacttaaaaagaagtccaaatccagtatctttaacgcagttagcgcaatattatgacgattctaccaagttgaccagaaccaagatcatcaattccgggaaatttgtaaaagaagaattggtaattaggatcgcgcataaattaaatcaattgcaacaacttccatttaatgttgtgaacaacttccattttgttcaagtttatgagtcttattacaatatttttgaaagctttagaaaatatccgactataagaactttagaggacgcttctcaatttgcagattttatcaaaaatatgttggaaggcttcaatactttgaacttaccacatttgataatgggggctttagaatgtacaattttggatctttatcctcgtgaaaaaatggaccaattattatctgatttattaagagctagaatatctagaagattgattgtagaggaacacgtcagtatcacagccaactacactagtggtaaggaggaaaataccttggtattgggtgatatttttcaagaatgtagcgctaaaaaatatttattggaagccagtgaggaatctcaaaaatttatccaagatatgtactttaaagacattcccatgccagaatttattatcgaaggtgacactcaattgagcttttactttttgcctacacatttgaagtatttgttaggggagatccttagaaatacttacgaagcaaccatgaaacactatattcgtaagggattagaaaagccggaaccaatcatagtaactgtagtaagtaacgatgaatcctatttgtttagaatttctgataaagctgggggcgtcctccatgatgatgaaaatttatggagtttcggtaaatctaaagaaagggctcaagaatccttgaataattttcacaagttacctggtttacaaacagtatctatttatgacgaagtacattcccatactaaatataactccaaattgaagtctttgcagagtataacattaaaaccgtacatgcacacgtctttggaaccaatgagttatcctagcatcataaatgggcacatcaaatatgaaactcccttaattgaattgttaaagagatcttttagatacaagcttgggattgggttagccatgtgtaaagtgtatgctgaatattggaacggcgacctttctttgcattctatgcctggatatggtaccgatgttgtattaaaattaggcaacttgatgaagcatacgaagaaattacaattagataaagtgtga

SEQ ID NO: 4041 - DNA, 519 bp, Saccharomyces cerevisiae
atgtccacaccagctagaagaaggttgatgagagattttaaacgtatgaaggaagatgccccaccgggtgtatctgcttcaccattacctgataacgtcatggtatggaacgccatgattatcgggccagccgatactccatatgaagacggaacttttaggttattgttggagtttgatgaagaatatcccaataagccaccgcatgtcaaatttttgagtgaaatgtttcatcccaatgtctatgcaaatggtgaaatttgtttggatattttgcagaacagatggactccaacatatgatgtcgcatccatattgacatccattcaaagtttattcaacgatccaaatccagcttcgccagcaaacgttgaagctgcaacattattcaaagatcataaatcacagtacgtcaaaagagttaaggagacggtagagaaatcttgggaggatgatatggacgatatggacgatgatgatgatgatgatgacgacgacgacgacgacgaagcagactga

SEQ ID NO: 4042 - DNA, 519 bp, Artificial Sequence
  Description of Artificial Sequence: Synthetic polynucleotide
atgtccacaccagctagaagaaggttgatgagagattttaaacgtatgaaggaagatgccccaccgggtgtatctgcttctccattacctgataacgtcatggtatggaacgccatgattatcgggccagccgatactccatatgaagacggaacttttaggttattgttggagtttgatgaagaatatcccaataagccaccgcatgtcaaatttttgagtgaaatgtttcatcccaatgtctatgcaaatggtgaaatttgtttggatattttgcagaacagatggactccaacatatgatgtcgcatccatattgacatccattcaaagtttattcaacgatccaaatccagcttctccagcaaacgttgaagctgcaacattattcaaagatcataaatctcagtacgtcaaaagagttaaggagacggtagagaaatcttgggaggatgatatggacgatatggacgatgatgatgatgatgatgacgacgacgacgacgacgaagcagactga

SEQ ID NO: 4043 - DNA, 864 bp, Saccharomyces cerevisiae
atggtactgtcaaatgttaaaatcttcagattaaaatcgcatagagccttcagaatcggtcccatgattaaagcagtcgcaggaaatcttttggtaaagagattttatcaaccaaaattagaaagaattccaccggcttcactgcttttgaagcagaaaatacggttagctcaaaatggcagtactacatctacagaaaaccccatttccttctcacagaccatgtccgagatatttagcgtcttgcagccaagtgcaccagatctagatgaagacgaaacaagtggtttgaaacgcgatcatttattaactgagcgtctaaacaacggcgagcttggtgtcattatgaacaaattcttcaatccgtcttcgacacataacaatcagttgatagatacgaatatattacttcagaattttcctaagttaagtggtaatgacttagatttattggattttgccataaatgagaaaatgcgaggaaactggaatgatctaaagcaagatttcattcagttgtggtactacaagtcatttggctttcttggacctcgaactcaatttgtcctgacaaactcttctccgtcagttaggtcccaattcttgaaacttccattcatcgaatataattggtttctcctacaaaataacaaaaacgcaaatatactacctgctgatgtgcaaaacgtggtcaaggtgtttcatcttgatgataaaaggtttacttggaagagcatagatccattcagcaaagctataatttcattcgtcgtttttgtttccatatatgtgtggttggatgaaagtgcaaaacaaaaaacgaaggagctgcccgcacagaagagtactgtaatatcagaataa

SEQ ID NO: 4044 - DNA, 864 bp, Artificial Sequence
  Description of Artificial Sequence: Synthetic polynucleotide
atggtattatccaatgttaaaatcttcagattaaaatctcatagagccttcagaatcggtcccatgattaaagcagtcgcaggaaatcttttggtaaagagattttatcaaccaaaattagaaagaattccaccggcttctttacttttgaagcagaaaataagattagctcaaaatggcagtactacatctacagaaaaccccatttccttctctcagaccatgtccgagatatttagcgtcttgcagccaagtgcaccagatttggatgaagacgaaacaagtggtttgaaacgcgatcatttattaactgagcgtttgaacaacggcgagcttggtgtcattatgaacaaattcttcaatccgtcttctacacataacaatcagttgatagatacgaatatattacttcagaattttcctaagttaagtggtaatgacttagatttattggattttgccataaatgagaaaatgagaggaaactggaatgatttgaagcaagatttcattcagttgtggtactacaagagctttggctttcttggacctcgtactcaatttgtcttaacaaactcttctccgtctgttaggtcccaattcttgaaacttccattcatcgaatataattggtttctcttacaaaataacaaaaacgcaaatatattacctgctgatgtgcaaaacgtggtcaaggtgtttcatcttgatgataaaaggtttacttggaagagcatagatccattcagcaaagctataatttctttcgtcgtttttgtttccatatatgtgtggttggatgaaagtgcaaaacaaaaaacgaaggagttgcccgcacagaagagtactgtaatatctgaatga

SEQ ID NO: 4045 - DNA, 1584 bp, Saccharomyces cerevisiae
atgcctcaaaatacaagacacacgtccatcgtagaaatgctttctaccccacctcaattaccgaattccacagatttaaatagtttgagcgaacagacagacaagaacactgaagcaaacaaaagcgacacagaatcactacataaatctatttcgaaatcgtcatcttcatcttctctctccacgctggataacacggaatactcaaacaataatggcaactccttgtccaccttgaattcacagaatctgttatctgttcataggcaggagtggcaacacactcctctgtcaaatttggtggaacagaacaaattgattttcatcagaggttctatttccgtagaggaagcattcaacacgctggtcaagcaccagctaacgtctttgcctgtggagaattttccgggagacatgaattgtttaacattcgactataatgatctcaatgcgtaccttcttcttgtattaaacaggatcaaggtgagcaacgacaagataacctcagactgccagaatggtaagtccgtgcccgtgggcgagatagtaaagttgacacctaagaatccattctacaaattgcccgaaacggaaaacttatcgacggtaataggcatactaggctcaggtgtgcatcgtgttgccatcacgaacgtggaaatgacacagattaaaggtatactttcccaacgtcgattgattaagtatctgtgggagaatgcgagatcatttcccaacttgaagcctctcttggactcttccctggaggagctgaatattggtgtactaaatgcagcccgtgataaacctacattcaagcagtcacgtgtcatatccatccaaggtgacgagcatctaattatggctctgcataaaatgtatgtcgaaagaatctcttccattgcggtagttgacccgcagggaaacttgattggtaatatttcagtaacagacgtcaaacacgtcaccagaacttcacaatatcctttattacacaatacatgtcgtcattttgtctcggttattttgaatttaaggggcctagagaccggtaaggactcatttcctattttccatgtgtatccaacaagttccctggcaagaacgtttgccaaattggtcgctaccaaatctcacagattatggatagtacaaccaaatgacaatcaaccaacagcatcttccgaaaaatcctcatctccatcaccaagtactccacccgtaacgacattgccatcgcttgcgtcgtcataccattcgaacacgcaatcttccaggatggccaactctcctgttctaaaatcttcagatacatcaaacaataaaataaatgtaaatataaatttgagtggtccctcaccttctcaaccacagtctccatcggccacaatgccaccacctcaaagtccaagtaattgtcccgcatctccaactccagcacatttcgaaaaggagtatagaacaggtaaattgataggtgttgtgtcattgactgacatattaagtgttttggcaagaaaacaaacgcatcataaggaaattgatccgcagatggcaagaaagcaaagagggcatataggctga

SEQ ID NO: 4046 - DNA, 1584 bp, Artificial Sequence
  Description of Artificial Sequence: Synthetic polynucleotide
atgcctcaaaatacaagacacacgtccatcgtagaaatgctttctaccccacctcaattaccgaattccacagatttaaatagtttgagcgaacagacagacaagaacactgaagcaaacaaaagcgacacagaatctttgcataaatctatttccaaatcttcttcttcttcttctctctccacgttagataacacggaatactctaacaataatggcaactccttgtccaccttgaattctcagaatttattatctgttcataggcaggagtggcaacacactcctttatccaatttggtggaacagaacaaattgattttcatcagaggttctatttccgtagaggaagcattcaacacgttagtcaagcaccagttaacgtctttgcctgtggagaattttccgggagacatgaattgtttaacattcgactataatgatctcaatgcgtaccttcttcttgtattaaacaggatcaaggtgagcaacgacaagataaccagtgactgccagaatggtaagtccgtgcccgtgggcgagatagtaaagttgacacctaagaatccattctacaaattgcccgaaacggaaaacttatctacggtaataggcatattgggcagtggtgtgcatcgtgttgccatcacgaacgtggaaatgacacagattaaaggtatactttcccaacgtcgtttgattaagtatttatgggagaatgcgagatcttttcccaacttgaagcctctcttggactcttccttggaggagttgaatattggtgtattgaatgcagcccgtgataaacctacattcaagcagtctcgtgtcatatccatccaaggtgacgagcatttgattatggctttacataaaatgtatgtcgaaagaatctcttccattgcggtagttgacccgcagggaaacttgattggtaatattagtgtaacagacgtcaaacacgtcaccagaacttctcaatatcctttattacacaatacatgtcgtcattttgtctctgttattttgaatttaaggggcttagagaccggtaaggactcttttcctattttccatgtgtatccaacaagttccttggcaagaacgtttgccaaattggtcgctaccaaatctcacagattatggatagtacaaccaaatgacaatcaaccaacagcatcttccgaaaaatcctcttctccatctccaagtactccacccgtaacgacattgccaagtcttgcgagtagttaccattccaacacgcaatcttccaggatggccaactctcctgttttgaaatcttctgatacaagtaacaataaaataaatgtaaatataaatttgagtggtccctctccttctcaaccacagtctccatctgccacaatgccaccacctcaaagtccaagtaattgtcccgcatctccaactccagcacatttcgaaaaggagtatagaacaggtaaattgataggtgttgtgtctttgactgacatattaagtgttttggcaagaaaacaaacgcatcataaggaaattgatccgcagatggcaagaaagcaaagagggcatataggctga

SEQ ID NO: 4047 - DNA, 1533 bp, Saccharomyces cerevisiae
atgccaacttctggaactactattgaattgattgacgaccaatttccaaaggatgactctgccagcagtggcattgtcgacgaagtcgacttaacggaagctaatattttggctactggtttgaataagaaagcaccaagaattgtcaacggttttggttctttaatgggctccaaggaaatggtttccgtggaattcgacaagaagggaaacgaaaagaagtccaatttggatcgtctgctagaaaaggacaaccaagaaaaagaagaagctaaaactaaaattcacatctccgaacaaccatggactttgaataactggcaccaacatttgaactggttgaacatggttcttgtttgtggtatgccaatgattggttggtactttgctctctctggtaaagtgcctttgcatttaaacgttttccttttctccgttttctactacgctgtcggtggtgtttctattactgccggttaccatagattatggtctcacagatcttactccgctcactggccattgagattattctacgctatcttcggttgtgcttccgttgaagggtccgctaaatggtggggccactctcacagaattcaccatcgttacactgataccttgagagatccttatgacgctcgtagaggtctatggtactcccacatgggatggatgcttttgaagccaaatccaaaatacaaggctagagctgatattaccgatatgactgatgattggaccattagattccaacacagacactacatcttgttgatgttgttaaccgctttcgtcattccaactcttatctgtggttactttttcaacgactatatgggtggtttgatctatgccggttttattcgtgtctttgtcattcaacaagctaccttttgcattaactccttggctcattacatcggtacccaaccattcgatgacagaagaacccctcgtgacaactggattactgccattgttactttcggtgaaggttaccataacttccaccacgaattcccaactgattacagaaacgctattaagtggtaccaatacgacccaactaaggttatcatctatttgacttctttagttggtctagcatacgacttgaagaaattctctcaaaatgctattgaagaagccttgattcaacaagaacaaaagaagatcaataaaaagaaggctaagattaactggggtccagttttgactgatttgccaatgtgggacaaacaaaccttcttggctaagtctaaggaaaacaagggtttggttatcatttctggtattgttcacgacgtatctggttatatctctgaacatccaggtggtgaaactttaattaaaactgcattaggtaaggacgctaccaaggctttcagtggtggtgtctaccgtcactcaaatgccgctcaaaatgtcttggctgatatgagagtggctgttatcaaggaaagtaagaactctgctattagaatggctagtaagagaggtgaaatctacgaaactggtaagttcttttaa

SEQ ID NO: 4048 - DNA, 1533 bp, Artificial Sequence
  Description of Artificial Sequence: Synthetic polynucleotide
atgccaacttctggaactactattgaattgattgacgaccaatttccaaaggatgactctgccagcagtggcattgtcgacgaagtcgacttaacggaagctaatattttggctactggtttgaataagaaagcaccaagaattgtcaacggttttggttctttaatgggctccaaggaaatggtttccgtggaattcgacaagaagggaaacgaaaagaagtccaatttggatcgtttgttggaaaaggacaaccaagaaaaagaagaagctaaaactaaaattcacatctccgaacaaccatggactttgaataactggcaccaacatttgaactggttgaacatggttcttgtttgtggtatgccaatgattggttggtactttgctctctctggtaaagtgcctttgcatttaaacgttttccttttctccgttttctactacgctgtcggtggtgtttctattactgccggttaccatagattatggtctcacagatcttactccgctcactggccattgagattattctacgctatcttcggttgtgcttccgttgaagggtccgctaaatggtggggccactctcacagaattcaccatcgttacactgataccttgagagatccttatgacgctcgtagaggtttatggtactcccacatgggatggatgcttttgaagccaaatccaaaatacaaggctagagctgatattaccgatatgactgatgattggaccattagattccaacacagacactacatcttgttgatgttgttaaccgctttcgtcattccaactcttatctgtggttactttttcaacgactatatgggtggtttgatctatgccggttttattcgtgtctttgtcattcaacaagctaccttttgcattaactccttggctcattacatcggtacccaaccattcgatgacagaagaacccctcgtgacaactggattactgccattgttactttcggtgaaggttaccataacttccaccacgaattcccaactgattacagaaacgctattaagtggtaccaatacgacccaactaaggttatcatctatttgacttctttagttggtttggcatacgacttgaagaaattctctcaaaatgctattgaagaagccttgattcaacaagaacaaaagaagatcaataaaaagaaggctaagattaactggggtccagttttgactgatttgccaatgtgggacaaacaaaccttcttggctaagtctaaggaaaacaagggtttggttatcatttctggtattgttcacgacgtatctggttatatctctgaacatccaggtggtgaaactttaattaaaactgcattaggtaaggacgctaccaaggctttcagtggtggtgtctaccgtcactctaatgccgctcaaaatgtcttggctgatatgagagtggctgttatcaaggaaagtaagaactctgctattagaatggctagtaagagaggtgaaatctacgaaactggtaagttcttttga

SEQ ID NO: 4049 - DNA, 417 bp, Saccharomyces cerevisiae
atgggtgcttggttatttatccttgctgttgttgtcaactgtatcaatttgtttggccaagtgcatttcacaatactatacgctgatttagaagctgactatatcaatccaattgaattatgttctaaagttaacaagttaattacccctgaagccgccttgcatggtgctttgtcattactattcttactgaacggttactggtttgtatttttattgaacttaccagttctagcttacaatctaaacaagatctacaataaagttcaacttttggatgctaccgaaatattcagaactttaggcaaacataaaagggagagtttcctaaagttaggtttccacttattgatgttcttcttctacttgtacagaatgatcatggctttgattgctgaaagtggtgatgacttctaa

SEQ ID NO: 4050 - DNA, 417 bp, Artificial Sequence
  Description of Artificial Sequence: Synthetic polynucleotide
atgggtgcttggttatttatccttgctgttgttgtcaactgtatcaatttgtttggccaagtgcatttcacaatattatacgctgatttagaagctgactatatcaatccaattgaattatgttctaaagttaacaagttaattacccctgaagccgccttgcatggtgctttgtctttattattcttattaaacggttactggtttgtatttttattgaacttaccagttttggcttacaatttgaacaagatctacaataaagttcaacttttggatgctaccgaaatattcagaactttaggcaaacataaaagggagagtttcttgaagttaggtttccacttattgatgttcttcttctacttgtacagaatgatcatggctttgattgctgaaagtggtgatgacttctga

SEQ ID NO: 4051 - DNA, 714 bp, Saccharomyces cerevisiae
atgcaaaccccttcagaaaataccaacgccaagtcggattctctcgacgaacccggtgcatatttaatcgaggaaaatgtggctcttcctaaggacatattccattcgtacttgagttattggatatatgaagcagctcactgtacaccggtcatgcttttgtctctagtaattggggttttaatctcaataattattctttttcatgataacgaaaattgcgttggggtttctgtagggtttctcctcatattctctggcattttagtgatagttctaatactcaggtttggaccacagatcagtgatgaagatttcaaatgtaagctactgatggaaattatcacacggaaacctacggtaaaggggaaagaatggaggacaattacatacaagatgaaccagtatttatttgataacgatttatggaacactccctactacttttaccgtgatgaagattgccaccgttattttctaagtcttattaagggaagaactttcaagaagcaaaaggaatcgtcagccagcaatgttaaagacgcacaatcaaatgacgaaaccgctggcacaccaaacgaagccgctgagtcttctagttttagtgccggaccgaactttataaagctcctcaccaaggcagccgaaatcgaacaacaatttcaaaaggaatattggcgacaagagtatcctggtgtcgatgagtttttttag

SEQ ID NO: 4052 - DNA, 714 bp, Artificial Sequence
  Description of Artificial Sequence: Synthetic polynucleotide
atgcaaaccccttctgaaaataccaacgccaagagtgattctctcgacgaacccggtgcatatttaatcgaggaaaatgtggctcttcctaaggacatattccattcttacttgagttattggatatatgaagcagctcactgtacaccggtcatgcttttgtctttagtaattggggttttaatctccataattattctttttcatgataacgaaaattgcgttggggtttctgtagggtttctcctcatattctctggcattttagtgatagttttgatactcaggtttggaccacagatcagtgatgaagatttcaaatgtaagttattgatggaaattatcacaagaaaacctacggtaaaggggaaagaatggaggacaattacatacaagatgaaccagtatttatttgataacgatttatggaacactccctactacttttaccgtgatgaagattgccaccgttattttttgagtcttattaagggaagaactttcaagaagcaaaaggaatcttctgccagcaatgttaaagacgcacaaagcaatgacgaaaccgctggcacaccaaacgaagccgctgagtcttctagttttagtgccggaccgaactttataaagctcctcaccaaggcagccgaaatcgaacaacaatttcaaaaggaatattggagacaagagtatcctggtgtcgatgagtttttttga

SEQ ID NO: 4053 - DNA, 705 bp, Saccharomyces cerevisiae
atgcagacccctctagaaagtaccgacgtcaagttagatacactcaacgaacctagtgcacatttaattgagaaaaatgtggctcttcctaaggacatattccgttcgtacttgagttattggatctatgaaatcgctcgctatacaccagtcatgattttgtccctggtaataggggttttggttttattaattatattttttaatgacaacgaagcttgtgttttcaattctgcatactacgcttatctttctcttgtagtattgttaataatattaggtgatggtaatccaaagctagtcagtcgtcgaaattttaggaccgagcttttagtggatgtcatcacacgtaaaccggcagtagaagggaaagaatggaggatcatcacatacaacatgaaccaatatttgtttaatcatgggcaatggcatactccgtattacttttacagcgatgaggattgctaccgttattttctacgccttgttgagggagtaacccccaagaagcaaacagccacgtcaattggcaattctccggtcaccgctaagcctgaagatgccatcgagtcagcttctcctagttccagactgaattatcgaaactttttgctcaaggcagcggagatcgaacgacaagctcaggaaaattactggcgaaggcggcatcccaatatcgatgcgcttcttaaaaagacggaatag

SEQ ID NO: 4054 - DNA, 705 bp, Artificial Sequence
  Description of Artificial Sequence: Synthetic polynucleotide
atgcagacccctttggaaagtaccgacgtcaagttagatacactcaacgaacctagtgcacatttaattgagaaaaatgtggctcttcctaaggacatattccgttcttacttgagttattggatctatgaaatcgctcgctatacaccagtcatgattttgtccttagtaataggggttttggttttattaattatattttttaatgacaacgaagcttgtgttttcaattctgcatactacgcttatctttctcttgtagtattgttaataatattaggtgatggtaatccaaagttggtcagtcgtagaaattttaggaccgagcttttagtggatgtcatcacacgtaaaccggcagtagaagggaaagaatggaggatcatcacatacaacatgaaccaatatttgtttaatcatgggcaatggcatactccgtattacttttacagcgatgaggattgctaccgttattttttacgccttgttgagggagtaacccccaagaagcaaacagccacgtccattggcaattctccggtcaccgctaagcctgaagatgccatcgagtctgcttctcctagttccagattgaattatagaaactttttgctcaaggcagcggagatcgaaagacaagctcaggaaaattactggagaaggagacatcccaatatcgatgcgcttcttaaaaagacggaatga

SEQ ID NO: 4055 - DNA, 822 bp, Saccharomyces cerevisiae
atggctgcgcagaatgcctttgaacaaaaaaagagggcaattttgaatgagatagactcaacccaaccagatttgtcaccaaaaggcactatagatgaactatgccttccaataattgatcttatcaacgcaagcgctgatatggtgacaacttcatcgtgttccggtagagtcagtgtattcttggaaggtactaagtcatataacggggaggtcaagataggtggtaagggacaaggcggtaaatggctttacgtcactcatgatcgtgagaaagttattggctggttagatgagttgaaatcaaaaagtgagttttcttttgaactatctggcaaggagataccaacagagaaagtaacggggagtatcagatatatactttataagtatgagcctttcatattgcacgttaaatgcagagactttcaagcagcatccaagttatacaacacagccatgtcttgtggtttcagagaaagtgggattggttcgaacaatctggtcgcaatcagaataaatatcaagctggacgtaccgctcggttatttagatgagacttcaggcactttgaaattttttgtaactccagaatacgtaagcgttctggattctttatcgttaagcaaattcgatgagaataccaggaaaatgcaagcactatatgatagaattgaaaaagaactcataaattgtgcgccggatgtaaattctaaggtcaatataacgccaatcgaaacaaaggaagagaggagagaacgaaagaaaagagaaggtatggagagacaacgtcaacttaagagcccacaaaatgtgctataa

SEQ ID NO: 4056 - DNA, 822 bp, Artificial Sequence
  Description of Artificial Sequence: Synthetic polynucleotide
atggctgcgcagaatgcctttgaacaaaaaaagagggcaattttgaatgagatagactctacccaaccagatttgtctccaaaaggcactatagatgaattgtgccttccaataattgatcttatcaacgcaagcgctgatatggtgacaacttcttcttgttccggtagagtcagtgtattcttggaaggtactaagagttataacggggaggtcaagataggtggtaagggacaaggcggtaaatggctttacgtcactcatgatcgtgagaaagttattggctggttagatgagttgaaatctaaaagtgagttttcttttgaattatctggcaaggagataccaacagagaaagtaacggggagtatcagatatatactttataagtatgagcctttcatattgcacgttaaatgcagagactttcaagcagcatccaagttatacaacacagccatgtcttgtggtttcagagaaagtgggattggttccaacaatttggtcgcaatcagaataaatatcaagttggacgtaccgctcggttatttagatgagacttctggcactttgaaattttttgtaactccagaatacgtaagcgttttggattctttatctttaagcaaattcgatgagaataccaggaaaatgcaagcattatatgatagaattgaaaaagaactcataaattgtgcgccggatgtaaattctaaggtcaatataacgccaatcgaaacaaaggaagagaggagagaaagaaagaaaagagaaggtatggagagacaacgtcaacttaagagcccacaaaatgtgttatga

SEQ ID NO: 4057 - DNA, 2745 bp, Saccharomyces cerevisiae
atgactgaccaaagaggtccaccgcccccacacccgcagcaagccaatggctacaagaaatttcctcctcatgataaccaatactctggagccaataatagtcagccaaataaccactacaatgaaaatctttacagtgcaagggaacctcacaataacaagcaataccagtcgaaaaatggcaaatacgggacaaataaatacaataatcgtaataatagtcaaggaaatgcacagtactacaataacagattcaataatggctacagactgaataacaacgactataacccggcaatgttgccaggtatgcaatggccagctaactactatgctcctcagatgtattatataccccaacaaatggttccagttgcttctccaccatatacacaccaaccactcaacactaatcccgaacctccctctacacctaaaactacaaaaatagaaatcactacgaaaactggtgaacgtttaaatttgaaaaaattccacgaagaaaagaaagcttcgaaaggtgaagagaagaatgatggggtagagcagaaatctaaatcaggaaccccttttgaaaaggaggcaactcctgtactacctgctaatgaagcagttaaagatacgttaaccgaaacatctaatgaaaaatctacctctgaagcggaaaatactaagagattatttttagagcaggtgagattgcgcaaagctgccatggaaagaaagaaaaacggtttaatctccgaaactgagaagaagcaagaaacttcaaatcatgataatactgatacaactaagcccaactcggttattgaatctgaacctattaaggaagcgccgaaaccaacgggagaagctaatgaagttgtgattgatggaaaatcaggggcaagtgtcaaaactccacaacatgtaactggaagtgtaactaaatccgtgacttttaacgaacccgagaatgagagcagttctcaggatgttgatgagcttgttaaagatgatgatactactgaaatttcggatacgactggtggaaaaactgtaaataaaagtgacgacgaaacaataaattccgtaatcaccacagaggagaacacagtgaaggagacagaaccttccacttccgatattgagatgccaactgtatctcaactacttgaaactttaggtaaggctcaaccaatttctgacatatatgagtttgcctatccggaaaatgttgaaaggcctgatatcaaatacaagaaaccaagcgttaagtacacttatggccctaccttcttactgcaattcaaagataaactaaaattcaggcctgatcctgcgtgggttgaagctgtatcctcgaaaattgttatacctcctcatatagccagaaataaaccaaaagatagtggcagatttggaggcgatttcagaagtccatctatgcgcggtatggaccatacttccagttcaagagtttcatcgaaaagaagatcaaagagaatgggtgacgacagaagatctaatagaggatatacctccagaaaagatcgcgaaaaagctgcagaaaaggcagaagagcaagctccaaaggaagaaatcgccccgttggttccgagtgctaatagatggatacctaaatcaagggttaaaaaaacagaaaagaagttagctcctgacggcaaaactgaattatttgacaaggaagaagtagaacgaaaaatgaagtctctattaaacaagttaactttagaaatgtttgattcaatctcctctgagattttggatatagcaaaccaatcaaagtgggaagatgatggcgaaacattgaaaatagttattgaacaaattttccacaaggcttgtgatgaacctcattggtcttcaatgtatgctcagttatgtggcaaagtggtcaaagaccttgacccaaacattaaagataaagagaacgaaggaaagaatggaccaaagcttgtgttgcattatttagtggcaagatgtcacgaagaatttgagaaaggttgggctgataagttgcctgcaggagaagatggtaatccactagaacctgaaatgatgtccgatgagtattatattgcggctgccgccaagagaagagggttaggtttagtacgtttcatagggtacttatattgtttgaacttattaactggtaagatgatgtttgagtgcttccggagattaatgaaagatctaaacaacgatccatccgaggagacattagagtccgttattgaattactgaatactgtgggtgaacaatttgaacatgataaatttgttacgcctcaggcaactcttgaaggttcggtactactcgacaatctatttatgttgttacaacatatcattgacggtggcaccatatcgaacagaataaagttcaagttgatagacgtgaaggaattgagggaaattaagcattggaacagcgctaagaaagacgccggaccaaagacaattcaacaaatccaccaagaagaagaacaattacgtcagaaaaagaacagtcagagatcaaattctagattcaacaatcacaaccaatcgaacagcaacagatattcttctaacagaaggaacatgcaaaacacccaaagagatagttttgcttccacgaaaacaggttctttcagaaataaccaaagaaatgctcgtaaagtcgaagaagtttctcaagctccaagagctaatatgttcgacgcattaatgaataacgatggggacagtgattaa

SEQ ID NO: 4058 - DNA, 2745 bp, Artificial Sequence
  Description of Artificial Sequence: Synthetic polynucleotide
atgactgaccaaagaggtccaccgcccccacacccgcagcaagccaatggctacaagaaatttcctcctcatgataaccaatactctggagccaataatagtcagccaaataaccactacaatgaaaatctttacagtgcaagggaacctcacaataacaagcaataccagtccaaaaatggcaaatacgggacaaataaatacaataatcgtaataatagtcaaggaaatgcacagtactacaataacagattcaataatggctacagattgaataacaacgactataacccggcaatgttgccaggtatgcaatggccagctaactactatgctcctcagatgtattatataccccaacaaatggttccagttgcttctccaccatatacacaccaaccactcaacactaatcccgaacctccctctacacctaaaactacaaaaatagaaatcactacgaaaactggtgaacgtttaaatttgaaaaaattccacgaagaaaagaaagcttccaaaggtgaagagaagaatgatggggtagagcagaaatctaaaagtggaaccccttttgaaaaggaggcaactcctgtattacctgctaatgaagcagttaaagatacgttaaccgaaacatctaatgaaaaatctacctctgaagcggaaaatactaagagattatttttagagcaggtgagattgcgcaaagctgccatggaaagaaagaaaaacggtttaatctccgaaactgagaagaagcaagaaacttccaatcatgataatactgatacaactaagcccaactctgttattgaatctgaacctattaaggaagcgccgaaaccaacgggagaagctaatgaagttgtgattgatggaaaaagtggggcaagtgtcaaaactccacaacatgtaactggaagtgtaactaaatccgtgacttttaacgaacccgagaatgagagcagttctcaggatgttgatgagcttgttaaagatgatgatactactgaaatttctgatacgactggtggaaaaactgtaaataaaagtgacgacgaaacaataaattccgtaatcaccacagaggagaacacagtgaaggagacagaaccttccacttccgatattgagatgccaactgtatctcaattacttgaaactttaggtaaggctcaaccaatttctgacatatatgagtttgcctatccggaaaatgttgaaaggcctgatatcaaatacaagaaaccaagcgttaagtacacttatggccctaccttcttattacaattcaaagataaattgaaattcaggcctgatcctgcgtgggttgaagctgtatcctctaaaattgttatacctcctcatatagccagaaataaaccaaaagatagtggcagatttggaggcgatttcagaagtccatctatgcgcggtatggaccatacttccagtagtagagtttcttctaaaagaagatccaagagaatgggtgacgacagaagatctaatagaggatatacctccagaaaagatcgcgaaaaagctgcagaaaaggcagaagagcaagctccaaaggaagaaatcgccccgttggttccgagtgctaatagatggatacctaaatctagggttaaaaaaacagaaaagaagttagctcctgacggcaaaactgaattatttgacaaggaagaagtagaaagaaaaatgaagtctttattaaacaagttaactttagaaatgtttgattctatctcctctgagattttggatatagcaaaccaatccaagtgggaagatgatggcgaaacattgaaaatagttattgaacaaattttccacaaggcttgtgatgaacctcattggtcttctatgtatgctcagttatgtggcaaagtggtcaaagaccttgacccaaacattaaagataaagagaacgaaggaaagaatggaccaaagcttgtgttgcattatttagtggcaagatgtcacgaagaatttgagaaaggttgggctgataagttgcctgcaggagaagatggtaatccattggaacctgaaatgatgtccgatgagtattatattgcggctgccgccaagagaagagggttaggtttagtacgtttcatagggtacttatattgtttgaacttattaactggtaagatgatgtttgagtgcttcagaagattaatgaaagatttgaacaacgatccatccgaggagacattagagtccgttattgaattattgaatactgtgggtgaacaatttgaacatgataaatttgttacgcctcaggcaactcttgaaggttctgtattactcgacaatttatttatgttgttacaacatatcattgacggtggcaccataagcaacagaataaagttcaagttgatagacgtgaaggaattgagggaaattaagcattggaacagcgctaagaaagacgccggaccaaagacaattcaacaaatccaccaagaagaagaacaattacgtcagaaaaagaacagtcagagatctaattctagattcaacaatcacaaccaaagtaacagcaacagatattcttctaacagaaggaacatgcaaaacacccaaagagatagttttgcttccacgaaaacaggttctttcagaaataaccaaagaaatgctcgtaaagtcgaagaagtttctcaagctccaagagctaatatgttcgacgcattaatgaataacgatggggacagtgattga

SEQ ID NO: 4059 - DNA, 1218 bp, Saccharomyces cerevisiae
atgacagctgctgtaacatcctccaatatagtattagaaacccacgaaagtggtatcaaaccatattttgaacagaagatccaagaaacagaattaaagatccgctccaaaacagaaaatgttcgcagactggaagctcaaaggaatgcattgaatgacaaagtacgttttatcaaggacgaactgcgtctattacaggaacctggatcttatgtgggtgaagttataaagatcgtgtctgacaaaaaagttctcgttaaagtgcaacctgagggaaaatacatcgtggatgttgcaaaagatataaacgtgaaggacttaaaggcatctcaaagagtttgtctaaggagtgactcttatatgttgcataaagttcttgagaataaggctgacccactagtttcgttgatgatggtggaaaaagttcctgattccacatacgatatggttggtggtttgacaaagcaaataaaggagattaaagaagttattgaattgcccgtaaaacatcctgaactttttgaaagtttgggtattgcgcaaccaaagggtgtcatcttatatggcccccctggtacagggaaaaccttattggcaagagctgtcgcacatcacactgattgtaaattcatcagggtcagtggtgcggaactggtacaaaagtatatcggcgaaggttcccgtatggtccgtgagctgtttgtgatggctagagaacatgctccctcaattatctttatggatgaaatcgattccattggctctactcgtgtagaaggttctggtggtggtgattcagaagttcaaagaacaatgttagaactactaaaccaattggacgggtttgaaacttctaaaaatatcaagatcataatggccacgaatagactagatattctagatccagcacttttgagacccggtagaatagataggaagattgaatttccacctccaagtgtcgcagctagagctgaaattttaagaatccattccagaaaaatgaatctaactcgtggtatcaacttgagaaaggttgctgaaaagatgaacggttgttctggtgccgatgtcaaaggtgtctgtacagaagctggtatgtatgctttaagagaaagaagaatacacgttactcaagaagacttcgaactcgctgtgggtaaggttatgaacaagaaccaagaaacggccatttctgtcgccaagctgttcaagtga

SEQ ID NO: 4060 - DNA, 1218 bp, Artificial Sequence
  Description of Artificial Sequence: Synthetic polynucleotide
atgacagctgctgtaacatcctccaatatagtattagaaacccacgaaagtggtatcaaaccatattttgaacagaagatccaagaaacagaattaaagatccgctccaaaacagaaaatgttcgcagattagaagctcaaaggaatgcattgaatgacaaagtacgttttatcaaggacgaattgcgtttattacaggaacctggatcttatgtgggtgaagttataaagatcgtgtctgacaaaaaagttctcgttaaagtgcaacctgagggaaaatacatcgtggatgttgcaaaagatataaacgtgaaggacttaaaggcatctcaaagagtttgtttgaggagtgactcttatatgttgcataaagttcttgagaataaggctgacccattagtttctttgatgatggtggaaaaagttcctgattccacatacgatatggttggtggtttgacaaagcaaataaaggagattaaagaagttattgaattgcccgtaaaacatcctgaactttttgaaagtttgggtattgcgcaaccaaagggtgtcatcttatatggcccccctggtacagggaaaaccttattggcaagagctgtcgcacatcacactgattgtaaattcatcagggtcagtggtgcggaattggtacaaaagtatatcggcgaaggttcccgtatggtccgtgagttatttgtgatggctagagaacatgctccctctattatctttatggatgaaatcgattccattggctctactcgtgtagaaggttctggtggtggtgattctgaagttcaaagaacaatgttagaattattaaaccaattggacgggtttgaaacttctaaaaatatcaagatcataatggccacgaatagattagatattttagatccagcacttttgagacccggtagaatagataggaagattgaatttccacctccaagtgtcgcagctagagctgaaattttaagaatccattccagaaaaatgaatttaactcgtggtatcaacttgagaaaggttgctgaaaagatgaacggttgttctggtgccgatgtcaaaggtgtctgtacagaagctggtatgtatgctttaagagaaagaagaatacacgttactcaagaagacttcgaactcgctgtgggtaaggttatgaacaagaaccaagaaacggccatttctgtcgccaagcttttcaagtga

SEQ ID NO: 4061 - DNA, 609 bp, Saccharomyces cerevisiae
atgggtattattgaagaaaaggctctttttgttacgtgtggggcaacggtgccatttccaaagctcgtctcatgtgtgctaagcgacgaattctgccaagaattgattcaatatggattcgtacgtctaatcattcagtttgggagaaactacagttctgaatttgagcatttagtgcaagaacgcgggggccaaagagaaagccaaaaaattccaattgaccagtttggctgtggcgacaccgcaagacagtatgtcctgatgaacgggaaattaaaggtgatcgggtttgacttttcgaccaagatgcaaagtattatacgtgattattcagatttggtcatatcacacgctggaacgggctctatactagattctctacggttgaataaaccgttgatagtttgcgtaaacgattctttgatggataaccaccagcagcagatagcagacaagtttgtagagttgggctacgtatggtcttgtgcacccactgaaacaggtttgatagctggtttacgtgcatctcaaacagagaaactcaaaccattcccagtttctcataacccgtcatttgagcgattgctagttgaaactatatacagctag

SEQ ID NO: 4062 - DNA, 609 bp, Artificial Sequence
  Description of Artificial Sequence: Synthetic polynucleotide
atgggtattattgaagaaaaggctctttttgttacgtgtggggcaacggtgccatttccaaagctcgtctcctgtgtgttgagcgacgaattctgccaagaattgattcaatatggattcgtacgtttgatcattcagtttgggagaaactacagttctgaatttgagcatttagtgcaagaacgcgggggccaaagagaaagccaaaaaattccaattgaccagtttggctgtggcgacaccgcaagacagtatgtcttgatgaacgggaaattaaaggtgatcgggtttgacttttccaccaagatgcaaagtattatacgtgattattctgatttggtcatatctcacgctggaacgggctctatattggattctttaagattgaataaaccgttgatagtttgcgtaaacgattctttgatggataaccaccagcagcagatagcagacaagtttgtagagttgggctacgtatggtcttgtgcacccactgaaacaggtttgatagctggtttacgtgcatctcaaacagagaaactcaaaccattcccagtttctcataacccgtcctttgagagattgttggttgaaactatatacagctga

SEQ ID NO: 4063 - DNA, 1629 bp, Saccharomyces cerevisiae
atgtcgttactgagactgtggaacaaagaatcaagggcaccatcaaaaataaagagtcatggtattgttggcagttacggcaacagcatgctggcccataacaacgtgaagcaatttcgtatagacatagacgaaccgcatagagtatggaaaccgaatgaaagcataaccggagaagcggtcattgacataaagagagacataactaacgtagcgatcaaattatcgctagtatgtgaggttcgcgtgaaaacggggaacagtccaacctccaagaataagagaattgagaaaaccttagagaagtcgacgtttctttatggacaggactacgtaaagacagctttttcggctaaggaaaagaaaccgcatgttgacaaaaccaccattctcaatggtttaagcaagggggaacacaggtttccctttaggatacgaataccacgaggcagaggaatgttgagctctataaagttcgaaaggggctcgataacatacttcctctcttgcactttagaatccctcaacaacatcaacggattaaaaaaaccggaagcaagatgcgaacgtgagtttgcagtcatagttccgctggacgtctcgaggctgcccaagccgaaaactaagacagtggttttacaatcagcatctatggtccaaaacaaaaagaacaaatctacagaggacgaatcctcatcgtatacacaattaactcaaaagtctactacttctaattcttctagcagttcagtaaactccaagacgtcccccttaccaaataaaacggtgactatatccgtagacataccgcaggctggattcatgattggtgaaattatccctatagacgttaagattgaccactataagcctttctatgcccctgcgggtctcaccaccactttggtgaggatatgtagggtgggcggtgcaggcaaagatgatcctatggagactttcagaaaagatatatgtcagagtatctctcctatatatattaaccctgaaacgttgcagtttcaatctagagtttatctgaaagtgccccttgatgcattttcgacccttactactgtgggaaaatttttctccttccaatactatatcgaggttatggttaacttatcaaaaaaaaacgtggtttacacagaatctaatagaataataggaactcctattggagaacaaaatggcttgggcgtagagaataatatcaaccgtatccaaaggaaaatgctacgtatggtcaatccagaaacgttggagaacgattctgagggttatgaatccagtatatttttcaaagatatggtaaatgtggaaaagctaaagagactgaggaatgtaactggtatgtccatagaaaccgtcataggaacgacgagatccgaacagcagcaatctgatgcaagcatcccatcccaatcctcaatcacggctcctcaaaattctccatcgaatttaagagattggttggccccattaaatgcatatgatagtgacgatgttccagttccaaagtattcgccaaatgataaagtcagtgtaccgtcggaagacaaacaagaacttgaacaaaaaagactacaacagttagaaagcgatcctcccccttgtgatgactattaa

SEQ ID NO: 4064 - DNA, 1629 bp, Artificial Sequence
  Description of Artificial Sequence: Synthetic polynucleotide
atgtctttattaagattatggaacaaagaaagtagggcaccatctaaaataaagagtcatggtattgttggcagttacggcaacagcatgttggcccataacaacgtgaagcaatttcgtatagacatagacgaaccgcatagagtatggaaaccgaatgaaagcataaccggagaagcggtcattgacataaagagagacataactaacgtagcgatcaaattaagtttagtatgtgaggttcgcgtgaaaacggggaacagtccaacctccaagaataagagaattgagaaaaccttagagaagtctacgtttctttatggacaggactacgtaaagacagctttttctgctaaggaaaagaaaccgcatgttgacaaaaccaccattctcaatggtttaagcaagggggaacacaggtttccctttaggataagaataccaagaggcagaggaatgttgagctctataaagttcgaaaggggctctataacatacttcctctcttgcactttagaatccctcaacaacatcaacggattaaaaaaaccggaagcaagatgcgaacgtgagtttgcagtcatagttccgttagacgtctccaggttacccaagccgaaaactaagacagtggttttacaaagtgcatctatggtccaaaacaaaaagaacaaatctacagaggacgaatcctcttcttatacacaattaactcaaaagtctactacttctaattcttctagcagttctgtaaactccaagacgtcccccttaccaaataaaacggtgactatatccgtagacataccgcaggctggattcatgattggtgaaattatccctatagacgttaagattgaccactataagcctttctatgcccctgcgggtctcaccaccactttggtgaggatatgtagggtgggcggtgcaggcaaagatgatcctatggagactttcagaaaagatatatgtcagagtatctctcctatatatattaaccctgaaacgttgcagtttcaatctagagtttatttgaaagtgccccttgatgcattttccacccttactactgtgggaaaatttttctccttccaatactatatcgaggttatggttaacttatccaaaaaaaacgtggtttacacagaatctaatagaataataggaactcctattggagaacaaaatggcttgggcgtagagaataatatcaaccgtatccaaaggaaaatgcttcgtatggtcaatccagaaacgttggagaacgattctgagggttatgaatccagtatatttttcaaagatatggtaaatgtggaaaagttgaagagattaaggaatgtaactggtatgtccatagaaaccgtcataggaacgacgagatccgaacagcagcaatctgatgcaagcatcccatcccaatcctctatcacggctcctcaaaattctccatccaatttaagagattggttggccccattaaatgcatatgatagtgacgatgttccagttccaaagtattctccaaatgataaagtcagtgtaccgagtgaagacaaacaagaacttgaacaaaaaagattacaacagttagaaagcgatcctcccccttgtgatgactattga

SEQ ID NO: 4065 - DNA, 891 bp, Saccharomyces cerevisiae
atgaataggcagagcggtgtgaatgcgggggtacagaacaacccaccatcccgagtggtgtatctgggttctataccatacgatcaaacagaggagcagatacttgatttatgtagtaatgttgggcccgtgatcaatttgaaaatgatgttcgacccccaaactggtaggtcgaaagggtacgcgtttattgaatttagagatttagagtccagtgccagcgcagtacgtaatttgaatggataccaattaggctctaggtttttgaaatgcggttactccagcaatagtgatatatcgggagtttcacaacagcaacaacaacagtacaacaacattaatgggaacaataacaacaatggaaataataataataatagtaatgggccggactttcaaaacagcggaaatgccaattttctaagtcaaaagtttccagaattgccctctggtatcgacgttaacataaacatgaccacccctgctatgatgatatcgagcgaactagctaaaaaaccgaaagaggtgcagttgaaatttttacaaaaattccaagaatggacaagagcgcatcctgaagatgctgtttcgctattagagctgtgtccacagttgagttttgttacggctgaattattgctaacgaatgggatatgtaaagtggatgatttgatcccgttagcttccaggccgcaagaagaggcatcggctacgaataacaatagcgtgaacgaggtggtggatccagctgtgcttaacaaacagaaagaactactgaaacaggtgttacaactgaatgacagtcaaatttctatcttgcccgatgatgaaaggatggctatttgggacttaaaacaaaaagcattaaggggagaatttggtgcattttga

SEQ ID NO: 4066 - DNA, 891 bp, Artificial Sequence
  Description of Artificial Sequence: Synthetic polynucleotide
atgaataggcagagcggtgtgaatgcgggggtacagaacaacccaccatccagagtggtgtatttgggttctataccatacgatcaaacagaggagcagatacttgatttatgtagtaatgttgggcccgtgatcaatttgaaaatgatgttcgacccccaaactggtaggtccaaagggtacgcgtttattgaatttagagatttagagtccagtgccagcgcagtacgtaatttgaatggataccaattaggctctaggtttttgaaatgcggttactccagcaatagtgatatatctggagtttctcaacagcaacaacaacagtacaacaacattaatgggaacaataacaacaatggaaataataataataatagtaatgggccggactttcaaaacagcggaaatgccaattttttgagtcaaaagtttccagaattgccctctggtatcgacgttaacataaacatgaccacccctgctatgatgatatctagcgaattggctaaaaaaccgaaagaggtgcagttgaaatttttacaaaaattccaagaatggacaagagcgcatcctgaagatgctgtttctttattagagctctgtccacagttgagttttgttacggctgaattattgttgacgaatgggatatgtaaagtggatgatttgatcccgttagcttccaggccgcaagaagaggcatctgctacgaataacaatagcgtgaacgaggtggtggatccagctgtgcttaacaaacagaaagaattattgaaacaggtgttacaattgaatgacagtcaaatttctatcttgcccgatgatgaaaggatggctatttgggacttaaaacaaaaagcattaaggggagaatttggtgcattttga

SEQ ID NO: 4067 - DNA, 930 bp, Saccharomyces cerevisiae
atggatagtaaggaagtactggtacatgttaagaatctagaaaagaacaaaagtaatgatgctgcagttctagaaatcttacatgtcttggataaagaattcgtccccactgaaaagttactgagagaaacaaaagttggtgtggaagtcaacaagtttaaaaaatccactaatgtagagatcagcaaactcgtgaagaaaatgattagctcttggaaagacgcaattaataaaaataagcgttccaggcaagcacagcagcatcatcaagatcatgcgccaggcaatgcagaggacaagacaactgtaggtgagtccgtgaatggtgttcaacagccggcctcctcccagtcagatgccatgaaacaagacaagtacgtcagcactaaaccaagaaatagtaagaacgatggtgtggatacagctatataccaccacaaattacgtgatcaggtactaaaagcactctacgacgttttggccaaggaaagtgagcatccacctcaatctattttgcatactgcaaaggccatagaaagtgaaatgaataaagttaacaactgtgacaccaacgaagccgcttacaaagccaggtatcgtataatttattcaaacgtcatatcaaagaataacccagatctcaaacataaaattgccaacggtgatataacacctgaattcttagctacatgcgatgccaaggatctggcaccagcgcccttaaagcaaaagatagaagaaattgccaagcaaaacttatacaacgcacagggtgccaccatagaaaggtcagtcaccgatagatttacatgtggtaaatgtaaagagaagaaggtatcttactatcaattgcaaacaagatctgcggatgaaccattgaccactttctgtacatgtgaagcatgtggtaacagatggaaattctcttag

SEQ ID NO: 4068 - DNA, 930 bp, Artificial Sequence
  Description of Artificial Sequence: Synthetic polynucleotide
atggatagtaaggaagtattggtacatgttaagaatttggaaaagaacaaaagtaatgatgctgcagttttggaaatcttacatgtcttggataaagaattcgtccccactgaaaagttattaagagaaacaaaagttggtgtggaagtcaacaagtttaaaaaatccactaatgtagagatcagcaaactcgtgaagaaaatgattagctcttggaaagacgcaattaataaaaataagcgttccaggcaagcacagcagcatcatcaagatcatgcgccaggcaatgcagaggacaagacaactgtaggtgagtccgtgaatggtgttcaacagccggcctcctcccagagcgatgccatgaaacaagacaagtacgtcagcactaaaccaagaaatagtaagaacgatggtgtggatacagctatataccaccacaaattacgtgatcaggtattgaaagcactctacgacgttttggccaaggaaagtgagcatccacctcaatctattttgcatactgcaaaggccatagaaagtgaaatgaataaagttaacaactgtgacaccaacgaagccgcttacaaagccaggtatcgtataatttattccaacgtcatatccaagaataacccagatctcaaacataaaattgccaacggtgatataacacctgaattcttagctacatgcgatgccaaggatttggcaccagcgcccttaaagcaaaagatagaagaaattgccaagcaaaacttatacaacgcacagggtgccaccatagaaaggtccgtcaccgatagatttacatgtggtaaatgtaaagagaagaaggtatcttactatcaattgcaaacaagatctgcggatgaaccattgaccactttctgtacatgtgaagcatgtggtaacagatggaaattctcttga

SEQ ID NO: 4069 - DNA, 183 bp, Saccharomyces cerevisiae
atgttcgatagttctatcgaacgagtgactctggaactatgcttccatataactcttagcattatgtgtggctgtagtatctactttctgcttcttgtgtttattctaactttttattcgtcggttttgttacatcttaaattgtatttctttagttctgaccgagccatatttaatgcatag

SEQ ID NO: 4070 - DNA, 183 bp, Artificial Sequence
  Description of Artificial Sequence: Synthetic polynucleotide
atgttcgatagttctatcgaaagagtgactttggaattgtgcttccatataactcttagcattatgtgtggctgtagtatctactttttacttcttgtgtttattttgactttttattcttctgttttgttacatcttaaattgtatttctttagttctgacagagccatatttaatgcatga

SEQ ID NO: 4071 - DNA, 465 bp, Saccharomyces cerevisiae
atgctaagagttatatggaagcatagttccagagtcactcgttcgatagaactatcgaacatttctaccactaatcacaccaggagtttaaggaggctttcctggatttctccgagaagattttacgctcaatcttgggacgacagacagcctaatgacaaaatagatgcacacataaaggtgcagaaactcatggatcaaataaattcgaggcctaatgttctggaaaagttagaaaaggttagcaatatcatgatcgaaaaaaaattggttaatctagatgggacttctgccaatgaagaaaatacgatgaaaccatggcaaatgattaagatcttaatggacagagatctgagacacgctatgaaggaatttaaattggaattggaaaaatctggcatacagttaggacctgaacaactggccccgctaatgaccgttttaggccttgagaagaaaaaatga

SEQ ID NO: 4072 - DNA, 465 bp, Artificial Sequence
  Description of Artificial Sequence: Synthetic polynucleotide
atgttgagagttatatggaagcatagttccagagtcactcgttctatagaattatctaacatttctaccactaatcacaccaggagtttaaggaggctttcctggatttctccgagaagattttacgctcaatcttgggacgacagacagcctaatgacaaaatagatgcacacataaaggtgcagaaactcatggatcaaataaattctaggcctaatgttttggaaaagttagaaaaggttagcaatatcatgatcgaaaaaaaattggttaatttggatgggacttctgccaatgaagaaaatacgatgaaaccatggcaaatgattaagatcttaatggacagagatttgagacacgctatgaaggaatttaaattggaattggaaaaatctggcatacagttaggacctgaacaattggccccgttaatgaccgttttaggccttgagaagaaaaaatga

SEQ ID NO: 4073 - DNA, 1029 bp, Saccharomyces cerevisiae
atgcatacagctgaatttttggaaacagaaccaacagaaatctcatctgttctagcaggtggttataatcacccactgctgagacagtggcaaagtgagcgtcaactgactaagaacatgttgatttttccgctattcatctccgataatccagatgactttactgaaattgactctctacctaatatcaatagaatcggtgtaaataggctaaaagactacttaaagccattagtggccaagggtttgcgttctgtgatcttgtttggtgtgcctctcatccctggtaccaaggatccagtgggtacagcggctgacgatcctgcagggccagtcattcaaggtattaaattcattcgtgagtatttccctgaactgtatattatttgcgatgtctgtctctgtgaatacacttctcatggccattgcggggttctatacgatgatggtactattaatagagaacgtagtgtctctagattagcagctgtggcagttaactacgctaaagctggtgcgcactgtgtggctcccagtgatatgatcgatggtaggatcagagatattaaacgaggcttaataaatgcaaacttggctcacaagaccttcgtgttatcctatgcagctaagtttagcggtaatctatatgggccattccgtgatgctgcttgttcagctccttcgaatggtgataggaaatgttaccaattacctcctgccggtcgtggcctggcacgtagggcgttggaaagggatatgagtgaaggtgccgacggtattattgttaagccttccactttctacttagatataatgagggatgcaagtgaaatttgtaaagacttaccaatctgcgcatatcacgtgtcgggcgaatacgcaatgttacatgctgcagctgaaaaaggtgttgttgatttgaagacaattgcctttgaatctcatcaaggtttcttgagggcgggtgccagattaatcatcacttatttggctcctgagttcctagactggttagatgaagaaaactaa

SEQ ID NO: 4074 - DNA, 1029 bp, Artificial Sequence
  Description of Artificial Sequence: Synthetic polynucleotide
atgcatacagctgaatttttggaaacagaaccaacagaaatctcttctgttttagcaggtggttataatcacccattattaagacagtggcaaagtgagcgtcaattgactaagaacatgttgatttttccgcttttcatctccgataatccagatgactttactgaaattgactctttgcctaatatcaatagaatcggtgtaaataggttgaaagactacttaaagccattagtggccaagggtttgcgttctgtgatcttgtttggtgtgcctctcatccctggtaccaaggatccagtgggtacagcggctgacgatcctgcagggccagtcattcaaggtattaaattcattcgtgagtatttccctgaattgtatattatttgcgatgtctgtctctgtgaatacacttctcatggccattgcggggttctttacgatgatggtactattaatagagaacgtagtgtctctagattagcagctgtggcagttaactacgctaaagctggtgcgcactgtgtggctcccagtgatatgatcgatggtaggatcagagatattaaaagaggcttaataaatgcaaacttggctcacaagaccttcgtgttatcctatgcagctaagtttagcggtaatttatatgggccattccgtgatgctgcttgttctgctccttccaatggtgataggaaatgttaccaattacctcctgccggtcgtggcttggcacgtagggcgttggaaagggatatgagtgaaggtgccgacggtattattgttaagccttccactttctacttagatataatgagggatgcaagtgaaatttgtaaagacttaccaatctgcgcatatcacgtgtctggcgaatacgcaatgttacatgctgcagctgaaaaaggtgttgttgatttgaagacaattgcctttgaatctcatcaaggtttcttgagggcgggtgccagattaatcatcacttatttggctcctgagttcttggactggttagatgaagaaaactga

SEQ ID NO: 4075 - DNA, 1047 bp, Saccharomyces cerevisiae
atgactactgaaaaaaccgttgtttttgtttctggtgctactggtttcattgctctacacgtagtggacgatttattaaaaactggttacaaggtcatcggttcgggtaggtcccaagaaaagaatgatggattgctgaaaaaatttaagagcaatcccaacctttcaatggagattgtcgaagacattgctgctccaaacgcttttgacaaagtttttcaaaagcacggcaaagagatcaaggttgtcttgcacatagcttctccggttcacttcaacaccactgatttcgaaaaggatctgctaattcctgctgtgaatggtaccaagtccattctagaagcaatcaaaaattatgccgcagacacagtcgaaaaagtcgttattacttcttctgttgctgcccttgcatctcccggagatatgaaggacactagtttcgttgtcaatgaggaaagttggaacaaagatacttgggaaagttgtcaagctaacgcggtttccgcatactgtggttccaagaaatttgctgaaaaaactgcttgggattttctcgaggaaaaccaatcaagcatcaaatttacgctatcaaccatcaacccaggatttgtttttggccctcagctatttgccgactctcttagaaatggaataaatagctcttcagccattattgccaatttggttagttataaattaggcgacaatttttataattacagtggtccttttattgacgttcgcgatgtttcaaaagctcatttacttgcatttgagaaacccgaatgcgctggccaaagactattcttatgtgaagatatgttttgctctcaagaagcgctggatatcttgaatgaggaatttccacagttaaaaggcaagatagcaactggcgaacctggtagcggctcaacctttttgacaaaaaactgctgcaagtgcgacaaccgcaaaaccaaaaatttattaggattccaatttaataagttcagagattgcattgtcgatactgcctcgcaattactagaagttcaaagtaaaagctaa

SEQ ID NO: 4076 - DNA, 1047 bp, Artificial Sequence
  Description of Artificial Sequence: Synthetic polynucleotide
atgactactgaaaaaaccgttgtttttgtttctggtgctactggtttcattgctttacacgtagtggacgatttattaaaaactggttacaaggtcatcggttctggtaggtcccaagaaaagaatgatggattgttgaaaaaatttaagagcaatcccaacctttctatggagattgtcgaagacattgctgctccaaacgcttttgacaaagtttttcaaaagcacggcaaagagatcaaggttgtcttgcacatagcttctccggttcacttcaacaccactgatttcgaaaaggatttattgattcctgctgtgaatggtaccaagtccattttggaagcaatcaaaaattatgccgcagacacagtcgaaaaagtcgttattacttcttctgttgctgcccttgcatctcccggagatatgaaggacactagtttcgttgtcaatgaggaaagttggaacaaagatacttgggaaagttgtcaagctaacgcggtttccgcatactgtggttccaagaaatttgctgaaaaaactgcttgggattttctcgaggaaaaccaaagcagcatcaaatttacgttatctaccatcaacccaggatttgtttttggccctcagttatttgccgactctcttagaaatggaataaatagctcttctgccattattgccaatttggttagttataaattaggcgacaatttttataattacagtggtccttttattgacgttcgcgatgtttccaaagctcatttacttgcatttgagaaacccgaatgcgctggccaaagattattcttatgtgaagatatgttttgctctcaagaagcgttggatatcttgaatgaggaatttccacagttaaaaggcaagatagcaactggcgaacctggtagcggctctacctttttgacaaaaaactgctgcaagtgcgacaaccgcaaaaccaaaaatttattaggattccaatttaataagttcagagattgcattgtcgatactgcctctcaattattggaagttcaaagtaaaagctga

SEQ ID NO: 4077 - DNA, 1443 bp, Saccharomyces cerevisiae
atgtctaggaagttgtcccacctgatcgctacaaggaaatcaaaaacaatagtcgtaaccgtacttcttatttattctttgttgacatttcacttgtcaaacaaaaggctgctttctcagttttaccctagcaaagatgatttcaagcaaactcttctccctacgacttctcattcacaagatataaatttgaagaaacaaattacagttaacaagaaaaaaaatcaattgcataatttacgtgatcaattatcgtttgcgtttccctacgactctcaggcccccatcccgcaaagggtgtggcagacctggaaagtcggcgcagatgataagaattttccctcttcgttcagaacctatcaaaaaacatggtctggttcgtattcaccggattaccaatattctctgatttcggatgattctattatcccttttttggagaatctttacgcacccgttccgatagtcatccaagcgtttaaattgatgcctggaaatatcctaaaggcagattttttaaggtacctattattatttgcaagaggtggtatttactcagatatggatactatgcttttgaagccaattgattcatggccttctcagaataagtcatggctaaacaacataatagatttgaataaacctattccttataagaactcaaagccctcacttctctcaagtgatgagatatcacaccagccaggtttggtcatcggcattgaggcagatccggacagagatgattggagtgaatggtatgctcgtaggatccagttttgtcaatggactatccaagccaaaccaggtcacccaattctaagagaattgatcttaaatattactgcaacgactttggcgagcgtacaaaacccaggagttcctgtcagtgaaatgattgatccaagatttgaagaagactacaacgtaaactataggcacaaaagacgtcatgatgagacctacaaacactccgaattgaaaaataacaaaaatgttgatggctcagatataatgaattggacgggtccaggtattttctccgacattattttcgaatacatgaacaatgtgctccgatacaatagcgatatcttgttaatcaacccaaacctaaacaagaacgacgaagaaggtagtgagagtgccaccacaccagcaaaagatgttgataacgatacgctgtccaaatcaacaagaaaattttataagaaaatatcagagtctttgcaatcgtcaaattcaatgccctgggaattcttctcttttttgaaagaaccagttatcgttgatgatgtgatggttctaccaataacaagtttttcaccagatgtggggcagatgggcgcccagtctagtgacgacaaaatggcttttgtaaagcacatgtttagcgggagctggaaagaagatgctgataaaaatgcaggtcataaataa

SEQ ID NO: 4078 - DNA, 1443 bp, Artificial Sequence
  Description of Artificial Sequence: Synthetic polynucleotide
atgtctaggaagttgtcccacttaatcgctacaaggaaatctaaaacaatagtcgtaaccgtacttcttatttattctttgttgacatttcacttgtctaacaaaaggttactttctcagttttaccctagcaaagatgatttcaagcaaactcttctccctacgacttctcattctcaagatataaatttgaagaaacaaattacagttaacaagaaaaaaaatcaattgcataatttacgtgatcaattatcttttgcgtttccctacgactctcaggcccccatcccgcaaagggtgtggcagacctggaaagtcggcgcagatgataagaattttccctcttctttcagaacctatcaaaaaacatggtctggttcttattctccggattaccaatattctttgatttctgatgattctattatcccttttttggagaatctttacgcacccgttccgatagtcatccaagcgtttaaattgatgcctggaaatatcttgaaggcagattttttaaggtacttattattatttgcaagaggtggtatttactctgatatggatactatgcttttgaagccaattgattcttggccttctcagaataagtcttggttgaacaacataatagatttgaataaacctattccttataagaactccaagccctcccttctctccagtgatgagatatctcaccagccaggtttggtcatcggcattgaggcagatccggacagagatgattggagtgaatggtatgctcgtaggatccagttttgtcaatggactatccaagccaaaccaggtcacccaattttaagagaattgatcttaaatattactgcaacgactttggcgagcgtacaaaacccaggagttcctgtcagtgaaatgattgatccaagatttgaagaagactacaacgtaaactataggcacaaaagacgtcatgatgagacctacaaacactccgaattgaaaaataacaaaaatgttgatggcagtgatataatgaattggacgggtccaggtattttctccgacattattttcgaatacatgaacaatgtgctcaggtacaatagcgatatcttgttaatcaacccaaacttgaacaagaacgacgaagaaggtagtgagagtgccaccacaccagcaaaagatgttgataacgatacgttatccaaatctacaagaaaattttataagaaaatatctgagtctttgcaatcttccaattctatgccctgggaattcttctcttttttgaaagaaccagttatcgttgatgatgtgatggttttgccaataacaagtttttctccagatgtggggcagatgggcgcccagtctagtgacgacaaaatggcttttgtaaagcacatgtttagcgggagctggaaagaagatgctgataaaaatgcaggtcataaatga

SEQ ID NO: 4079 - DNA, 651 bp, Saccharomyces cerevisiae
atgaagactttaattgttgttgatatgcaaaatgattttatttcacctttaggttccttgactgttccaaaaggtgaggaattaatcaatcctatctcggatttgatgcaagatgctgatagagactggcacaggattgtggtcaccagagattggcacccttccagacatatttcgttcgcaaagaaccataaagataaagaaccctattcaacatacacctaccactctccaaggccaggcgatgattccacgcaagagggtattttgtggcccgtacactgtgtgaaaaacacctggggtagtcaattggttgaccaaataatggaccaagtggtcactaagcatattaagattgtcgacaagggtttcttgactgaccgtgaatactactccgccttccacgacatctggaacttccataagaccgacatgaacaagtacttagaaaagcatcatacagacgaggtttacattgtcggtgtagctttggagtattgtgtcaaagccaccgccatttccgctgcagaactaggttataagaccactgtcctgctggattacacaagacccatcagcgatgatcccgaagtcatcaataaggttaaggaagagttgaaggcccacaacatcaatgtcgtggataaataa

SEQ ID NO: 4080 - DNA, 651 bp, Artificial Sequence
  Description of Artificial Sequence: Synthetic polynucleotide
atgaagactttaattgttgttgatatgcaaaatgattttatttctcctttaggttccttgactgttccaaaaggtgaggaattaatcaatcctatcagtgatttgatgcaagatgctgatagagactggcacaggattgtggtcaccagagattggcacccttccagacatatttctttcgcaaagaaccataaagataaagaaccctattctacatacacctaccactctccaaggccaggcgatgattccacgcaagagggtattttgtggcccgtacactgtgtgaaaaacacctggggtagtcaattggttgaccaaataatggaccaagtggtcactaagcatattaagattgtcgacaagggtttcttgactgaccgtgaatactactccgccttccacgacatctggaacttccataagaccgacatgaacaagtacttagaaaagcatcatacagacgaggtttacattgtcggtgtagctttggagtattgtgtcaaagccaccgccatttccgctgcagaattgggttataagaccactgtcttattagattacacaagacccatcagcgatgatcccgaagtcatcaataaggttaaggaagagttgaaggcccacaacatcaatgtcgtggataaatga

SEQ ID NO: 4081 - DNA, 2730 bp, Saccharomyces cerevisiae
atgcagaagtgtgctggccatgcaccactggtgactgcagcctcgcgggtctcccaagacaccgtagacgctcttttgcaagctattttaaaggcctaccataaattagcttcgatcgacagtcacattaatgatcctgttgaaatagccttcaagctcataaactcttttaagtatctgccaatttcaggctcttctgtaaaagattttgagtcggaactgcgggagttagacgttttttctccccttttgcagtcagccgttactgctgctaataatagcaatatcatatgggaccttatagcggtgttatttgcatacatttccatccataaacagctccatcctttgatcctgcacaatctgaacatatggaaggattttatggcagataatgacgaagaaacggcgacaaccacggacggggactcaatgaatttcggcgtactgtcgcttctttccattgttcaaaattttgaagaaataacgccaaatctatttgagtttctaaagctcggtttgagatccactttactcaagatatgggtagcacaatggcaaagatacgatccttcggcaacgaacttaatcaacggtgatgagaaaatttctagctggataacaaaggattaccaggtggatttttttatcatcacttcattagcatcaacgtcctcattagaagttttgccatctcattattttgtgtacaagatctctaaaaggatctctcacttcccaaatttaattgatcctaaactatatcgatctgcaatttctacaataatggaaaatgggatttcagacaatggtggtggtgagaactccagcgacaaaattgatccgactgatttgtcctttcacttacaagttttaatggaagttattgaccatcctgagttgaattatttgcaggaaaatcgattaattttgttgctcgacattgcattaaattatttaatcctggttcctactcactgtttacattcaaactttggtgaattgggctctactcaaagtttagcatccactttaaatatcattcagttccttctatcgaaattcttaatcaacatgggcagtatttcgcaattaattaatcaatacaacaggaaatgcatcactactaataacatcaataataacaacattaacaacaatggcgttattaatggtagtactaacaccactagtactactactactaccatcactaataacaataataatagcaataatagcagtattagtaataataacagaaaaatagactggacgcaatcatatcaaacgaggtaccaaattccatactggtttgaggactcaattttgccaccaattccgcctatttcgaaatcgcttttcacttttgacaagaacctagaccatgagtcggattcaattatgattgtaaatgatgtattacgctgtttgaatttaaccattcttttaatttctaaacttctaagggattatgatgacctgaagattaacccactaattcaatcatcagatgatcacagtaatgaagacaatcatgtgataatagaacaatacatgcagctttatctcgttccattatttacttcattattattggcccaacaattaaaagaccgaggccaagaacgagatgaaggacataaagagaaagaggaaaatataaatctcatcgggtcttcctcagtcaagaaattattttctcaactaattttttttagctctttgaaattgtgtgaaaatttggtcataaaggaaaaaaatttagcactatatcatttgatcaaattcgcgacaaaggtttctctggatgatttgattttacaaaaaatatccataaacttattgaatcatttgttcttccatcaaattagggatggaagtgatgatgataatttaattaaaaagttatgtttaaaaaatcaactttctttccaagctttgaaagattacatcacattgtggaatgacggttctgaagtttataatgcattttataaggagcttttctatgaagagcaaccaaagattaagccaataaaactaacaacatctgacttgctgaaattattccctgaggatgttcaatttgtgatatccactccaccaaatacaataacttcagcatcaacaagcgataattgtacatcatcacaatcagctgcgcagaaaaatattgaaaactttactacgttatcgaagtacgatgtctactcgtccacatctttcataccgtccacgtcgaaaaacactaacactaacgttagtaagcagcagcagcagcctcaaaactctactccatgttcttccaacaggtttttgttcaacaaaagcagcctaatttctcaggaaagtaatggtagcaacaataacagcggcacacaaggacctggttccatgaatgagagttattctcttgacaattcattcaacacaaccaataccaatatgacgagacaaccaaccaccttaactagagcaaccgatgctatgactacggcacctacgacaccaattccatacaagaacactagtggaagcagcaataacaatctatggattgaatcgcccatgacaaatttcaagggttccaccatcagtaaaagtactaataagagcaaaatggttaatactggtaaaaattatattttagggggccacaataaagttaaaaacaacagtagagctcaatcaatacatatagatgactttgaaaatgagaacaattaa

SEQ ID NO: 4082 - DNA, 2730 bp, Artificial Sequence
  Description of Artificial Sequence: Synthetic polynucleotide
atgcagaagtgtgctggccatgcaccattggtgactgcagccagtagggtctcccaagacaccgtagacgctcttttgcaagctattttaaaggcctaccataaattagcttctatcgacagtcacattaatgatcctgttgaaatagccttcaagctcataaactcttttaagtatttaccaatttctggctcttctgtaaaagattttgagagtgaattaagagagttagacgttttttctccccttttgcagtctgccgttactgctgctaataatagcaatatcatatgggaccttatagcggtgttatttgcatacatttccatccataaacagctccatcctttgatcttgcacaatttgaacatatggaaggattttatggcagataatgacgaagaaacggcgacaaccacggacggggactccatgaatttcggcgtattatctcttctttccattgttcaaaattttgaagaaataacgccaaatttatttgagtttttgaagctcggtttgagatccactttactcaagatatgggtagcacaatggcaaagatacgatccttctgcaacgaacttaatcaacggtgatgagaaaatttctagctggataacaaaggattaccaggtggatttttttatcatcacttctttagcaagcacgtcctctttagaagttttgccatctcattattttgtgtacaagatctctaaaaggatctctcacttcccaaatttaattgatcctaaactttatagatctgcaatttctacaataatggaaaatgggatttctgacaatggtggtggtgagaactccagcgacaaaattgatccgactgatttgtcctttcacttacaagttttaatggaagttattgaccatcctgagttgaattatttgcaggaaaatagattaattttgttgctcgacattgcattaaattatttaatcttggttcctactcactgtttacattccaactttggtgaattgggctctactcaaagtttagcatccactttaaatatcattcagttccttttatccaaattcttaatcaacatgggcagtatttctcaattaattaatcaatacaacaggaaatgcatcactactaataacatcaataataacaacattaacaacaatggcgttattaatggtagtactaacaccactagtactactactactaccatcactaataacaataataatagcaataatagcagtattagtaataataacagaaaaatagactggacgcaaagttatcaaacgaggtaccaaattccatactggtttgaggacagtattttgccaccaattccgcctatttccaaatctcttttcacttttgacaagaacttggaccatgagtctgattctattatgattgtaaatgatgtattacgctgtttgaatttaaccattcttttaatttctaaacttttgagggattatgatgacttgaagattaacccattgattcaatcttctgatgatcacagtaatgaagacaatcatgtgataatagaacaatacatgcagctttatctcgttccattatttacttctttattattggcccaacaattaaaagaccgtggccaagaaagagatgaaggacataaagagaaagaggaaaatataaatctcatcgggtcttcctctgtcaagaaattattttctcaattgattttttttagctctttgaaattgtgtgaaaatttggtcataaaggaaaaaaatttagcattatatcatttgatcaaattcgcgacaaaggtttctttagatgatttgattttacaaaaaatatccataaacttattgaatcatttgttcttccatcaaattagggatggaagtgatgatgataatttaattaaaaagttatgtttaaaaaatcaactttctttccaagctttgaaagattacatcacattgtggaatgacggttctgaagtttataatgcattttataaggagcttttctatgaagagcaaccaaagattaagccaataaaattaacaacatctgacttgttgaaattattccctgaggatgttcaatttgtgatatccactccaccaaatacaataacttctgcaagcacaagcgataattgtacatcttctcaatctgctgcgcagaaaaatattgaaaactttactacgttatccaagtacgatgtctactcttccacatctttcataccgtccacgtccaaaaacactaacactaacgttagtaagcagcagcagcagcctcaaaactctactccatgttcttccaacaggtttttgttcaacaaaagcagcttaatttctcaggaaagtaatggtagcaacaataacagcggcacacaaggacctggttccatgaatgagagttattctcttgacaattctttcaacacaaccaataccaatatgacgagacaaccaaccaccttaactagagcaaccgatgctatgactacggcacctacgacaccaattccatacaagaacactagtggaagcagcaataacaatttatggattgaaagtcccatgacaaatttcaagggttccaccatcagtaaaagtactaataagagcaaaatggttaatactggtaaaaattatattttagggggccacaataaagttaaaaacaacagtagagctcaaagtatacatatagatgactttgaaaatgagaacaattga

SEQ ID NO: 4083 - DNA, 1515 bp, Saccharomyces cerevisiae
atgcaaagcccatatccaatgacacaagtgtctaacgttgatgatgggtcactattgaaggagagtaaaagcaagtccaaagtagctgcgaagtcagaggcgccaagaccacatgcttgtcctatctgtcatagagcttttcacagactggaacatcagacgagacacatgagaattcatacaggtgagaagcctcacgcgtgtgacttccccggatgtgtgaaaaggttcagtagaagcgatgaactgacgagacacagaagaattcatacaaactcccaccctcgaggtaaaagaggcagaaagaagaaggttgtgggctctccaataaatagtgctagttctagtgctaccagtataccagatttaaatacggcaaatttttcaccgccattaccacagcaacacctatcgcctttaattcctattgctattgctccgaaagaaaattcaagtcgatcttctacaagaaaaggtagaaaaaccaaattcgaaatcggcgaaagtggtgggaatgacccatatatggtttcttctcccaaaacgatggctaagattcccgtctcggtgaagcctccaccttctttagcactgaataatatgaactaccaaacttcatccgcttccactgctttgtcttcgttgagcaatagccatagtggcagtagactgaaactgaacgcgttatcgtccctacaaatgatgacgcccattgctagcagtgcgccaaggactgttttcatagacggtcctgaacagaaacaactacaacaacaacaaaattctctttcaccacgttattccaacactgttatattaccaaggccgcgatctttaacggattttcaaggattgaacaatgcaaatccaaacaacaatggaagtctcagagcacaaactcagagttccgtacagttgaagagaccaagttcagttttaagtttgaacgacttgttggttggccaaagaaataccaacgaatctgactctgattttactactggtggtgaggatgaagaagacggactaaaggacccgtctaactctagtatcgataaccttgagcaagactatttgcaagagcaatcaagaaagaaatctaagacttccacgcccacgacaatgctaagtagatccactagtggtacgaatttgcacactttggggtatgtaatgaaccaaaatcacttgcatttctcctcatcatctcctgatttccaaaaggagttgaacaacagattactgaacgttcaacaacagcagcaagagcaacataccctactgcaatcacaaaatacgtcaaaccaaagtcaaaatcaaaatcaaaatcaaatgatggcttccagtagttcgttaagtacaaccccgttattattgtcaccaagggtgaatatgattaatactgctatatccacccaacaaacccccatttctcagtcggattcacaagttcaagaactggaaacattaccacccataagaagtttaccgttgcccttcccacacatggactga

SEQ ID NO: 4084 - DNA, 1515 bp, Artificial Sequence
  Description of Artificial Sequence: Synthetic polynucleotide
atgcaaagcccatatccaatgacacaagtgtctaacgttgatgatgggtctttgttgaaggagagtaaaagcaagtccaaagtagctgcgaagagtgaggcgccaagaccacatgcttgtcctatctgtcatagagcttttcacagattagaacatcagacgagacacatgagaattcatacaggtgagaagcctcacgcgtgtgacttccccggatgtgtgaaaaggttcagtagaagcgatgaattgacgagacacagaagaattcatacaaactcccaccctcgtggtaaaagaggcagaaagaagaaggttgtgggctctccaataaatagtgctagttctagtgctaccagtataccagatttaaatacggcaaatttttctccgccattaccacagcaacacttgtctcctttaattcctattgctattgctccgaaagaaaatagtagtagatcttctacaagaaaaggtagaaaaaccaaattcgaaatcggcgaaagtggtgggaatgacccatatatggtttcttctcccaaaacgatggctaagattcccgtctctgtgaagcctccaccttctttagcattgaataatatgaactaccaaacttcttccgcttccactgctttgtcttctttgagcaatagccatagtggcagtagattgaaattgaacgcgttatcttccttacaaatgatgacgcccattgctagcagtgcgccaaggactgttttcatagacggtcctgaacagaaacaattacaacaacaacaaaattctctttctccacgttattccaacactgttatattaccaaggccgagatctttaacggattttcaaggattgaacaatgcaaatccaaacaacaatggaagtctcagagcacaaactcagagttccgtacagttgaagagaccaagttctgttttaagtttgaacgacttgttggttggccaaagaaataccaacgaatctgactctgattttactactggtggtgaggatgaagaagacggattgaaggacccgtctaactctagtatcgataaccttgagcaagactatttgcaagagcaatctagaaagaaatctaagacttccacgcccacgacaatgttaagtagatccactagtggtacgaatttgcacactttggggtatgtaatgaaccaaaatcacttgcatttctcctcttcttctcctgatttccaaaaggagttgaacaacagattattaaacgttcaacaacagcagcaagagcaacataccttattacaatctcaaaatacgtccaaccaaagtcaaaatcaaaatcaaaatcaaatgatggcttccagtagttctttaagtacaaccccgttattattgtctccaagggtgaatatgattaatactgctatatccacccaacaaacccccatttctcagagcgattctcaagttcaagaattggaaacattaccacccataagaagtttaccgttgcccttcccacacatggactga

SEQ ID NO: 4085 - DNA, 366 bp, Saccharomyces cerevisiae
atgaatgtagttgccattataatggcttctcaggaaacctgtagcggccgggccccgcgagaaactccagagtggcgtaggccggcttgtttagttgctagcatacttgttcgagctcttgagttctcctggcttttctccacgtgtctgcttgttgcctttgatttcgcgagagactgcggactgccaccccactccgggaaaacctggagtgatggtaaaggccctgcggcgctttctttcggaaaaactaatacgaaagaagcaacaacaaatttttacaacaggctggacgagaaaagtggggaagagcaagcagaaaaaagaaaagagaatagtcgttcttggataatttatttattataa

SEQ ID NO: 4086 - DNA, 366 bp, Artificial Sequence
  Description of Artificial Sequence: Synthetic polynucleotide
atgaatgtagttgccattataatggcttctcaggaaacctgtagcggcagagccccgagagaaactccagagtggcgtaggccggcttgtttagttgctagcatacttgttagagctcttgagttctcctggcttttctccacgtgtttgcttgttgcctttgatttcgcgagagactgcggattaccaccccactccgggaaaacctggagtgatggtaaaggccctgcggcgctttctttcggaaaaactaatacgaaagaagcaacaacaaatttttacaacaggttggacgagaaaagtggggaagagcaagcagaaaaaagaaaagagaatagtcgttcttggataatttatttattatga

SEQ ID NO: 4087 - DNA, 645 bp, Saccharomyces cerevisiae
atggcaccgaaaaagaaatcaaacgatagagccattcaggcaaaaggctcagaagctgaacaattaatagaagattacttggtgtcacaatataaaccattttctgtaaatgatatagttcagaatttgcacaataaagtgacaaaaacaacagcaaccaaagcattagaaaatctcgttaacgagaaacgcatagtgtctaaaaccttcggaaagattataatttactcttgtaatgaacaagatacagcattaccaagcaatattgatccttctcagtttgattttgaaactgtattgcaactgagaaatgatttaatagaactagagagagataaatcaacggccaaagacgctcttgactctgtaactaaagaacctgaaaatgaagatctcctaacaatcattgaaaacgaagaaaacgagttgaaaaagattgaatcaaaattacaaagtctacaggatgattgggatccagcaaatgatgagattgtcaagcggataatgtctgaagatacgctgctacaaaaagaaatcacgaagagatcaaagatttgcaaaaacctaattgctacaataaaggactcagtgtgcccgaaaaatatgaatgaatttttggaagaaattggatttgaggacatttga

SEQ ID NO: 4088 - DNA, 645 bp, Artificial Sequence
  Description of Artificial Sequence: Synthetic polynucleotide
atggcaccgaaaaagaaaagtaacgatagagccattcaggcaaaaggctctgaagctgaacaattaatagaagattacttggtgagtcaatataaaccattttctgtaaatgatatagttcagaatttgcacaataaagtgacaaaaacaacagcaaccaaagcattagaaaatctcgttaacgagaaacgcatagtgtctaaaaccttcggaaagattataatttactcttgtaatgaacaagatacagcattaccaagcaatattgatccttctcagtttgattttgaaactgtattgcaattgagaaatgatttaatagaattagagagagataaatctacggccaaagacgctcttgactctgtaactaaagaacctgaaaatgaagatctccttacaatcattgaaaacgaagaaaacgagttgaaaaagattgaaagtaaattacaaagtttacaggatgattgggatccagcaaatgatgagattgtcaagagaataatgtctgaagatacgttattacaaaaagaaatcacgaagagatccaagatttgcaaaaacttgattgctacaataaaggactctgtgtgcccgaaaaatatgaatgaatttttggaagaaattggatttgaggacatttga

SEQ ID NO: 4089 - DNA, 264 bp, Saccharomyces cerevisiae
atgcagttacttcgctgtttttcaatattttctgttattgcttcagttttagcacaggaactgacaactatatgcgagcaaatcccctcaccaactttagaatcgacgccgtactctttgtcaacgactactattttggccaacgggaaggcaatgcaaggagtttttgaatattacaaatcagtaacgtttgtcagtaattgcggttctcacccctcaacaactagcaaaggcagccccataaacacacagtatgttttttga

SEQ ID NO: 4090 - DNA, 264 bp, Artificial Sequence
  Description of Artificial Sequence: Synthetic polynucleotide
atgcagttacttcgctgtttttccatattttctgttattgcttctgttttagcacaggaattaacaactatatgcgagcaaatcccctctccaactttagaaagtacgccgtactctttgagcacgactactattttggccaacgggaaggcaatgcaaggagtttttgaatattacaaatctgtaacgtttgtcagtaattgcggttctcacccctccacaactagcaaaggcagccccataaacacacagtatgttttttga

SEQ ID NO: 4091 - DNA, 468 bp, Saccharomyces cerevisiae
atgaaggttgaaatcgattctttttcaggtgccaaaatctacccaggcagaggtaccttgtttgtccgtggtgactccaaaatcttcagattccaaaactccaaatctgcctctttgttcaagcaaagaaagaacccaagaagaatcgcttggactgtcttattcagaaagcatcacaagaagggtatcaccgaagaagttgctaagaagagatctagaaaaaccgttaaggcccaaagaccaattaccggtgcttctttggacttgatcaaggaaagaagatctttgaagccagaagttagaaaggctaacagagaagaaaaattgaaggccaacaaagaaaagaagaaggctgaaaaggctgctagaaaggctgaaaaggctaagtctgctggtactcaaagttctaagttctccaagcaacaagctaagggtgctttccaaaaggttgctgctacttctcgttaa

SEQ ID NO: 4092 - DNA, 468 bp, Artificial Sequence
  Description of Artificial Sequence: Synthetic polynucleotide
atgaaggttgaaatcgattctttttctggtgccaaaatctacccaggcagaggtaccttgtttgtccgtggtgactccaaaatcttcagattccaaaactccaaatctgcctctttgttcaagcaaagaaagaacccaagaagaatcgcttggactgtcttattcagaaagcatcacaagaagggtatcaccgaagaagttgctaagaagagatctagaaaaaccgttaaggcccaaagaccaattaccggtgcttctttggacttgatcaaggaaagaagatctttgaagccagaagttagaaaggctaacagagaagaaaaattgaaggccaacaaagaaaagaagaaggctgaaaaggctgctagaaaggctgaaaaggctaagtctgctggtactcaaagttctaagttctccaagcaacaagctaagggtgctttccaaaaggttgctgctacttctcgttga

SEQ ID NO: 4093 - DNA, 318 bp, Saccharomyces cerevisiae
atggccccagttaaatcccaagaatctatcaaccaaaagttggctttggttatcaagtctggtaagtacaccttaggttacaagtccactgtcaagtctttgagacaaggtaagtctaagttgatcatcattgccgctaacactccagttttgagaaagtccgaattggaatattacgctatgttgtccaagactaaggtctactacttccaaggtggtaacaacgaattgggtactgctgtcggtaagttattcagagtcggtgttgtctctattttggaagctggtgactctgatatcttgaccaccttggcttaa

SEQ ID NO: 4094 - DNA, 318 bp, Artificial Sequence
  Description of Artificial Sequence: Synthetic polynucleotide
atggccccagttaaatcccaagaatctatcaaccaaaagttggctttggttatcaagtctggtaagtacaccttaggttacaagtccactgtcaagtctttgagacaaggtaagtctaagttgatcatcattgccgctaacactccagttttgagaaagtccgaattggaatattacgctatgttgtccaagactaaggtctactacttccaaggtggtaacaacgaattgggtactgctgtcggtaagttattcagagtcggtgttgtctctattttggaagctggtgactctgatatcttgaccaccttggcttga

SEQ ID NO: 4095 - DNA, 363 bp, Saccharomyces cerevisiae
atggtgaatgaaacaggagaaagtcaaaaagcggcaaaaggcactccagttagtgggaaggtatggaaggcagaaaagacaccgctgagggccaaaagcagagtcgttaagaacaagaagttaacatcatgggagttgaaaaaacaaaaaagactcgaagataaacagttcaaagaaagattgaaggctttgaaggatgagaaggaagaagctcgtcaagctaaaataaccatgttaaaggaaagaagagagaagaaggaagagaatgaaagatacgaacgtttggctgctaagatgcatgctaagaaggttgaaagaatgagaagaagagagaaaaggaacaaggctttaaaagaacgttag

SEQ ID NO: 4096 - DNA, 363 bp, Artificial Sequence
  Description of Artificial Sequence: Synthetic polynucleotide
atggtgaatgaaacaggagaaagtcaaaaagcggcaaaaggcactccagttagtgggaaggtatggaaggcagaaaagacaccgttaagggccaaaagcagagtcgttaagaacaagaagttaacatcttgggagttgaaaaaacaaaaaagactcgaagataaacagttcaaagaaagattgaaggctttgaaggatgagaaggaagaagctcgtcaagctaaaataaccatgttaaaggaaagaagagagaagaaggaagagaatgaaagatacgaacgtttggctgctaagatgcatgctaagaaggttgaaagaatgagaagaagagagaaaaggaacaaggctttaaaagaacgttga

SEQ ID NO: 4097 - DNA, 1629 bp, Saccharomyces cerevisiae
atgatttcacccataagctttctatcatcgctgctatgcttaacttatctaacctcagctttaccgattcttcctaagagagaagttgtaacgagagttcacacagcaagcacaactaatgttgtgactgatttttactccactactaccgaagttgttattgccccaactgtcgaattcctaataagcgatagtgttacctttacaacaaccttaattccacaaggtgtgaacccaacagctgaaccaactacgactatcactaaagttctcttaaaaaaggctgaaatgagtacatcttcgcagccaacctctactttgcagccaagcactattccacaatcaacctcctcttttcaagcagaatctactttgcaagccgtctctacgcaacaaactgctatgtctgtttctgcaggtactagtgaggatgtgcaacaattagctactacttctacctctatctcctcctctccttcccctaccactacgtctacttccacacaaaatatcgtgagtggtgtcggtgaagccaatgttgaaggcaacactcaaagtcagcatcattcttaccaagcagctgcgacttcaactttgaatcaacaaacgagtacctcaattgcttctcaggagtccaccgaatcaaccaatacacctacgtcgtcctctacgtcgtcctctacttcttcttctacttcttcttctacttcttcctctacttcttcttctacttcttcctctacttcgtcctctacttcgtcctctacttcatccacacaggaaacagccgctaccacctctgaaggttcctctagtagcagcgctgctataacttcttctccaaaggctattgcatattcaccatataatgatgatggctcttgtaagtctgcagacgctgtctcttctgacttaacgttgatcaaatctaaaggtatttccaaaatccgtgtttatggcaccgactgtaattcctttgaaaccgtccaaccagcagccgtaaaactaggtattaagattaaccaaggtttgtatatcaccagtagcggcgttgattccatagatgattctgttaccacattgattcaatatggtcaaactaacggttgggatgtctttgatttcattactgttggaaatgaagctatcaataatggttggtgttcagtttctgatttgattagtaaaatttcctctgtcaaatccaaattaagcgaagctggctattctggccaaattactaccagtgagccccctgtctcatttgaaaataaccctgatttgtgcaaaaaatctgatattgacttcgttggtatcaacccacatgcctactttgatactagcgccagtgctgaaactgccggtacatttgttaagggtcaagttgaattaattcaaggtgtttgtggtacttctaatgttttcgtcacggaaacaggttacccatcgtctggtattcaaaatggaggcaacattccatccactgctaaccaaattactgcagtccaaaacatcttgaatgaaatggacttggatgttacaatcttatcgacttacaatgattactggaaggctcccggtgattacggtatcgaacaatctttcggtgtgattgaatattttccataa

SEQ ID NO: 4098 - DNA, 1629 bp, Artificial Sequence
  Description of Artificial Sequence: Synthetic polynucleotide
atgatttctcccataagctttttatcttctttattatgcttaacttatttgaccagtgctttaccgattcttcctaagagagaagttgtaacgagagttcacacagcaagcacaactaatgttgtgactgatttttactccactactaccgaagttgttattgccccaactgtcgaattcttgataagcgatagtgttacctttacaacaaccttaattccacaaggtgtgaacccaacagctgaaccaactacgactatcactaaagttctcttaaaaaaggctgaaatgagtacatcttctcagccaacctctactttgcagccaagcactattccacaatccacctcctcttttcaagcagaatctactttgcaagccgtctctacgcaacaaactgctatgtctgtttctgcaggtactagtgaggatgtgcaacaattagctactacttctacctctatctcctcctctccttcccctaccactacgtctacttccacacaaaatatcgtgagtggtgtcggtgaagccaatgttgaaggcaacactcaaagtcagcatcattcttaccaagcagctgcgacttctactttgaatcaacaaacgagtacctctattgcttctcaggagtccaccgaaagtaccaatacacctacgtcttcctctacgtcttcctctacttcttcttctacttcttcttctacttcttcctctacttcttcttctacttcttcctctacttcttcctctacttcttcctctacttcttccacacaggaaacagccgctaccacctctgaaggttcctctagtagcagcgctgctataacttcttctccaaaggctattgcatattctccatataatgatgatggctcttgtaagtctgcagacgctgtctcttctgacttaacgttgatcaaatctaaaggtatttccaaaatccgtgtttatggcaccgactgtaattcctttgaaaccgtccaaccagcagccgtaaaattgggtattaagattaaccaaggtttgtatatcaccagtagcggcgttgattccatagatgattctgttaccacattgattcaatatggtcaaactaacggttgggatgtctttgatttcattactgttggaaatgaagctatcaataatggttggtgttctgtttctgatttgattagtaaaatttcctctgtcaaatccaaattaagcgaagctggctattctggccaaattactaccagtgagccccctgtcagttttgaaaataaccctgatttgtgcaaaaaatctgatattgacttcgttggtatcaacccacatgcctactttgatactagcgccagtgctgaaactgccggtacatttgttaagggtcaagttgaattaattcaaggtgtttgtggtacttctaatgttttcgtcacggaaacaggttacccatcttctggtattcaaaatggaggcaacattccatccactgctaaccaaattactgcagtccaaaacatcttgaatgaaatggacttggatgttacaatcttatctacttacaatgattactggaaggctcccggtgattacggtatcgaacaatctttcggtgtgattgaatattttccatga

SEQ ID NO: 4099 - DNA, 2502 bp, Saccharomyces cerevisiae
atgcttatttcaaaatctaagatgtttaaaacattttggatactaaccagcatagttctcctggcatctgccaccgttgatattagtaaactacaagaattcgaagaatatcaaaagttcacgaatgaatctttactgtgggcaccgtatagatccaattgttactttggtatgaggcccagatatgtccatgaaagtccactaattatgggtatcatgtggttcaacagtttgagtcaggatggcttacattcgttaagacattttgcaacgcctcaggataaattgcaaaagtatggttgggaagtgtatgatccaagaattggtggtaaagaagtttttattgatgaaaaaaataacttgaacttgactgtttattttgtaaagagcaagaacggggaaaattggtcagtgagagttcaaggtgagcctttggatcccaagagaccatctacagcatctgtcgtattgtactttagtcaaaatggtggcgagatagatggaaaatcttccttagcaatgataggtcatgacggccctaatgacatgaaattcttcggatattctaaagaattaggcgagtatcatcttacagtaaaggacaattttggtcactacttcaaaaatccggaatatgaaaccatggaagtagcaccaggaagtgactgctctaaaacaagtcatttatcacttcaaatcccggataaagaagtttggaaggctcgtgatgttttccaatctctagttagcgattcgatacgtgatatactggaaaaggaagagacaaagcagcgtcctgctgatttaataccaagtgttttaactattagaaatttgtacaattttaatcctggtaattttcattatatacaaaagacatttgatttgaccaaaaaagatgggttccaatttgatatcacttacaataaacttggcactactcaaagtatttccaccagggaacaagttacggagttgattacttggtcactaaatgagataaacgcgcgttttgataagcagtttagttttggagaaggtcccgactcaattgaaagcgtggaggtcaaaagaagatttgctttagagacgctatcaaacctattaggaggaatcggttatttctatgggaatcaactaattgatcgtgaaacagaatttgatgagagccagtttacagagatcaaactgctgaatgcaaaagaggaaggtccatttgaactgtttaccagcgttccgagccgtggctttttcccacgtggattctattgggatgaaggtttccatcttctacaaattatggagtatgattttgaccttgcctttgaaatcttagcgagctggtttgaaatgatcgaagatgatagtggttggattgctagagaaattatactgggtaatgaggcaaggagtaaagttccgcaggaatttcaggtgcaaaatcccaatattgctaatccgccaactttattgctagcatttagtgaaatgctttctagggccattgaaaacatcggcgatttcaacagtgacagctaccaccaagtcatgttcaatagtaggacagccaagtttatgacgaacaatctagaagccaatcctggcttgctaaccgaatatgccaagaaaatttatcctaagctattgaagcactataattggttcagaaaatctcaaacaggacttattgatgaatatgaggaaatattggaagatgaaggaatatgggataagattcataagaacgaagtttatagatgggttgggcgtaccttcactcattgtttgccaagcggtatggatgactatcctagagcacaaccaccagatgtagcagaattgaacgtagacgcattagcatgggtgggcgttatgacaagatccatgaagcaaattgctcacgtgttgaagttaacacaggacgagcaaagatatgcacaaattgagcaagaggtggtcgagaatctggatttgttacactggagtgaaaatgacaattgctactgtgatattagcatcgatccagaagacgatgagattagggagtttgtatgtcatgagggttacgtctccgtattgccctttgcattgaagctaatccccaaaaactcacccaagctagagaaagtagttgctttgatgagtgacccagaaaaaatcttttcagactacgggctgttatcactatcgagacaagacgactatttcggcaaggatgaaaactattggagaggcccaatttggatgaatattaattacttgtgtcttgacgcaatgagatactactacccagaggtgattctcgacgtggctggtgaggctagcaatgccaagaaactgtaccaaagtttaaagattaatctcagtaacaacatatacaaagtttgggaagaacaaggttattgttatgaaaattacagtccgatagatggtcatggtactggtgctgagcatttcacaggctggacagcacttgttgtcaacatccttggacgcttctga

SEQ ID NO: 4100 - DNA, 2502 bp, Artificial Sequence
  Description of Artificial Sequence: Synthetic polynucleotide
atgcttatttccaaatctaagatgtttaaaacattttggatattgaccagcatagttctcttagcatctgccaccgttgatattagtaaattacaagaattcgaagaatatcaaaagttcacgaatgaatctttattatgggcaccgtatagatccaattgttactttggtatgaggcccagatatgtccatgaaagtccattgattatgggtatcatgtggttcaacagtttgagtcaggatggcttacattctttaagacattttgcaacgcctcaggataaattgcaaaagtatggttgggaagtgtatgatccaagaattggtggtaaagaagtttttattgatgaaaaaaataacttgaacttgactgtttattttgtaaagagcaagaacggggaaaattggtctgtgagagttcaaggtgagcctttggatcccaagagaccatctacagcatctgtcgtattgtactttagtcaaaatggtggcgagatagatggaaaatcttccttagcaatgataggtcatgacggccctaatgacatgaaattcttcggatattctaaagaattaggcgagtatcatcttacagtaaaggacaattttggtcactacttcaaaaatccggaatatgaaaccatggaagtagcaccaggaagtgactgctctaaaacaagtcatttatctcttcaaatcccggataaagaagtttggaaggctcgtgatgttttccaatctttggttagcgattctatacgtgatatattggaaaaggaagagacaaagcagcgtcctgctgatttaataccaagtgttttaactattagaaatttgtacaattttaatcctggtaattttcattatatacaaaagacatttgatttgaccaaaaaagatgggttccaatttgatatcacttacaataaacttggcactactcaaagtatttccaccagggaacaagttacggagttgattacttggtctttgaatgagataaacgcgcgttttgataagcagtttagttttggagaaggtcccgacagtattgaaagcgtggaggtcaaaagaagatttgctttagagacgttatctaacttattaggaggaatcggttatttctatgggaatcaattgattgatcgtgaaacagaatttgatgagagccagtttacagagatcaaattattgaatgcaaaagaggaaggtccatttgaattatttaccagcgttccgagccgtggctttttcccacgtggattctattgggatgaaggtttccatcttttacaaattatggagtatgattttgaccttgcctttgaaatcttagcgagctggtttgaaatgatcgaagatgatagtggttggattgctagagaaattatattaggtaatgaggcaaggagtaaagttccgcaggaatttcaggtgcaaaatcccaatattgctaatccgccaactttattgttggcatttagtgaaatgctttctagggccattgaaaacatcggcgatttcaacagtgacagctaccaccaagtcatgttcaatagtaggacagccaagtttatgacgaacaatttggaagccaatcctggcttgttgaccgaatatgccaagaaaatttatcctaagttgttgaagcactataattggttcagaaaatctcaaacaggacttattgatgaatatgaggaaatattggaagatgaaggaatatgggataagattcataagaacgaagtttatagatgggttgggcgtaccttcactcattgtttgccaagcggtatggatgactatcctagagcacaaccaccagatgtagcagaattgaacgtagacgcattagcatgggtgggcgttatgacaagatccatgaagcaaattgctcacgtgttgaagttaacacaggacgagcaaagatatgcacaaattgagcaagaggtggtcgagaatttggatttgttacactggagtgaaaatgacaattgctactgtgatattagcatcgatccagaagacgatgagattagggagtttgtatgtcatgagggttacgtctccgtattgccctttgcattgaagttaatccccaaaaactctcccaagttggagaaagtagttgctttgatgagtgacccagaaaaaatcttttctgactacgggttattaagtttatctagacaagacgactatttcggcaaggatgaaaactattggagaggcccaatttggatgaatattaattacttgtgtcttgacgcaatgagatactactacccagaggtgattctcgacgtggctggtgaggctagcaatgccaagaaactttaccaaagtttaaagattaatctcagtaacaacatatacaaagtttgggaagaacaaggttattgttatgaaaattacagtccgatagatggtcatggtactggtgctgagcatttcacaggctggacagcacttgttgtcaacatccttggacgcttctga

SEQ ID NO: 4101 - DNA, 2124 bp, Saccharomyces cerevisiae
atgtcagaacaactcagacaaacatttgctaacgctaaaaaagaaaacaggaacgccttggtcacatttatgaccgcaggttacccaacagtcaaagacactgtccctattctcaagggtttccaggatggtggtgtagatatcatcgaattgggtatgcccttctctgatccaattgcagatggtcctacaattcaattatctaatactgtggctttgcaaaacggtgttaccttgcctcaaactctagaaatggtctcccaagctagaaatgaaggtgttaccgtacccataatcctaatgggttactataaccctattctaaactacggtgaagaaagatttattcaggacgctgccaaggctggtgctaatggttttatcatcgtcgatttgccaccagaggaggcgttgaaggtcagaaactacatcaatgataatggtttgagcctgatcccactagtggctccttctaccaccgacgaaagattggaattactatcgcatattgccgattcgtttgtctacgttgtgtctagaatgggtactactggtgttcaaagttctgtggccagtgatttggatgaactcatctctagagtcagaaagtacaccaaggatactcctttggccgttgggtttggtgtctctaccagagaacatttccaatcagttggtagtgttgctgacggtgtagtgattggttccaaaatcgtcacattatgtggagatgctccagagggcaaaaggtacgacgttgctaaggaatatgtacagggaattctaaatggtgctaagcataaggttctgtccaaggacgaattctttgcctttcaaaaagagtccttgaagtccgcaaacgttaagaaggaaatactggacgaatttgatgaaaatcacaagcacccaattagatttggggactttggtggtcagtatgtcccagaagctcttcatgcatgtctaagagagttggaaaagggttttgatgaagctgtcgccgatcccacattctgggaagacttcaaatccttgtattcttatattggccgtccttcttcactacacaaagctgagagattaactgagcattgtcaaggtgctcaaatctggttgaagagagaagatcttaaccacacgggatctcacaagatcaacaatgctttagcacaagttcttctagctaaaagattaggcaagaagaacgttattgctgaaaccggtgctggtcaacacggtgttgccactgccactgcatgtgctaaatttggcttaacctgtactgtgttcatgggtgcagaagatgttcgtcgccaagctttaaacgtcttcagaatgagaattctcggtgctaaagtaattgctgttactaatggtacaaagactctaagagacgctacttcagaggcattcagattttgggttactaacttgaaaactacttactacgtcgtcggttctgccattggtcctcacccatatccaactttggttagaactttccaaagtgtcattggtaaagaaaccaaggaacagtttgctgccatgaacaatggtaaattacctgacgcagttgttgcatgtgttgggggtggttccaactctacaggtatgttttcaccattcgagcatgatacttccgttaagttattgggtgtggaagccggtggtgatggtgtagatacaaagttccactctgctactctaactgccggtagacctggtgtcttccatggtgtcaagacttatgtcttgcaagatagtgatggtcaagtccatgatactcattctgtttctgctgggttagactacccaggtgtcggtccagaattggcatattggaaatctactggccgtgctcaattcattgcagctactgacgctcaggctctgcttggctttaaattattatctcaattagaaggtattattcccgctttggaatcttctcatgctgtttatggcgcttgcgaattggctaagacgatgaagcctgatcaacatttggttatcaatatttctggtagaggtgataaagatgtccaaagtgtcgctgaagtcttgccgaaattaggtccaaagataggttgggatttgagattcgaagaagacccatctgcctaa

SEQ ID NO: 4102 - DNA, 2124 bp, Artificial Sequence
  Description of Artificial Sequence: Synthetic polynucleotide
atgtctgaacaactcagacaaacatttgctaacgctaaaaaagaaaacaggaacgccttggtcacatttatgaccgcaggttacccaacagtcaaagacactgtccctattctcaagggtttccaggatggtggtgtagatatcatcgaattgggtatgcccttctctgatccaattgcagatggtcctacaattcaattatctaatactgtggctttgcaaaacggtgttaccttgcctcaaactttggaaatggtctcccaagctagaaatgaaggtgttaccgtacccataatcttgatgggttactataaccctattttgaactacggtgaagaaagatttattcaggacgctgccaaggctggtgctaatggttttatcatcgtcgatttgccaccagaggaggcgttgaaggtcagaaactacatcaatgataatggtttgagcttaatcccattggtggctccttctaccaccgacgaaagattggaattattatctcatattgccgattcttttgtctacgttgtgtctagaatgggtactactggtgttcaaagttctgtggccagtgatttggatgaactcatctctagagtcagaaagtacaccaaggatactcctttggccgttgggtttggtgtctctaccagagaacatttccaatctgttggtagtgttgctgacggtgtagtgattggttccaaaatcgtcacattatgtggagatgctccagagggcaaaaggtacgacgttgctaaggaatatgtacagggaattttgaatggtgctaagcataaggttttatccaaggacgaattctttgcctttcaaaaagagtccttgaagtccgcaaacgttaagaaggaaatattggacgaatttgatgaaaatcacaagcacccaattagatttggggactttggtggtcagtatgtcccagaagctcttcatgcatgtttgagagagttggaaaagggttttgatgaagctgtcgccgatcccacattctgggaagacttcaaatccttgtattcttatattggccgtccttcttctttacacaaagctgagagattaactgagcattgtcaaggtgctcaaatctggttgaagagagaagatcttaaccacacgggatctcacaagatcaacaatgctttagcacaagttcttttagctaaaagattaggcaagaagaacgttattgctgaaaccggtgctggtcaacacggtgttgccactgccactgcatgtgctaaatttggcttaacctgtactgtgttcatgggtgcagaagatgttcgtcgccaagctttaaacgtcttcagaatgagaattctcggtgctaaagtaattgctgttactaatggtacaaagactttgagagacgctacttccgaggcattcagattttgggttactaacttgaaaactacttactacgtcgtcggttctgccattggtcctcacccatatccaactttggttagaactttccaaagtgtcattggtaaagaaaccaaggaacagtttgctgccatgaacaatggtaaattacctgacgcagttgttgcatgtgttgggggtggttccaactctacaggtatgttttctccattcgagcatgatacttccgttaagttattgggtgtggaagccggtggtgatggtgtagatacaaagttccactctgctactttaactgccggtagacctggtgtcttccatggtgtcaagacttatgtcttgcaagatagtgatggtcaagtccatgatactcattctgtttctgctgggttagactacccaggtgtcggtccagaattggcatattggaaatctactggccgtgctcaattcattgcagctactgacgctcaggctttacttggctttaaattattatctcaattagaaggtattattcccgctttggaatcttctcatgctgtttatggcgcttgcgaattggctaagacgatgaagcctgatcaacatttggttatcaatatttctggtagaggtgataaagatgtccaaagtgtcgctgaagtcttgccgaaattaggtccaaagataggttgggatttgagattcgaagaagacccatctgcctga

SEQ ID NO: 4103 - DNA, 1194 bp, Saccharomyces cerevisiae
atggactcgattataccggcaggcgtcaagctagatgatttacaagtgatattggctaagaacgagaatgaaaccagggacaaagtgtgtaagcagatcaacgaagcacgcgatgaaattctgccgttgcgattgcagttcaatgaattcatacagataatggcaaacatagaccaagaaggatccaagcaggctgaccgtatggccaaatacctacatatcagagacaagattttgcaactgaacgatagattccagactttgtcttcgcatttagaagcactgcaacctttattcagcactgtaccagaatacttgaagactgcagataacagggacagaagtttccagcttttggaaccgttgagtacttataacaaaaatggcaacgccgtttgctcgacagcaactgttgtaagcaccaaccactctgcggccgcttcgacacccaccacaactgccacccctcatgcaaatcccatcacacatgcgcactcgctttcgaatccaaatagcaccgctacaatgcaacataatcccctggccggcaagagaggtccaaaaagcggtagtactatgggaactccaaccgtacataatagcactgcagctgcaccgattgcggcacctaaaaagccaagaaaaccaagacaaaccaagaaggcaaaggctcaagctcaggctcaagcgcaggctcaagcgcaggtctacgcacagcagtcgactgtccagacgccaataacagcatcgatggcagccgcgctacccaacccaactcctagcatgattaacagcgtttcgcccacaaatgttatgggcacgccgctgaccaacatgatgtctcccatggggaacgcatactcaatgggagctcaaaaccaagggggacaagtatctatgtcacaattcaatggcagcggcaatggatccaatccaaatacaaatacaaactccaataacaccccgctacagtcacaattaaacctaaacaatctaacccctgctaatatcctaaatatgagcatgaataacgatttccagcagcagcagcaacagcaacagcagcagcagcagcctcaaccacagtacaatatgaatatgggcatgaataacatgaataacggggggaaagaactggattctctagacctgaacaatctggaattaggtggtctgaacatggatttcttgtga

SEQ ID NO: 4104 - DNA, 1194 bp, Artificial Sequence
  Description of Artificial Sequence: Synthetic polynucleotide
atggacagtattataccggcaggcgtcaagttggatgatttacaagtgatattggctaagaacgagaatgaaaccagggacaaagtgtgtaagcagatcaacgaagcacgcgatgaaattttaccgttgagattgcagttcaatgaattcatacagataatggcaaacatagaccaagaaggatccaagcaggctgaccgtatggccaaatacttgcatatcagagacaagattttgcaattgaacgatagattccagactttgtcttctcatttagaagcattacaacctttattcagcactgtaccagaatacttgaagactgcagataacagggacagaagtttccagcttttggaaccgttgagtacttataacaaaaatggcaacgccgtttgctccacagcaactgttgtaagcaccaaccactctgcggccgcttctacacccaccacaactgccacccctcatgcaaatcccatcacacatgcgcactccctttctaatccaaatagcaccgctacaatgcaacataatcccttagccggcaagagaggtccaaaaagcggtagtactatgggaactccaaccgtacataatagcactgcagctgcaccgattgcggcacctaaaaagccaagaaaaccaagacaaaccaagaaggcaaaggctcaagctcaggctcaagcgcaggctcaagcgcaggtctacgcacagcagtctactgtccagacgccaataacagcatctatggcagccgcgttgcccaacccaactcctagcatgattaacagcgtttctcccacaaatgttatgggcacgccgttaaccaacatgatgtctcccatggggaacgcatactccatgggagctcaaaaccaagggggacaagtatctatgtctcaattcaatggcagcggcaatggatccaatccaaatacaaatacaaactccaataacaccccgttgcagtctcaattaaacttgaacaatttgacccctgctaatatcttgaatatgagcatgaataacgatttccagcagcagcagcaacagcaacagcagcagcagcagcctcaaccacagtacaatatgaatatgggcatgaataacatgaataacggggggaaagaattagattctttggacttgaacaatttggaattaggtggtttgaacatggatttcttgtga

SEQ ID NO: 4105 - DNA, 1908 bp, Saccharomyces cerevisiae
atgactgcgttgcatagtgtgtccaaaacgcccgcgatcaaggaagaggaggaggacggtgatgagcgagacggcagaggagttcccctgggaccaaggaaccatgactaccgtggcaggaaaggtgatgaggaaagcggtgctgacaccgtgacatctcccatcacgtttgaaaagaagaagatagcgcccagggcgtcaacgcattccgaacagagtattttgagcagcatctcattgaaatcgatggtaaatcaacatcgtcagcagcagttgcagcaagagagctcaacaggggcaggcactgggtttgttgacagaaagcagcagatccaatctccggcgatggtgtccatattgaggaagaactctgctgaggagaatgttcgcagcagccacagtagcaagctcggtgaagggcagatagatggtaggaaggcttctgctagtaaggagatcggcaagacgttgccattcacggatgaccaaagatcgaaccctgaactagatcccaccaatagcgtggtggatgttagcaggggcaagaatacaaagagcaaaactgtgttcaatgagttagaagatgatgccgatgacgatgacgaggttcgacaaaagaatctaaccacgcaggcgttacgcaagttgtcgtcgttcaaaatgaatgctagttctaatttgaggttgagtaaagaaaacaaggcgaaagagtcttcatcttcgtccacgtcttcagtgtcgtcatcgtcgacgtcgaaggtggaaaatattgtcgacaagctgactacaacgaattctagctcgatgtcccaactgcggtttggcaacacgaacgtcattattgattcggtgaatcatgcggcgaaaccgccgcatcagcagatgctaaggaaaccctcgctggaatttttaccgcagcctgcttcgagcactaatctgaattttaattccaataaacataaatcaaatgtaagacagatcagtaaccctaaaaaaccgctatacatccccgccgtgctgaggaaagtttcagagacaaacataactaatgacgatctgttgaatgcaacattgtcgtcttactacaagaaggcatctaacctggaacatggctttaatccaagcaagtcgcaatccgctagcgttcagaatgcgaacaacctacggatcatatcttctcaatccagcgtacaatccaacacatcgtcaatcttggaaagctacaaaaacaaaatatcctcgtacttgttcccgaattctattccgaacagcgacagaatcaacttaataccaactatttcaaacagaaactctgccagagtaaacccgcccactaaggaccactggattccggacagtaagaggaattcttgtcgttactgccataagccttttaccctgtgggaaaggaaacatcattgcaggcattgcggggacatcttttgtcaagaccatttgcgccattggctgtacctggactcgcaggcaaattttataatgatcaacgaactaaacaacggtggcataaatggcggtggcactctctgtaaaatatgcgatgactgtctggtcgagtacgagaacctttcaaccacgaaccataacgcaaacacgaacgaggataacataaacgttgaggagggcgaagatgacgataatgacaataggaagaaattacgcaattactacaagaataggcagatgaacgctcttttcagaccaaagaagggcggttcgtcccaagagcatgccacggttgatcgagacacaacaacgcccatccaggtgaagtcgaacgacgaagaagcagataatgagaatacggggggagaacaagaagaaggtaatgatgttttgggcagtgttatcggctctgtgcctgcaaactggaattggagtagtttctga

SEQ ID NO: 4106 - DNA, 1908 bp, Artificial Sequence
  Description of Artificial Sequence: Synthetic polynucleotide
atgactgcgttgcatagtgtgtccaaaacgcccgcgatcaaggaagaggaggaggacggtgatgagagagacggcagaggagttcccttaggaccaaggaaccatgactaccgtggcaggaaaggtgatgaggaaagcggtgctgacaccgtgacatctcccatcacgtttgaaaagaagaagatagcgcccagggcgtctacgcattccgaacagagtattttgagcagcatctctttgaaatctatggtaaatcaacatcgtcagcagcagttgcagcaagagagctctacaggggcaggcactgggtttgttgacagaaagcagcagatccaatctccggcgatggtgtccatattgaggaagaactctgctgaggagaatgttcgcagcagccacagtagcaagctcggtgaagggcagatagatggtaggaaggcttctgctagtaaggagatcggcaagacgttgccattcacggatgaccaaagatctaaccctgaattagatcccaccaatagcgtggtggatgttagcaggggcaagaatacaaagagcaaaactgtgttcaatgagttagaagatgatgccgatgacgatgacgaggttcgtcaaaagaatttgaccacgcaggcgttacgcaagttgtcttctttcaaaatgaatgctagttctaatttgaggttgagtaaagaaaacaaggcgaaagagtcttcttcttcttccacgtcttctgtgtcttcttcttctacgtccaaggtggaaaatattgtcgacaagttgactacaacgaattctagcagtatgtcccaattaagatttggcaacacgaacgtcattattgattctgtgaatcatgcggcgaaaccgccgcatcagcagatgttaaggaaaccctctttggaatttttaccgcagcctgcttctagcactaatttgaattttaattccaataaacataaatctaatgtaagacagatcagtaaccctaaaaaaccgttgtacatccccgccgtgttaaggaaagtttctgagacaaacataactaatgacgatttattgaatgcaacattgtcttcttactacaagaaggcatctaacttggaacatggctttaatccaagcaagtctcaatccgctagcgttcagaatgcgaacaacttgagaatcatatcttctcaatccagcgtacaatccaacacatcttctatcttggaaagctacaaaaacaaaatatcctcttacttgttcccgaattctattccgaacagcgacagaatcaacttaataccaactatttccaacagaaactctgccagagtaaacccgcccactaaggaccactggattccggacagtaagaggaattcttgtcgttactgccataagccttttaccttatgggaaaggaaacatcattgcaggcattgcggggacatcttttgtcaagaccatttgcgccattggttatacttggactctcaggcaaattttataatgatcaacgaattgaacaacggtggcataaatggcggtggcactctctgtaaaatatgcgatgactgtttggtcgagtacgagaacctttctaccacgaaccataacgcaaacacgaacgaggataacataaacgttgaggagggcgaagatgacgataatgacaataggaagaaattacgcaattactacaagaataggcagatgaacgctcttttcagaccaaagaagggcggttcttcccaagagcatgccacggttgatagagacacaacaacgcccatccaggtgaagtctaacgacgaagaagcagataatgagaatacggggggagaacaagaagaaggtaatgatgttttgggcagtgttatcggctctgtgcctgcaaactggaattggagtagtttctga

SEQ ID NO: 4107 - DNA, 2157 bp, Saccharomyces cerevisiae
atgggatccgaccggtcgtgtgttttgtctgtgtttcagaccatcctcaagctcgtcatcttcgtggcgatttttggggctgccatatcatcacgtttgtttgcagtcatcaaatttgagtctattatccatgaattcgacccctggttcaattatagggctaccaaatatctcgtcaacaattcgttttacaagtttttgaactggtttgacgaccgtacctggtaccccctcggaagggttactggagggactttatatcctggtttgatgacgactagtgcgttcatctggcacgccctgcgcaactggttgggcttgcccattgacatcagaaacgtttgtgtgctatttgcgccactattttctggggtcaccgcctgggcgacttacgaatttacgaaagagattaaagatgccagcgctgggcttttggctgctggttttatagccattgtccccggttatatatctagatcagtggcggggtcctacgataatgaggccattgccattacactattaatggtcactttcatgttttggattaaggcccaaaagactggctctatcatgcacgcaacgtgtgcagctttattctacttctacatggtgtcggcttggggtggatacgtgttcatcaccaacttgatcccactccatgtctttttgctgattttgatgggcagatattcgtccaaactgtattctgcctacaccacttggtacgctattggaactgttgcatccatgcagatcccatttgtcggtttcctacctatcaggtctaacgaccacatggccgcattgggtgttttcggtttgattcagattgtcgccttcggtgacttcgtgaagggccaaatcagcacagctaagtttaaagtcatcatgatggtttctctgtttttgatcttggtccttggtgtggtcggactttctgccttgacctatatggggttgattgccccttggactggtagattttattcgttatgggataccaactacgcaaagatccacattcctatcattgcctccgtttccgaacatcaacccgtttcgtggcccgctttcttctttgatacccactttttgatctggctattccccgccggtgtattcctactattcctcgacttgaaagacgagcacgtttttgtcatcgcttactccgttctgtgttcgtactttgccggtgttatggttagattgatgttgactttgacaccagtcatctgtgtgtccgccgccgtcgcattgtccaagatatttgacatctacctggatttcaagacaagtgaccgcaaatacgccatcaaacctgcggcactactggccaaattgattgtttccggatcattcatcttttatttgtatcttttcgtcttccattctacttgggtaacaagaactgcatactcttctccttctgttgttttgccatcacaaaccccagatggtaaattggcgttgatcgacgacttcagggaagcgtactattggttaagaatgaactctgatgaggacagtaaggttgcagcgtggtgggattacggttaccaaattggtggcatggcagacagaaccactttagtcgataacaacacgtggaacaatactcacatcgccatcgttggtaaagccatggcttcccctgaagagaaatcttacgaaattctaaaagagcatgatgtcgattatgtcttggtcatctttggtggtctaattgggtttggtggtgatgacatcaacaaattcttgtggatgatcagaattagcgagggaatctggccagaagagataaaagagcgtgatttctataccgcagagggagaatacagagtagatgcaagggcttctgagaccatgaggaactcgctactttacaagatgtcctacaaagatttcccacaattattcaatggtggccaagccactgacagagtgcgtcaacaaatgatcacaccattagacgtcccaccattagactacttcgacgaagtttttacttccgaaaactggatggttagaatatatcaattgaagaaggatgatgcccaaggtagaactttgagggacgttggtgagttaaccaggtcttctacgaaaaccagaaggtccataaagagacctgaattaggcttgagagtctaa

SEQ ID NO: 4108 - DNA, 2157 bp, Artificial Sequence
  Description of Artificial Sequence: Synthetic polynucleotide
atgggatccgacagatcttgtgttttgtctgtgtttcagaccatcctcaagctcgtcatcttcgtggcgatttttggggctgccatatcttctcgtttgtttgcagtcatcaaatttgagtctattatccatgaattcgacccctggttcaattatagggctaccaaatatctcgtcaacaattctttttacaagtttttgaactggtttgacgaccgtacctggtaccccctcggaagggttactggagggactttatatcctggtttgatgacgactagtgcgttcatctggcacgcccttcgcaactggttgggcttgcccattgacatcagaaacgtttgtgtgctttttgcgccattattttctggggtcaccgcctgggcgacttacgaatttacgaaagagattaaagatgccagcgctgggcttttggctgctggttttatagccattgtccccggttatatatctagatctgtggcggggtcctacgataatgaggccattgccattacattattaatggtcactttcatgttttggattaaggcccaaaagactggctctatcatgcacgcaacgtgtgcagctttattctacttctacatggtgtctgcttggggtggatacgtgttcatcaccaacttgatcccactccatgtctttttgttaattttgatgggcagatattcttccaaactttattctgcctacaccacttggtacgctattggaactgttgcatccatgcagatcccatttgtcggtttcttacctatcaggtctaacgaccacatggccgcattgggtgttttcggtttgattcagattgtcgccttcggtgacttcgtgaagggccaaatcagcacagctaagtttaaagtcatcatgatggtttctttatttttgatcttggtccttggtgtggtcggactttctgccttgacctatatggggttgattgccccttggactggtagattttattctttatgggataccaactacgcaaagatccacattcctatcattgcctccgtttccgaacatcaacccgtttcctggcccgctttcttctttgatacccactttttgatctggcttttccccgccggtgtattcttattattcctcgacttgaaagacgagcacgtttttgtcatcgcttactccgttttatgttcttactttgccggtgttatggttagattgatgttgactttgacaccagtcatctgtgtgtccgccgccgtcgcattgtccaagatatttgacatctacttggatttcaagacaagtgaccgcaaatacgccatcaaacctgcggcattattagccaaattgattgtttccggaagtttcatcttttatttgtatcttttcgtcttccattctacttgggtaacaagaactgcatactcttctccttctgttgttttgccatctcaaaccccagatggtaaattggcgttgatcgacgacttcagggaagcgtactattggttaagaatgaactctgatgaggacagtaaggttgcagcgtggtgggattacggttaccaaattggtggcatggcagacagaaccactttagtcgataacaacacgtggaacaatactcacatcgccatcgttggtaaagccatggcttcccctgaagagaaatcttacgaaattttgaaagagcatgatgtcgattatgtcttggtcatctttggtggtttgattgggtttggtggtgatgacatcaacaaattcttgtggatgatcagaattagcgagggaatctggccagaagagataaaagagcgtgatttctataccgcagagggagaatacagagtagatgcaagggcttctgagaccatgaggaactctttactttacaagatgtcctacaaagatttcccacaattattcaatggtggccaagccactgacagagtgcgtcaacaaatgatcacaccattagacgtcccaccattagactacttcgacgaagtttttacttccgaaaactggatggttagaatatatcaattgaagaaggatgatgcccaaggtagaactttgagggacgttggtgagttaaccaggtcttctacgaaaaccagaaggtccataaagagacctgaattaggcttgagagtctga

SEQ ID NO: 4109 - DNA, 2283 bp, Saccharomyces cerevisiae
atgctacttcattttgacattgtaattcaattactatcaagtcatacccttaaatcgcaccaagtagagccccccatggattttgaaacgtcgttcgaagaatttgtcgaagataaacgattcattgctctagaggtatctgataatgatgacgattgtgacactgatttgactgctgacacagctgacgagctggaaagctctgctatcttaaagatgagggagtctgatgcatctttaaatgttaccaccggcaataatacatcaaggaaaacgacttccaattccaaaaaacgatggtctctattatccaatcattctgctgtttcatcatctaaatctaagaaaagatggtctgtactttcttcaagctttaccagtgaatctcataaggacagggaatcgaggaacgttttgcaacaaaaaagaaaatccttgcagagttattcaagcttagatacggtagcatctaatagctctatctctgcttcttcttctttgaaaagatcgtccactggtctttccctcagacaattgtttaccaagataggcataaacgatgatatatcacaacctgggatcgggattccgcaaggtaaggaaaatctgcctccaactatgggcaaaaaaaattcatcaattgcttccactagttcggaaaacagacttaggacaccattgaagccgcttgttaatcattctaaaaggcccacttcacaaccacaacagcaacaaccactatataatgcatcattgtcctcgagaagatcgtcgatttcttccactgtctcttcttccagctcgtctaaatggagattctggaagagaaataagaaccagacacctgcattgttgcaaccagaccaccattctttaaaaacctttcctgcagtaaaccgtcgtgattccatgacgcccgttgaaccaagaaatatggtaaaacataagacatccttttcagatttccataagactatcttcagttcaaatacgtattctgaaagcagcgatacaatatcttccatggaaattactttgaaaaacaaagcttcttcctcaagtctatctttgaacgtgttgaagaaaaggaattcgcaatcaagtttgaagcacaaaagttcacatgcatccttacaaaaattcaaaagaaacaaaggaaagtcctccatgatagcaccatcgacagcaactaatagcagcaatgatgactcttgtagctacagttccaaaaattctacgttgagtcaccgaatatcgttacctgtaccggaccaagtttcccgtgataaaattcagaacaaattaagatattcgacctcattactctcattaaattctaaatcatctttaccgatgaacaaaaatgatcatgatgagacacttctaagacagattttactaaattgtgatataaagagaattttaaaccccgcaaaaggagatgtattgcctttaatcaacgatgtaaaccatttgtcatcaatacaattaacatcaaatgtttggcaaattggtgaagtaatctgtaaaaaagtttctctcggtactattgatgacattacatgggatagaaagttcttatctttgcaggaactggaaaaactcaaaatcatgcaacaaaaatttgatggcataccgcaactattgaaaagttttgttgttaaagaggcaaatggggggttgtatttgtacttactattcaaagatcacggtaccccaatttcgttaatctcactgaaaaactggaagcagattctaaagattttttggtcttgtgctggtataattcatgggttggaaaaaaatttgaaatttgaacatcgtaatcttactttggataatattttgatagatggtaatgggaatataacaattattgattttaaatgcagtagattgcaaactcctcaagatgatgttttatatctacggctagatcatccactcttttttctaaatgggaaagacaagagtaaaataaacgaataccagtatcaatttgagtttgaaatctatcaaagtatgcggatcttgttgaacatggacgcgtcagcttttgagcccatgacaaatttgtattggttatattacctgtcacgcgttttactaaagtttggtgacaggaagcttggtaagaatgatgcaaacagggataaaatggcaagggtgataaaccatttggaaatgaacttggcagttcataaaagaggggggcagttattcaaaagattggagacggaggacattaagaatactggagatttactaaaactttataaataa

SEQ ID NO: 4110 - DNA, 2283 bp, Artificial Sequence
  Description of Artificial Sequence: Synthetic polynucleotide
atgttacttcattttgacattgtaattcaattattatccagtcatacccttaaatctcaccaagtagagccccccatggattttgaaacgtccttcgaagaatttgtcgaagataaaagattcattgctttggaggtatctgataatgatgacgattgtgacactgatttgactgctgacacagctgacgagttagaaagctctgctatcttaaagatgagggagtctgatgcatctttaaatgttaccaccggcaataatacatccaggaaaacgacttccaattccaaaaaaagatggtctttattatccaatcattctgctgtttcttcttctaaatctaagaaaagatggtctgtactttcttctagctttaccagtgaatctcataaggacagggaaagtaggaacgttttgcaacaaaaaagaaaatccttgcagagttattctagcttagatacggtagcatctaatagctctatctctgcttcttcttctttgaaaagaagttccactggtctttccctcagacaattgtttaccaagataggcataaacgatgatatatctcaacctgggatcgggattccgcaaggtaaggaaaatttacctccaactatgggcaaaaaaaattcttccattgcttccactagttctgaaaacagacttaggacaccattgaagccgcttgttaatcattctaaaaggcccacttctcaaccacaacagcaacaaccattgtataatgcaagtttgtccagcagaagatcttccatttcttccactgtctcttcttccagctcttctaaatggagattctggaagagaaataagaaccagacacctgcattgttgcaaccagaccaccattctttaaaaacctttcctgcagtaaaccgtcgtgattccatgacgcccgttgaaccaagaaatatggtaaaacataagacatccttttctgatttccataagactatcttcagtagtaatacgtattctgaaagcagcgatacaatatcttccatggaaattactttgaaaaacaaagcttcttcctccagtttatctttgaacgtgttgaagaaaaggaattctcaaagtagtttgaagcacaaaagttctcatgcatccttacaaaaattcaaaagaaacaaaggaaagtcctccatgatagcaccatctacagcaactaatagcagcaatgatgactcttgtagctacagttccaaaaattctacgttgagtcacagaatatctttacctgtaccggaccaagtttcccgtgataaaattcagaacaaattaagatattctaccagtttactctctttaaattctaaatcttctttaccgatgaacaaaaatgatcatgatgagacacttttgagacagattttattgaattgtgatataaagagaattttaaaccccgcaaaaggagatgtattgcctttaatcaacgatgtaaaccatttgagtagtatacaattaacaagtaatgtttggcaaattggtgaagtaatctgtaaaaaagtttctctcggtactattgatgacattacatgggatagaaagttcttatctttgcaggaattggaaaaactcaaaatcatgcaacaaaaatttgatggcataccgcaattattgaaaagttttgttgttaaagaggcaaatggggggttgtatttgtacttattattcaaagatcacggtaccccaatttctttaatctctttgaaaaactggaagcagattttgaagattttttggtcttgtgctggtataattcatgggttggaaaaaaatttgaaatttgaacatcgtaatcttactttggataatattttgatagatggtaatgggaatataacaattattgattttaaatgcagtagattgcaaactcctcaagatgatgttttatatcttcgtttggatcatccactcttttttttgaatgggaaagacaagagtaaaataaacgaataccagtatcaatttgagtttgaaatctatcaaagtatgagaatcttgttgaacatggacgcgtctgcttttgagcccatgacaaatttgtattggttatattacctttcccgcgttttattgaagtttggtgacaggaagcttggtaagaatgatgcaaacagggataaaatggcaagggtgataaaccatttggaaatgaacttggcagttcataaaagaggggggcagttattcaaaagattggagacggaggacattaagaatactggagatttattgaaactttataaatga

SEQ ID NO: 4111 - DNA, 708 bp, Saccharomyces cerevisiae
atgcattgggcagcagcggtagcgatattctttattgtggtcacaaagtttctacagtatacaaacaaataccacgagaaatggatctctaaatttgcaccaggaaatgaattatccaaaaaatacttagccaaggtcaaagaacgtcacgaattaaaagaattcaacaactctatctccgcgcaggataattatgccaaatggactaagaacaatagaaaattggactcgttagataaagaaataaataacttgaaggacgaaatacaatcagaaaataaagcctttcaggcccatcttcacaaactcaggttattggcattgacggtgccattttttgtgtttaagattatgtacggcaagacaccagtttacaagttgagttcctcgactagcaccttgttccctacgtttgtaagtggtgtttggtctcaaggctggttatatgttctcttgcatcctctaaggactatttctcagaaatggcatataatggagggcaaatttggtgcttccaagtttgatgatatggctttacagagtgtctctttgggaatctgggtttgggcattgatgaatgtcatcaacggcgtggaatttatcgttaagcaattgtttttgactcccaaaatggaagcacctgcatctgtggagactcaagaggagaaagccttggatgctgtcgacgatgccattattttagattag

SEQ ID NO: 4112 - DNA, 708 bp, Artificial Sequence
  Description of Artificial Sequence: Synthetic polynucleotide
atgcattgggcagcagcggtagcgatattctttattgtggtcacaaagtttttgcagtatacaaacaaataccacgagaaatggatctctaaatttgcaccaggaaatgaattatccaaaaaatacttagccaaggtcaaagaacgtcacgaattaaaagaattcaacaactctatctccgcgcaggataattatgccaaatggactaagaacaatagaaaattggactctttagataaagaaataaataacttgaaggacgaaatacaaagtgaaaataaagcctttcaggcccatcttcacaaactcaggttattggcattgacggtgccattttttgtgtttaagattatgtacggcaagacaccagtttacaagttgagttccagcactagcaccttgttccctacgtttgtaagtggtgtttggtctcaaggctggttatatgttctcttgcatcctttaaggactatttctcagaaatggcatataatggagggcaaatttggtgcttccaagtttgatgatatggctttacagagtgtctctttgggaatctgggtttgggcattgatgaatgtcatcaacggcgtggaatttatcgttaagcaattgtttttgactcccaaaatggaagcacctgcatctgtggagactcaagaggagaaagccttggatgctgtcgacgatgccattattttagattga

SEQ ID NO: 4113 - DNA, 837 bp, Saccharomyces cerevisiae
atgtcgcaagagtttgtggaagactattcacgtacagggtcctcagacgacgaggatagtggagcttatgacgagtggattccatcgttctgttccagatttggtcacgagtacttctgccaagtcccgacagagtttatcgaggatgatttcaatatgacctcgttatcccaagaggtaccccactaccggaaagctctggatttgatattggatttggaggctatgagtgatgaagaagaggacgaagacgacgtggtggaagaagacgaagtggatcaagagatgcagagtaatgacggtcatgatgaaggcaaaaggagaaacaagtcgccagtggtgaacaagagtattatcgagcacgcagcagaacagttatacggattgatacatgcaagatttattctgaccaagccaggcctgcaagcaatggctgaaaaattcgaccacaaggaatttggaacgtgcccccgttactattgtaatggcatgcagttgctgccttgtgggttgagcgatacagttgggaaacacaccgtaaggttgtactgtcccagttgtcaggacttgtatcttccccaatcatctagattcctgtgcttagaaggtgcattttgggggacaagcttccctggtgtgttcttgaaacatttcaaagaattggaagagtatgtggaaaggaaaagtaaagagtcctacgagttgaaagtttttgggttcaggataaatgatgaggcagtatctggtcctagaatgaagtggttgagacaatatccatccacggaggaggactgggaagaatttgccaaatgcgagttcgagacaccggcggtttaa

SEQ ID NO: 4114 - DNA, 837 bp, Artificial Sequence
  Description of Artificial Sequence: Synthetic polynucleotide
atgtctcaagagtttgtggaagactattctcgtacagggtccagtgacgacgaggatagtggagcttatgacgagtggattccatctttctgttccagatttggtcacgagtacttctgccaagtcccgacagagtttatcgaggatgatttcaatatgaccagtttatcccaagaggtaccccactacagaaaagctttagatttgatattggatttggaggctatgagtgatgaagaagaggacgaagacgacgtggtggaagaagacgaagtggatcaagagatgcagagtaatgacggtcatgatgaaggcaaaaggagaaacaagtctccagtggtgaacaagagtattatcgagcacgcagcagaacagttatacggattgatacatgcaagatttattttgaccaagccaggcttacaagcaatggctgaaaaattcgaccacaaggaatttggaacgtgcccccgttactattgtaatggcatgcagttgttaccttgtgggttgagcgatacagttgggaaacacaccgtaaggttgtactgtcccagttgtcaggacttgtatcttccccaatcttctagattcttgtgcttagaaggtgcattttgggggacaagcttccctggtgtgttcttgaaacatttcaaagaattggaagagtatgtggaaaggaaaagtaaagagtcctacgagttgaaagtttttgggttcaggataaatgatgaggcagtatctggtcctagaatgaagtggttgagacaatatccatccacggaggaggactgggaagaatttgccaaatgcgagttcgagacaccggcggtttga

SEQ ID NO: 4115 - DNA, 555 bp, Saccharomyces cerevisiae
atgttgaaatacttggttcaacgaagattcacttctacattttacgagctgttcccaaagaccttccccaaaaagctacccatttggactatcgatcaatccagattaaggaaggagtataggcaattacaagcacagcaccatccagacatggcccaacaaggtagtgaacagtcatcaactcttaatcaagcttaccatactctcaaagatccccttagaaggtcacaatatatgctaaaactcttgcgcaatatcgatttgacgcaagaacagacctcaaatgaagtaactaccagtgatccacagttactattgaaagttctagacatccatgatgaattatcccagatggacgacgaagctggtgtgaagctgcttgaaaagcaaaacaaggaaagaattcaagatattgaagcccagttgggacaatgctacaatgacaaggattacgccgccgcagtgaagttgaccgtggagctaaagtactggtacaacttggccaaggcattcaaagactgggctccaggaaaacaattggaaatgaatcactaa

SEQ ID NO: 4116 - DNA, 555 bp, Artificial Sequence
  Description of Artificial Sequence: Synthetic polynucleotide
atgttgaaatacttggttcaaagaagattcacttctacattttacgagcttttcccaaagaccttccccaaaaagttgcccatttggactatcgatcaatccagattaaggaaggagtataggcaattacaagcacagcaccatccagacatggcccaacaaggtagtgaacagtcttctactcttaatcaagcttaccatactctcaaagatccccttagaaggtctcaatatatgttgaaactcttgcgcaatatcgatttgacgcaagaacagacctctaatgaagtaactaccagtgatccacagttattattgaaagttttggacatccatgatgaattatcccagatggacgacgaagctggtgtgaagcttcttgaaaagcaaaacaaggaaagaattcaagatattgaagcccagttgggacaatgctacaatgacaaggattacgccgccgcagtgaagttgaccgtggagttgaagtactggtacaacttggccaaggcattcaaagactgggctccaggaaaacaattggaaatgaatcactga

SEQ ID NO: 4117 - DNA, 1512 bp, Saccharomyces cerevisiae
atgtccgatagattcgttatttgggctccctcgatgcacaatgaacctgccgcaaagtgtgggtattgtcacggtaataaggggggcaacatggatcagttgttcgcattggattcgtgggctcatcgttatatgaacaaaatggacgttgtaaagattgaaaactgcacaattggctctttcgtggaacatatggatgtagccacgtatgatcgcatgtgtaatatgggatttagaaggtctggtaagtttctttataaagtggacccgttgaggaattgttgtaggttatacaccattcgaactgcccctcaagaattgaatatgacaaaggaattgaaaaaatgcatcagccgctttgctactagaataacaagtgaggactactgcccagccgctgttgcaagcagtgattttgtgggcaaaattgttaatgcagagatgaattctaaaacattctatacccgatttgagcctgcactttatagtgaagaaaagtatcacttatttgtcaaatatcaggaaaaagtgcatcaagactacaataattcgccgaagtcctttaagcgattcctatgtgatacgccctttggccctgaagcggtgttggggacacaagaatcatgggagcagttaaacaattggcagcgaatgaagccaggcgagaaactgaagcatatgggtcctgtgcacgaatgctactactatgagggtaaattaattgccatcactgtgtcagatatcttgcccagtggtatatcttcggtatattttatttgggatccagactacagtaaatggtccctagggaagctcagtgctttgcgcgatcttgccatcattcaaaggacaaatctgcaatactattacctggggtactatattgaggactgtccgaagatgaattataaagcaaactatggtgcggaagtactggatgtgtgtcacagtaaatatatcccattgaaacccattcaggatatgatttctaggggcaaactctttgtcataggtgaagaagagacgaaagttactaaggagctctacctcgttgactctgaaaccggaagaggggagggatttcccactgataatgttgtcaagtacaagaatattgctgaggaaatatacggtgtgggagggtgtgcgtttaaatctgcaaatgaatctgcattggaattgaaagaactttacggtataccgtacgaagaggaagatttagataccatctaccatttgaaagaacacaatggccatgctccaaatggtattcctaatgtggtgccgggattactcccgctatgggaattgctggacattatgcaatctggcaagatcactgacctggagggaagactatttctcttcgaaatcgaaacggaggggattcgaccattaattaacttttatagcgaacctccgaatgtcaagaaacgtatttgtgacgtgatacggttatttggcttcgaaacttgtatgaaagccgtcattttatatagtgagcaaatgtga

SEQ ID NO: 4118 - DNA, 1512 bp, Artificial Sequence
  Description of Artificial Sequence: Synthetic polynucleotide
atgtccgatagattcgttatttgggctccctctatgcacaatgaacctgccgcaaagtgtgggtattgtcacggtaataaggggggcaacatggatcagttgttcgcattggattcttgggctcatcgttatatgaacaaaatggacgttgtaaagattgaaaactgcacaattggctctttcgtggaacatatggatgtagccacgtatgatcgcatgtgtaatatgggatttagaaggtctggtaagtttctttataaagtggacccgttgaggaattgttgtaggttatacaccattagaactgcccctcaagaattgaatatgacaaaggaattgaaaaaatgcatcagccgctttgctactagaataacaagtgaggactactgcccagccgctgttgcaagcagtgattttgtgggcaaaattgttaatgcagagatgaattctaaaacattctataccagatttgagcctgcactttatagtgaagaaaagtatcacttatttgtcaaatatcaggaaaaagtgcatcaagactacaataattctccgaagtcctttaagagattcttgtgtgatacgccctttggccctgaagcggtgttggggacacaagaaagttgggagcagttaaacaattggcagagaatgaagccaggcgagaaattgaagcatatgggtcctgtgcacgaatgctactactatgagggtaaattaattgccatcactgtgtctgatatcttgcccagtggtatatcttctgtatattttatttgggatccagactacagtaaatggtccttagggaagctcagtgctttgcgcgatcttgccatcattcaaaggacaaatttacaatactattacttggggtactatattgaggactgtccgaagatgaattataaagcaaactatggtgcggaagtattggatgtgtgtcacagtaaatatatcccattgaaacccattcaggatatgatttctaggggcaaactctttgtcataggtgaagaagagacgaaagttactaaggagctctacctcgttgactctgaaaccggaagaggggagggatttcccactgataatgttgtcaagtacaagaatattgctgaggaaatatacggtgtgggagggtgtgcgtttaaatctgcaaatgaatctgcattggaattgaaagaactttacggtataccgtacgaagaggaagatttagataccatctaccatttgaaagaacacaatggccatgctccaaatggtattcctaatgtggtgccgggattactcccgttatgggaattgttggacattatgcaatctggcaagatcactgacttggagggaagattatttctcttcgaaatcgaaacggaggggattagaccattaattaacttttatagcgaacctccgaatgtcaagaaacgtatttgtgacgtgataagattatttggcttcgaaacttgtatgaaagccgtcattttatatagtgagcaaatgtga

SEQ ID NO: 4119 - DNA, 3246 bp, Saccharomyces cerevisiae
atgagctccattcacgaggttgtggctcttattgaagagctgtactctcctcatccgaaacatgatgttaatcagattcaacagagtttacagtcaatccagaaatcagagcaaggcttccacctagctaatgagcttttatctgatgacaagtactctgcgaatgtcaagtactttggtgcactgactttaactgtgcaactaaatacgcggggtgaaaacgattatgaaaccctatggaatgttttcaggtcaaatttattgtacttgacgaaattcagtacattgtacgtttccaatcctaatatgtacgggcaatctctaatcataattaaaaagttaatgtcaaacttgtcattgatcttcactaaaatcaacgatccgcagcttaataacgctggaaatgaaaatatgattaagcaatggaacaatcccataaatacgtttattcaacttatgtcggttcaaaatcaaaacattaatgcagaccaactgttgcttgactcaatcaactgctccttaacatacgagcaactgtctcaatttgttagcctatctcagaaacataatgaactggcattgacgtttacagaagttattgtggaagatttgacgaagttccaaacaaagaggcattcaatgtctcaaatccacgaagtagtccatgagcatttatatatttcaactatggctttgatcaacttgaacttaactgcacaagctgtcttcaatcctaccgtatttgattgtattactgcttggattaattatatctcattaaccagaagcgtatcttcaagtggtagaatggatttgtcggaaatttttcaaaacctgattgacttgatgtatcagtctacagaaggatcggacggttatgagaatgcggaaaagatcctaacaatatttggtaatgtttttgctaatgatccattattaatgagttacgatttgagacaacaaatcgagtgtattttcttaggtgtagtaaggcctgattctggcataaccgacatatctaacaaaaattcttggatgctacaatatatgaattatttagttaccaatgattttttttccgaattgaaggaattggccatttgtattgtggatttcttgcaaattaacacgttaagtgtttgtaataaattatttactaacattcaagcagctgataatggtcaagttcaagatgaatatattcaggaatacatcaaagtccttttgcaaatgaccaatttccctttaactcctgtcttacaagagttcttttctgttagaatggttgatttttggttggatttatcggatgcttacactaatttggctagcgaaactttgaggccaaattctattgagctgtctacacaaatttttcagcagttgatcaatatttatttacccaaaatttctttgagtgtgaaacaaagaataattgaagaagagggtgagagcacttctgtgaacgaatttgaagattttagaaacgctgtcagtgaccttgctcaatctctctggtctattttgggaaacgataatttaacaaatgtgctaattgatggtatgggccaaatgcctgctgcgagtgatgagactctcatcatcaaggatactgatgttttgtttcgaattgaaacgatgtgttttgttttgaatactatattggttgatatgactctatcagaaagcccatggattaaaaatatcgttgatgccaacaaattcttcaaccaaaatgtcatatccgtcttccaaactggtttccaaactagtgccagtacaaaagtcagtcaaattttgaaacttgacttcgtaagaacaagtacaactttaatcggcactttggctggttattttaaacaggaaccttttcaattaaacccatacgtggaagctttatttcaaggtttgcacacttgcaccaattttactagtaaaaacgaacaagaaaaaatttcgaacgataaacttgaagttatggttatcaagactgtttcaacattatgtgagacatgccgtgaggagttgactccatatttgatgcattttataagctttttaaacacagtcattatgccagactccaatgtttcacatttcactagaactaaattggttagatctataggttatgtcgttcaatgtcaagtctccaacggtccagaggagcaagctaaatatattttacaattgacgaacctattgagcggctcaatagagcattgtttggcttcatcggtacagttacaagaacaacaagattatattaattgtctattatactgtatatctgagctagcaacaagtttgatccaacctactgaaatcatcgaaaatgatgcattactacaaaggttatctgagtttcaaagtttctggtccagcgatcccttacaaatccgatcgaaaattatgtgcaccattgataaggtcttggataattcaatatattgtaaaaactccgcctttgtggagatcggttgtttgattgttggtaaaggattaaatctgcccgacggggaaccgtacttcctcaagtacaatatgtctgaagttatgaattttgttttgcggcatgtccccaactgtgagcttgctacttgcttgccttattttgtttatttattagaaaagcttatttcagagttcaggaaggaactaacaccacaagaatttgatttcatgtttgaaaagatccttctagtctattatgatgcatatattatcaatgatccggaccttttacaaatgacaataggttttgttaataacgttttggacgtgaagccaggcttagctattggcagtaaacattggacatcatttattttacctcaatttttaaaattaataccttcaagagaaaagttcacaattgttgcggtggcaaaattttggactaagttgatcaataataagaaatacaaccaagaagaactcacaactgttaggcaacaagtttcctctataggaggagaccttgtgtaccaaattatgtatggcttattccacacacaaaggtccgatctgaatagttacacagatctgctaagagctttggtagccaagtttccaattgaagcaagagagtggctcgttgctgttttgccccaaatatgtaacaatcctgcaggtcatgaaaaatttattaataaattacttattacgagaggaagcagagcagctggaaatgttattttgcagtggtggttggattgtaccacacttccaaattaccaaggatga

SEQ ID NO: 4120 - DNA, 3246 bp, Artificial Sequence
  Description of Artificial Sequence: Synthetic polynucleotide
atgagctccattcacgaggttgtggctcttattgaagagttatactctcctcatccgaaacatgatgttaatcagattcaacagagtttacagtctatccagaaaagtgagcaaggcttccacttggctaatgagcttttatctgatgacaagtactctgcgaatgtcaagtactttggtgcattgactttaactgtgcaattgaatacgagaggtgaaaacgattatgaaaccttatggaatgttttcaggtctaatttattgtacttgacgaaattcagtacattgtacgtttccaatcctaatatgtacgggcaatctttgatcataattaaaaagttaatgtccaacttgtctttgatcttcactaaaatcaacgatccgcagcttaataacgctggaaatgaaaatatgattaagcaatggaacaatcccataaatacgtttattcaacttatgtctgttcaaaatcaaaacattaatgcagaccaattattgcttgactctatcaactgctccttaacatacgagcaattatctcaatttgttagcttgtctcagaaacataatgaattggcattgacgtttacagaagttattgtggaagatttgacgaagttccaaacaaagaggcattctatgtctcaaatccacgaagtagtccatgagcatttatatatttctactatggctttgatcaacttgaacttaactgcacaagctgtcttcaatcctaccgtatttgattgtattactgcttggattaattatatctctttaaccagaagcgtatcttccagtggtagaatggatttgagtgaaatttttcaaaacttgattgacttgatgtatcagtctacagaaggatctgacggttatgagaatgcggaaaagatcttaacaatatttggtaatgtttttgctaatgatccattattaatgagttacgatttgagacaacaaatcgagtgtattttcttaggtgtagtaaggcctgattctggcataaccgacatatctaacaaaaattcttggatgttacaatatatgaattatttagttaccaatgattttttttccgaattgaaggaattggccatttgtattgtggatttcttgcaaattaacacgttaagtgtttgtaataaattatttactaacattcaagcagctgataatggtcaagttcaagatgaatatattcaggaatacatcaaagtccttttgcaaatgaccaatttccctttaactcctgtcttacaagagttcttttctgttagaatggttgatttttggttggatttaagtgatgcttacactaatttggctagcgaaactttgaggccaaattctattgagctttctacacaaatttttcagcagttgatcaatatttatttacccaaaatttctttgagtgtgaaacaaagaataattgaagaagagggtgagagcacttctgtgaacgaatttgaagattttagaaacgctgtcagtgaccttgctcaatctctctggtctattttgggaaacgataatttaacaaatgtgttgattgatggtatgggccaaatgcctgctgcgagtgatgagactctcatcatcaaggatactgatgttttgtttagaattgaaacgatgtgttttgttttgaatactatattggttgatatgactttatctgaaagcccatggattaaaaatatcgttgatgccaacaaattcttcaaccaaaatgtcatatccgtcttccaaactggtttccaaactagtgccagtacaaaagtcagtcaaattttgaaacttgacttcgtaagaacaagtacaactttaatcggcactttggctggttattttaaacaggaaccttttcaattaaacccatacgtggaagctttatttcaaggtttgcacacttgcaccaattttactagtaaaaacgaacaagaaaaaatttccaacgataaacttgaagttatggttatcaagactgtttctacattatgtgagacatgccgtgaggagttgactccatatttgatgcattttataagctttttaaacacagtcattatgccagactccaatgtttctcatttcactagaactaaattggttagatctataggttatgtcgttcaatgtcaagtctccaacggtccagaggagcaagctaaatatattttacaattgacgaaccttttgagcggctctatagagcattgtttggcttcttctgtacagttacaagaacaacaagattatattaattgtcttttatactgtatatctgagttggcaacaagtttgatccaacctactgaaatcatcgaaaatgatgcattattacaaaggttatctgagtttcaaagtttctggtccagcgatcccttacaaatcaggtccaaaattatgtgcaccattgataaggtcttggataattctatatattgtaaaaactccgcctttgtggagatcggttgtttgattgttggtaaaggattaaatttgcccgacggggaaccgtacttcctcaagtacaatatgtctgaagttatgaattttgttttgagacatgtccccaactgtgagcttgctacttgcttgccttattttgtttatttattagaaaagcttatttctgagttcaggaaggaattaacaccacaagaatttgatttcatgtttgaaaagatccttttggtctattatgatgcatatattatcaatgatccggaccttttacaaatgacaataggttttgttaataacgttttggacgtgaagccaggcttagctattggcagtaaacattggacatcttttattttacctcaatttttaaaattaataccttccagagaaaagttcacaattgttgcggtggcaaaattttggactaagttgatcaataataagaaatacaaccaagaagaactcacaactgttaggcaacaagtttcctctataggaggagaccttgtgtaccaaattatgtatggcttattccacacacaaaggtccgatttgaatagttacacagatttattaagagctttggtagccaagtttccaattgaagcaagagagtggctcgttgctgttttgccccaaatatgtaacaatcctgcaggtcatgaaaaatttattaataaattacttattacgagaggaagcagagcagctggaaatgttattttgcagtggtggttggattgtaccacacttccaaattaccaaggatga

SEQ ID NO: 4121 - DNA, 393 bp, Saccharomyces cerevisiae
atggaagacacgatacgtccattaaattacgcagatatcgagaccagcgggcccataaaccttcttgagacaactaataacctaaaaagctcgttaaaaaagttttcacaaaaggcaaagggatcacacatttccagagaaaggattcaccattttagaaaatggaaaaataagaccgaatcactttcagaaaaccatttgaagcctcctcctgacgtcgactctctatgtttcagtaactgctttcaacctgacgccctgtctggaaatgtatttttaccccccagaagctcaaacatgtattggaatgaaaagcaattacaattagaaatggaaattctaaaatttttatcactaaatactagcaatgaatgctgcacttctgatgattag

SEQ ID NO: 4122 - DNA, 393 bp, Artificial Sequence
  Description of Artificial Sequence: Synthetic polynucleotide
atggaagacacgatacgtccattaaattacgcagatatcgagaccagcgggcccataaaccttcttgagacaactaataacttgaaaagctctttaaaaaagttttctcaaaaggcaaagggatctcacatttccagagaaaggattcaccattttagaaaatggaaaaataagaccgaatctctttctgaaaaccatttgaagcctcctcctgacgtcgactctttatgtttcagtaactgctttcaacctgacgccttatctggaaatgtatttttaccccccagaagcagtaacatgtattggaatgaaaagcaattacaattagaaatggaaattttgaaatttttaagtttgaatactagcaatgaatgctgcacttctgatgattga

SEQ ID NO: 4123 - DNA, 2667 bp, Saccharomyces cerevisiae
atgtctacaaaaggtttgaaagaagaaatcgatgatgtaccatcagtagaccctgtcgtttcagaaacagtcaattctgctttagagcagttgcaactagatgatccagaggaaaacgccacctctaatgcatttgcgaataaagtttctcaagattctcaattcgctaatggccctccgtcgcaaatgtttccacatccacaaatgatgggtggaatgggcttcatgccctactctcaaatgatgcaggttcctcataatccttgtccattttttccgccccctgattttaatgatccaacagcaccattgagtagctcgcccttgaatgcaggcggtccaccaatgttattcaagaatgactcacttccatttcaaatgctgtcttcgggtgctgcggtagcaactcaaggtggacaaaatctaaacccattgataaatgacaattcaatgaaggtattgccaatcgcatcggctgatccgttatggactcattcaaacgtaccaggatcagcatctgtagccattgaagaaaccaccgctactctacaagaaagcctaccatctaagggcagggagtctaataataaggctagttcgttcagaagacaaacttttcatgctttatcaccaactgaccttatcaatgcggccaacaatgtaaccttgtcaaaggacttccaatctgacatgcagaatttttctaaggctaagaaaccgtctgtaggagctaacaatactgcaaaaaccagaactcaatccatatcttttgataatactccctcctcaacgtcatttatacccccaaccaatagtgtttctgagaaattatccgatttcaaaatagaaacctcgaaggaggatttgattaataaaactgcaccagctaaaaaagagagtcctacaacttatggtgcagcatatccatatgggggacctttacttcaaccaaatcctattatgccaggccacccacataatatatcctcccctatctatggtattagatcaccttttcctaattcttatgaaatgggcgcgcaatttcaacctttctctccgattttaaatcctacgagtcattcactaaatgcaaattctccaattcctctaacccaatcgccaattcatcttgcaccagttttaaaccctagttcaaattctgttgccttttcagatatgaagaatgatggtggtaagcccaccaccgataacgacaaggcgggtccaaatgttaggatggatttaataaatcctaatcttgggccatcaatgcaacctttccacatattacctccccagcaaaacaccccccctcctccctggctttatagcactccacctcccttcaacgcaatggttccgcctcatttgttggctcaaaatcatatgccgttaatgaatagcgccaataataaacatcatggtcgtaataacaatagcatgtcaagtcataatgacaatgacaacattggtaattctaattacaacaataaagacacaggtcgttctaacgttggtaaaatgaaaaatatgaaaaacagttatcatggctactataataacaataataataataataataataacaataataataataacagtaatgctaccaacagcaacagcgcggaaaaacaacgtaaaattgaggagtcgtcgagatttgcggacgcagttttagaccaatatatcggaagtattcactcattgtgtaaagaccaacatggttgtcgttttctgcaaaagcagttggatattctcggcagtaaggcggcggacgcaatttttgaagaaactaaggattatacggttgaattgatgactgattcattcggtaattatttgatccagaagctattggaagaggttaccacagaacaaagaatcgtactcacaaaaatatcttcccctcattttgtcgaaatttccttaaaccctcatggtactagggcattacaaaaactcattgaatgcatcaaaacagatgaagaagcacagattgttgttgattctttacgcccttatactgtccagttgagtaaggatttaaatggtaatcatgttattcaaaaatgtttgcaaaggttgaagcctgaaaacttccagtttatctttgacgcaatctctgatagctgtattgatattgctactcatagacacgggtgttgcgttttgcaacgttgtctagatcatgggactacagaacaatgtgacaatctgtgtgataagttgctagcccttgttgataaattaactttggatccatttggcaactatgtggtgcaatatataattaccaaagaggctgagaagaacaaatatgattatacgcataaaattgtccacctgttgaaaccaagagccatcgaactttctatccataaatttggatcaaatgtgattgaaaaaatcttgaagacagctattgtttcggagccaatgattctggaaattttaaataatggtggcgagacgggtattcaatcattgttgaatgatagctacggaaattacgttttacagacagcattagacatttctcataagcaaaatgactatctctataaaagactatcagagattgtggcgcctttactggtgggccccataagaaatacacctcatggtaaaagaatcatcggaatgttacatttagattcatag

SEQ ID NO: 4124 - DNA, 2667 bp, Artificial Sequence
  Description of Artificial Sequence: Synthetic polynucleotide
atgtctacaaaaggtttgaaagaagaaatcgatgatgtaccatctgtagaccctgtcgtttctgaaacagtcaattctgctttagagcagttgcaattggatgatccagaggaaaacgccacctctaatgcatttgcgaataaagtttctcaagattctcaattcgctaatggccctccgtctcaaatgtttccacatccacaaatgatgggtggaatgggcttcatgccctactctcaaatgatgcaggttcctcataatccttgtccattttttccgccccctgattttaatgatccaacagcaccattgagtagctctcccttgaatgcaggcggtccaccaatgttattcaagaatgactctcttccatttcaaatgctttcttctggtgctgcggtagcaactcaaggtggacaaaatttgaacccattgataaatgacaattctatgaaggtattgccaatcgcatctgctgatccgttatggactcattccaacgtaccaggaagtgcatctgtagccattgaagaaaccaccgctactttacaagaaagcttgccatctaagggcagggagtctaataataaggctagttctttcagaagacaaacttttcatgctttatctccaactgaccttatcaatgcggccaacaatgtaaccttgtccaaggacttccaatctgacatgcagaatttttctaaggctaagaaaccgtctgtaggagctaacaatactgcaaaaaccagaactcaatccatatcttttgataatactccctcctctacgtcttttatacccccaaccaatagtgtttctgagaaattatccgatttcaaaatagaaacctccaaggaggatttgattaataaaactgcaccagctaaaaaagagagtcctacaacttatggtgcagcatatccatatgggggacctttacttcaaccaaatcctattatgccaggccacccacataatatatcctcccctatctatggtattagatctccttttcctaattcttatgaaatgggcgcgcaatttcaacctttctctccgattttaaatcctacgagtcattctttgaatgcaaattctccaattcctttgacccaatctccaattcatcttgcaccagttttaaaccctagtagtaattctgttgccttttctgatatgaagaatgatggtggtaagcccaccaccgataacgacaaggcgggtccaaatgttaggatggatttaataaatcctaatcttgggccaagcatgcaacctttccacatattacctccccagcaaaacaccccccctcctccctggctttatagcactccacctcccttcaacgcaatggttccgcctcatttgttggctcaaaatcatatgccgttaatgaatagcgccaataataaacatcatggtcgtaataacaatagcatgagcagtcataatgacaatgacaacattggtaattctaattacaacaataaagacacaggtcgttctaacgttggtaaaatgaaaaatatgaaaaacagttatcatggctactataataacaataataataataataataataacaataataataataacagtaatgctaccaacagcaacagcgcggaaaaacaacgtaaaattgaggagagtagtagatttgcggacgcagttttagaccaatatatcggaagtattcactctttgtgtaaagaccaacatggttgtcgttttttgcaaaagcagttggatattctcggcagtaaggcggcggacgcaatttttgaagaaactaaggattatacggttgaattgatgactgattctttcggtaattatttgatccagaagttgttggaagaggttaccacagaacaaagaatcgtactcacaaaaatatcttcccctcattttgtcgaaatttccttaaaccctcatggtactagggcattacaaaaactcattgaatgcatcaaaacagatgaagaagcacagattgttgttgattctttacgcccttatactgtccagttgagtaaggatttaaatggtaatcatgttattcaaaaatgtttgcaaaggttgaagcctgaaaacttccagtttatctttgacgcaatctctgatagctgtattgatattgctactcatagacacgggtgttgcgttttgcaacgttgtttggatcatgggactacagaacaatgtgacaatttatgtgataagttgttagcccttgttgataaattaactttggatccatttggcaactatgtggtgcaatatataattaccaaagaggctgagaagaacaaatatgattatacgcataaaattgtccacttattgaaaccaagagccatcgaactttctatccataaatttggaagtaatgtgattgaaaaaatcttgaagacagctattgtttctgagccaatgattttggaaattttaaataatggtggcgagacgggtattcaatctttgttgaatgatagctacggaaattacgttttacagacagcattagacatttctcataagcaaaatgactatctctataaaagattatctgagattgtggcgcctttattggtgggccccataagaaatacacctcatggtaaaagaatcatcggaatgttacatttagatagttga

SEQ ID NO: 4125 - DNA, 3207 bp, Saccharomyces cerevisiae
atgcgaggcttgacacctaagaacggtgtacatattgagacgggtccggatacagaatcgtccgcggactccagcaacttttctacaggtttcagcggcaagattcgtaagccaaggtcgaaagtaagtaaagcgtgcgataactgtagaaaaagaaagataaaatgtaatgggaagtttccctgcgcaagctgtgagatatattcatgtgagtgcacgttcagcactagacaaggtggcgctcgaataaaaaaccttcacaagacgagtttggaaggtacaaccgtacaagtcaaagaggaaacagattccagttcgacttctttttctaatcctcagcgatgtacagacgggccatgcgcagtggaacaaccaacgaaattttttgagaatttcaagctaggtggtcgtagtagtggtgataatagcggaagtgatgggaagaatgacgacgatgtgaatagaaacggtttttatgaagacgatagcgaatcacaggcaactttgacatctctacaaaccactctgaaaaatttgaaggagatggctcatttaggtacacatgtaacctcagccatcgagagcattgaacttcagataagtgacttgcttaagcgatgggaacccaaagtgaggaccaaagaattagcaacaacgaaattttaccctaataaatcaatagaaactcaattgatgaaaaacaaatactgtgatgtggtacatttgacaagatatgccgcttggtcaaacaataagaaggaccaagatacttctagtcaacctttgatcgacgaaatctttggtttgtactctcctttccaatttttgtcacttcaaggtattggtaaatgtttccaaaattatagatccaaatccaaatgcgagatttttcccaggaccgccaaggaaaccatatacatcatgttaaggtttttcgacgtttgttttcatcacatcaaccaaggctgtgtctccatagctaatcccctggaaaactacctacagaaaatgaatcttttaccttcaaccccatcttcgatatcatctgcagggagcccgaatacagcacacacaaaatcgcatgttgcgttagtgataaatcacttaccgcagccctttgtgagaaatataaccggaataagtaattctgagctactaagcgaaatgaataatgatatcagcatgtttggcattttattgaagatgttggatatgcataaaaattcctaccagaacttcctaatggaaatcacatctaacccctccgtggctaaaaacacgcagtcaattgatgtcttgcaggaattcatccattattgtcaagctggagaggcgctaatcgccttatgttacagctattataattctacattatacaactacgtggacttcacatgcgacataacgcatttagagcaacttctatactttttggatctgctattttggctatcggaaatatacggttttgaaaaagtcttgaacgtagcagttcattttgtttcaagagttggtttatcaaggtgggaattttacgtgggtcttgatgaaaactttgctgaaagaagaagaaatctctggtggaaagctttctatttcgagaaaactttagcctctaaacttggctatccttcgaacattgatgactccaaaatcaattgtttattacctaagaattttcgagatgttgggttcttggataatagagattttatcgagaacgtccacttagttcgcaggagcgaagcttttgacaacatgtgcatatccgacttaaaatactatggcgaattagctgtcttacaaatagtcagccatttctcatcatctgttttattcaatgaaaaattcacgtcaattaggaatacatcaaaaccatctgttgttagagagaaactactcttcgaggtactcgagatttttaacgaaacagaaatgaaatatgatgctatcaaagagcaaactggaaaattgttcgatattgcattctctaaagatagtactgaactcaaagtttcaagagaggataagattatggcttcaaaatttgttctattttacgagcaccatttctgcagaatggttaacgaatctgataatattgtcgccagattatgcgtgcacagaaggccctcaatactaattgaaaacttgaaaatataccttcacaagatttacaaatcatggaccgatatgaacaaaatcttattagactttgacaacgattattccgtataccgttcgttcgcccattattctatcagttgcattattttggtatcacaagcattctcagtggccgaattcattaaagtaaatgacgttgtgaatatgattagagtcttcaaaagatttttggatataaaaattttttccgaaaatgagaccaatgagcatgtcttcaacagccaaagctttaaagactatacaagagctttttctttcctgacaatcgtcactcgtatcatgcttttggcatacggagagtcctctagcaccaacctcgatgttatctccaaatatattgatgagaatgcgccagatttaaaaggtataatagaacttgtcttggatacaaactcttgcgcttatcgatttttattagaacctgttcagaagtcaggattccatttaacggtctcacaaatgttgaaaaatagaaagtttcaggaaccactaatgtcaaatgaagataataagcagatgaagcataattcgggaaaaaatttgaatccggatctcccaagtcttaagacgggcacttcatgcttactaaatggcattgaatcgcctcaattgccattcaatggtcgctcagcaccttccccagtgagaaacaactcactaccggagtttgcacaattgccttcatttaggtcattatccgtgtctgatatgatcaatcccgattacgcgcaaccaacaaatgggcaaaataatacgcaagtccaatctaataaaccaatcaatgctcagcagcaaatacccacttcagtacaagtaccatttatgaacacaaatgaaatcaataacaacaacaacaacaacaacaacaataaaaacaatattaacaatattaacaacaacaacagtaacaatttttctgcaactagttttaatttggggacactagatgaatttgttaataacggtgatcttgaggacctctacagtatcctgtggagcgacgtttatccagatagttaa

SEQ ID NO: 4126 - DNA, 3207 bp, Artificial Sequence
  Description of Artificial Sequence: Synthetic polynucleotide
atgagaggcttgacacctaagaacggtgtacatattgagacgggtccggatacagaatcttccgcggactccagcaacttttctacaggtttcagcggcaagattcgtaagccaaggtccaaagtaagtaaagcgtgcgataactgtagaaaaagaaagataaaatgtaatgggaagtttccctgcgcaagctgtgagatatattcttgtgagtgcacgttcagcactagacaaggtggcgctagaataaaaaaccttcacaagacgagtttggaaggtacaaccgtacaagtcaaagaggaaacagattccagttctacttctttttctaatcctcagcgttgtacagacgggccatgcgcagtggaacaaccaacgaaattttttgagaatttcaagttgggtggtcgtagtagtggtgataatagcggaagtgatgggaagaatgacgacgatgtgaatagaaacggtttttatgaagacgatagcgaatctcaggcaactttgacatctttacaaaccactttgaaaaatttgaaggagatggctcatttaggtacacatgtaacctctgccatcgagagcattgaacttcagataagtgacttgcttaagagatgggaacccaaagtgaggaccaaagaattagcaacaacgaaattttaccctaataaatctatagaaactcaattgatgaaaaacaaatactgtgatgtggtacatttgacaagatatgccgcttggagcaacaataagaaggaccaagatacttctagtcaacctttgatcgacgaaatctttggtttgtactctcctttccaatttttgtctcttcaaggtattggtaaatgtttccaaaattatagatccaaatccaaatgcgagatttttcccaggaccgccaaggaaaccatatacatcatgttaaggtttttcgacgtttgttttcatcacatcaaccaaggctgtgtctccatagctaatcccttagaaaactacttacagaaaatgaatcttttaccttctaccccatcttctatatcttctgcagggagcccgaatacagcacacacaaaatctcatgttgcgttagtgataaatcacttaccgcagccctttgtgagaaatataaccggaataagtaattctgagttattaagcgaaatgaataatgatatcagcatgtttggcattttattgaagatgttggatatgcataaaaattcctaccagaacttcttaatggaaatcacatctaacccctccgtggctaaaaacacgcagagtattgatgtcttgcaggaattcatccattattgtcaagctggagaggcgttgatcgccttatgttacagctattataattctacattatacaactacgtggacttcacatgcgacataacgcatttagagcaacttttatactttttggatttacttttttggttatctgaaatatacggttttgaaaaagtcttgaacgtagcagttcattttgtttctagagttggtttatctaggtgggaattttacgtgggtcttgatgaaaactttgctgaaagaagaagaaatctctggtggaaagctttctatttcgagaaaactttagcctctaaacttggctatccttccaacattgatgactccaaaatcaattgtttattacctaagaattttagagatgttgggttcttggataatagagattttatcgagaacgtccacttagttcgcaggagcgaagcttttgacaacatgtgcatatccgacttaaaatactatggcgaattagctgtcttacaaatagtcagccatttctcttcttctgttttattcaatgaaaaattcacgtccattaggaatacaagtaaaccatctgttgttagagagaaattactcttcgaggtactcgagatttttaacgaaacagaaatgaaatatgatgctatcaaagagcaaactggaaaattgttcgatattgcattctctaaagatagtactgaactcaaagtttctagagaggataagattatggcttccaaatttgttttattttacgagcaccatttctgcagaatggttaacgaatctgataatattgtcgccagattatgcgtgcacagaaggccctccatattgattgaaaacttgaaaatataccttcacaagatttacaaaagttggaccgatatgaacaaaatcttattagactttgacaacgattattccgtataccgttctttcgcccattattctatcagttgcattattttggtatctcaagcattctctgtggccgaattcattaaagtaaatgacgttgtgaatatgattagagtcttcaaaagatttttggatataaaaattttttccgaaaatgagaccaatgagcatgtcttcaacagccaaagctttaaagactatacaagagctttttctttcttaacaatcgtcactcgtatcatgcttttggcatacggagagtcctctagcaccaacctcgatgttatctccaaatatattgatgagaatgcgccagatttaaaaggtataatagaacttgtcttggatacaaactcttgcgcttataggtttttattagaacctgttcagaagagtggattccatttaacggtctctcaaatgttgaaaaatagaaagtttcaggaaccattaatgagtaatgaagataataagcagatgaagcataattctggaaaaaatttgaatccggatctcccaagtcttaagacgggcacttcttgcttattgaatggcattgaatctcctcaattgccattcaatggtcgctctgcaccttccccagtgagaaacaactctttaccggagtttgcacaattgccttcttttaggtctttatccgtgtctgatatgatcaatcccgattacgcgcaaccaacaaatgggcaaaataatacgcaagtccaatctaataaaccaatcaatgctcagcagcaaatacccacttctgtacaagtaccatttatgaacacaaatgaaatcaataacaacaacaacaacaacaacaacaataaaaacaatattaacaatattaacaacaacaacagtaacaatttttctgcaactagttttaatttggggacattagatgaatttgttaataacggtgatcttgaggacctctacagtatcttatggagcgacgtttatccagatagttga

SEQ ID NO: 4127 - DNA, 1422 bp, Saccharomyces cerevisiae
atggcaaaggataatagtgagaagctgcaggtgcagggagaggagaaaaagtccaagcaaccggttaatttcctgcctcagggtaaatggctgaagccaaatgaaatcgaatatgagtttggtgggactactggtgttattggtatgctgatcgggtttccactgctaatgtactatatgtggatttgtgcggaattttatcacggtaaggttgccctacccaaggctggtgaatcgtggatgcactttatcaagcacctataccagttagtcttggagaacggtatcccagaaaagtatgactggactattttcttaacattttgggtgtttcagatcattttctactatacgttgcccgggatttggacaaaaggtcaaccattgtctcatttgaagggaaaacaattgccttacttttgtaatgccatgtggaccttgtatgtaactaccactttggtcttggttttgcactttaccaatctttttagattgtatgtcattattgaccgttttgggaggatcatgacatgtgccattatttcagggtttgccttctccatcatattgtacttatggactttatttatctcacatgactatcatagaatgacaggaaaccatctatatgatttcttcatgggagctccactaaaccctaggtgggggattttggacttgaagatgtttttcgaggttagattaccttggttcaccctttactttatcactttgggtgcctgtttgaagcagtgggagacttacggctatgtgacaccacaattgggggttgtcatgttagctcattggttgtacgcgaacgcatgtgctaaaggtgaagaattgattgttccaacctgggacatggcttacgaaaagtttggatttatgctgatcttctggaatattgccggtgtcccatacacttactgtcattgtacgttgtatttgtactaccatgacccatctgaatatcactggtctacactgtacaatgtttcgctgtacgttgttctattatgcgcctactacttctttgacacggcaaatgctcagaaaaatgccttcagaaagcaaatgtctggtgacaagacaggtaggaagactttcccatttttgccataccaaattttgaagaatccaaagtatatggttacctccaatggatcgtacctattgattgatggttggtacactttggctagaaaaattcactacactgccgattggactcaatctctcgtttgggccttgtcttgcgggttcaactcggtgttcccatggtttttcccagtattcttccttgttgtcctgattcacagagccttcagagaccaagcaaaatgtaagagaaagtacggaaaagattgggatgagtattgtaaacattgcccttacgtctttattccttatgttttctag

SEQ ID NO: 4128 - DNA, 1422 bp, Artificial Sequence
  Description of Artificial Sequence: Synthetic polynucleotide
atggcaaaggataatagtgagaagttacaggtgcagggagaggagaaaaagtccaagcaaccggttaatttcttacctcagggtaaatggttaaagccaaatgaaatcgaatatgagtttggtgggactactggtgttattggtatgttgatcgggtttccattgttgatgtactatatgtggatttgtgcggaattttatcacggtaaggttgccttgcccaaggctggtgaaagttggatgcactttatcaagcacttgtaccagttagtcttggagaacggtatcccagaaaagtatgactggactattttcttaacattttgggtgtttcagatcattttctactatacgttgcccgggatttggacaaaaggtcaaccattgtctcatttgaagggaaaacaattgccttacttttgtaatgccatgtggaccttgtatgtaactaccactttggtcttggttttgcactttaccaatctttttagattgtatgtcattattgaccgttttgggaggatcatgacatgtgccattatttctgggtttgccttctccatcatattgtacttatggactttatttatctctcatgactatcatagaatgacaggaaaccatttatatgatttcttcatgggagctccattgaaccctaggtgggggattttggacttgaagatgtttttcgaggttagattaccttggttcaccctttactttatcactttgggtgcctgtttgaagcagtgggagacttacggctatgtgacaccacaattgggggttgtcatgttagctcattggttgtacgcgaacgcatgtgctaaaggtgaagaattgattgttccaacctgggacatggcttacgaaaagtttggatttatgttgatcttctggaatattgccggtgtcccatacacttactgtcattgtacgttgtatttgtactaccatgacccatctgaatatcactggtctacattgtacaatgtttctttgtacgttgttttattatgcgcctactacttctttgacacggcaaatgctcagaaaaatgccttcagaaagcaaatgtctggtgacaagacaggtaggaagactttcccatttttgccataccaaattttgaagaatccaaagtatatggttacctccaatggatcttacttgttgattgatggttggtacactttggctagaaaaattcactacactgccgattggactcaatctctcgtttgggccttgtcttgcgggttcaactctgtgttcccatggtttttcccagtattcttccttgttgtcttgattcacagagccttcagagaccaagcaaaatgtaagagaaagtacggaaaagattgggatgagtattgtaaacattgcccttacgtctttattccttatgttttctga

SEQ ID NO: 4129 - DNA, 759 bp, Saccharomyces cerevisiae
atgtcgggtgctgctgctgcatctgctgctggttatgacaggcacatcactatcttttcccccgagggtcgtttatatcaagtagaatatgcctttaaagcgactaatcaaactaacataaactcactagcggtcagaggtaaagattgtacagtggtgataagtcagaaaaaggtccctgataaactgttggatccaactactgtttcgtatattttttgtatttcaagaacaattggtatggtagtgaacggaccaataccggatgcaagaaatgcggccctaagagccaaggctgaggctgcagaattccgttataaatatggttatgatatgccatgcgatgtattggctaagagaatggctaacctttcccaaatctatactcaaagagcatatatgagaccattaggtgttatactcacatttgtttcggtagatgaagaattgggtccctccatttacaaaactgaccctgcaggttattacgttggctacaaagctactgcgacaggaccaaaacaacaggagatcacaacaaacttagaaaaccatttcaaaaagagtaaaatcgaccatattaatgaagaatcatgggagaaggtggtagaatttgctattactcatatgattgacgcactgggtaccgaattttcaaagaatgacttggaagtcggtgtcgctacaaaggacaaattctttaccttgagtgctgagaacatcgaagaaaggctagtagcaattgctgaacaagattaa

SEQ ID NO: 4130 - DNA, 759 bp, Artificial Sequence
  Description of Artificial Sequence: Synthetic polynucleotide
atgagtggtgctgctgctgcatctgctgctggttatgacaggcacatcactatcttttcccccgagggtcgtttatatcaagtagaatatgcctttaaagcgactaatcaaactaacataaactctttagcggtcagaggtaaagattgtacagtggtgataagtcagaaaaaggtccctgataaacttttggatccaactactgtttcttatattttttgtatttctagaacaattggtatggtagtgaacggaccaataccggatgcaagaaatgcggccttgagagccaaggctgaggctgcagaattccgttataaatatggttatgatatgccatgcgatgtattggctaagagaatggctaacctttcccaaatctatactcaaagagcatatatgagaccattaggtgttatactcacatttgtttctgtagatgaagaattgggtccctccatttacaaaactgaccctgcaggttattacgttggctacaaagctactgcgacaggaccaaaacaacaggagatcacaacaaacttagaaaaccatttcaaaaagagtaaaatcgaccatattaatgaagaaagttgggagaaggtggtagaatttgctattactcatatgattgacgcattgggtaccgaattttccaagaatgacttggaagtcggtgtcgctacaaaggacaaattctttaccttgagtgctgagaacatcgaagaaaggttagtagcaattgctgaacaagattga

SEQ ID NO: 4131 - DNA, 525 bp, Saccharomyces cerevisiae
atgggcgaaggtttgctggatttaagatctcagcttggattttacaagttttaccaccacaatcctaagaacgttttgatccattccatatttgtccccacaatcctatttagtggtagctgtatgctccacagagtcaaaatatatcagagtatttcattgactgctgtgctaagcgttttattttccatattttattgtcttctgtatttacccacagggctattagcaggagttctcttgcttttgttaaatcttgcactcatcgatcacagggttgatttaacatttaagcaggaactgggtttgtttactattggttggattttccaatttgttggccatggtgtctttgagaaaaggaggccagcgttaattgacaatctagttcagagcttggtgctggcaccatattttataatgttcgagttccttttcaaattgggtttcatgcctagattaaaggcaactctcgaacatgatcttgaaattaagcaaagaaatttgcggatgcaaagacaataa

SEQ ID NO: 4132 - DNA, 525 bp, Artificial Sequence
  Description of Artificial Sequence: Synthetic polynucleotide
atgggcgaaggtttgttggatttaagatctcagcttggattttacaagttttaccaccacaatcctaagaacgttttgatccattccatatttgtccccacaatcttatttagtggtagctgtatgctccacagagtcaaaatatatcagagtatttctttgactgctgtgttgagcgttttattttccatattttattgtcttttatatttacccacagggttattagcaggagttctcttgcttttgttaaatcttgcactcatcgatcacagggttgatttaacatttaagcaggaattgggtttgtttactattggttggattttccaatttgttggccatggtgtctttgagaaaaggaggccagcgttaattgacaatttggttcagagcttggtgttggcaccatattttataatgttcgagttccttttcaaattgggtttcatgcctagattaaaggcaactctcgaacatgatcttgaaattaagcaaagaaatttgagaatgcaaagacaatga

SEQ ID NO: 4133 - DNA, 2340 bp, Saccharomyces cerevisiae
atggtttacactccatccaagggtccaagaactctttacgataaggtttttgatgcacatgttgtccatcaagatgaaaatggttcctttttgttgtatatcgacagacacttggttcatgaagtcacctctccacaagctttcgaaggcctagaaaatgccggcagaaaggtcagaagagttgattgtactctagctactgtagatcataatattccaactgaatcaagaaagaatttcaaatcactagacacatttatcaagcaaactgattcgcgtttacaagtcaaaactttagagaataatgttaaacagttcggcgttccatatttcggtatgagtgatgccagacaaggtatcgtccacaccatcggtcccgaagaaggtttcactttaccaggtaccactgttgtttgtggtgactctcatacctctactcacggtgcctttggttcgctggcctttggtattggtacttctgaagttgaacacgtcttggccactcaaacaattatccaagctaaatcgaaaaacatgagaattactgttaatggtaagctatcacctggtatcacatctaaagatttgattttgtatattattggtctgataggtactgcaggtggtactggttgcgttattgaattcgcaggtgaagccattgaagctctttctatggaagcacgtatgtccatgtgtaacatggccatcgaagctggtgcaagagcaggtatgattaaaccagacgaaactactttccaatacaccaaaggcagacctttggctccaaaaggtgccgaatgggaaaaggctgttgcctactggaaaactttgaaaacagacgaaggtgccaaatttgaccacgaaatcaacattgaagctgtcgacgtgattccaactattacatggggtacttctcctcaagatgccttaccaattactggttccgtaccagatccaaaaaatgttacagacccaataaagaaatctggtatggaaagagccttagcctatatgggtttggaacctaacacaccgctaaagagcatcaaagtagataaagtctttattggatcttgtaccaatggccgtattgaagatttaagaagtgctgcagctgtagttaggggtcaaaaattggctagtaacatcaaattagctatggttgttccgggatctggtttggtcaaaaaacaagccgaagcagaaggtttggacaagattttccaagaagctggttttgaatggagagaagctggttgttcaatatgtttaggtatgaaccctgatattttggatgcctatgaacgttgtgcttctacttccaacagaaatttcgaaggtcgtcaaggtgccttgtctcgtacacatctaatgtccccagccatggcggctgctgcaggtatcgcaggtcacttcgtagatattagagaattcgaatataaggatcaagaccaaagtagtccaaaggttgaggtcacttccgaagatgaaaaagagcttgaaagtgctgcttacgatcacgctgaacctgtccaacccgaagacgctccccaagatattgccaatgatgaattaaaagatattccagtgaagtcagatgatacacctgctaaacctagctcttccggcatgaagccatttttgactttggaaggtattagcgcaccattagataaggccaatgttgatacagacgctattatcccaaagcaatttttaaagacaattaagagaacgggtttgaaaaaagggttgttttatgaatggcgtttccgtaaagacgatcaaggtaaggatcaagaaaccgattttgtattaaatgttgaaccttggagggaagctgaaatattggttgttactggtgacaatttcggatgtggttcttccagagaacacgcaccatgggctctaaaagactttggtataaaatccatcattgcaccttcttacggtgatattttctacaacaactctttcaagaacggcttattacctattagattggatcaacaaataatcattgacaaattgatccctattgctaataagggtggtaagctctgcgtcgatttaccaaatcaaaaaattttggattccgatggcaatgtgctcgttgatcattttgaaatagaacctttcagaaagcactgcctagttaacggtcttgatgatattggtattacattgcaaaaggaagaatacatttccagatacgaagctttgagaagagagaaatactcattcttggaaggtggatcaaaattattaaaatttgacaacgttccaaaaagaaaagctgttacaactactttcgataaagtccaccaggattggtag

SEQ ID NO: 4134 - DNA, 2340 bp, Artificial Sequence
  Description of Artificial Sequence: Synthetic polynucleotide
atggtttacactccatccaagggtccaagaactctttacgataaggtttttgatgcacatgttgtccatcaagatgaaaatggttcctttttgttgtatatcgacagacacttggttcatgaagtcacctctccacaagctttcgaaggccttgaaaatgccggcagaaaggtcagaagagttgattgtactttggctactgtagatcataatattccaactgaatctagaaagaatttcaaatctttggacacatttatcaagcaaactgattctcgtttacaagtcaaaactttagagaataatgttaaacagttcggcgttccatatttcggtatgagtgatgccagacaaggtatcgtccacaccatcggtcccgaagaaggtttcactttaccaggtaccactgttgtttgtggtgactctcatacctctactcacggtgcctttggttctttggcctttggtattggtacttctgaagttgaacacgtcttggccactcaaacaattatccaagctaaatctaaaaacatgagaattactgttaatggtaagttatctcctggtatcacatctaaagatttgattttgtatattattggtttgataggtactgcaggtggtactggttgcgttattgaattcgcaggtgaagccattgaagctctttctatggaagcacgtatgtccatgtgtaacatggccatcgaagctggtgcaagagcaggtatgattaaaccagacgaaactactttccaatacaccaaaggcagacctttggctccaaaaggtgccgaatgggaaaaggctgttgcctactggaaaactttgaaaacagacgaaggtgccaaatttgaccacgaaatcaacattgaagctgtcgacgtgattccaactattacatggggtacttctcctcaagatgccttaccaattactggttccgtaccagatccaaaaaatgttacagacccaataaagaaatctggtatggaaagagccttagcctatatgggtttggaacctaacacaccgttgaagagcatcaaagtagataaagtctttattggatcttgtaccaatggccgtattgaagatttaagaagtgctgcagctgtagttaggggtcaaaaattggctagtaacatcaaattagctatggttgttccgggatctggtttggtcaaaaaacaagccgaagcagaaggtttggacaagattttccaagaagctggttttgaatggagagaagctggttgttctatatgtttaggtatgaaccctgatattttggatgcctatgaacgttgtgcttctacttccaacagaaatttcgaaggtcgtcaaggtgccttgtctcgtacacatttaatgtccccagccatggcggctgctgcaggtatcgcaggtcacttcgtagatattagagaattcgaatataaggatcaagaccaaagtagtccaaaggttgaggtcacttccgaagatgaaaaagagcttgaaagtgctgcttacgatcacgctgaacctgtccaacccgaagacgctccccaagatattgccaatgatgaattaaaagatattccagtgaagagtgatgatacacctgctaaacctagctcttccggcatgaagccatttttgactttggaaggtattagcgcaccattagataaggccaatgttgatacagacgctattatcccaaagcaatttttaaagacaattaagagaacgggtttgaaaaaagggttgttttatgaatggcgtttccgtaaagacgatcaaggtaaggatcaagaaaccgattttgtattaaatgttgaaccttggagggaagctgaaatattggttgttactggtgacaatttcggatgtggttcttccagagaacacgcaccatgggctttgaaagactttggtataaaatccatcattgcaccttcttacggtgatattttctacaacaactctttcaagaacggcttattacctattagattggatcaacaaataatcattgacaaattgatccctattgctaataagggtggtaagctctgcgtcgatttaccaaatcaaaaaattttggattccgatggcaatgtgctcgttgatcattttgaaatagaacctttcagaaagcactgcttagttaacggtcttgatgatattggtattacattgcaaaaggaagaatacatttccagatacgaagctttgagaagagagaaatactctttcttggaaggtggatctaaattattaaaatttgacaacgttccaaaaagaaaagctgttacaactactttcgataaagtccaccaggattggtga

SEQ ID NO: 4135 - DNA, 2757 bp, Saccharomyces cerevisiae
atgactgatacatcatcctcttcatcatcctcttcagcatcttctgtttcagctcatcagccaactcaagaaaagcctgctaagacttacgatgacgctgcatctgaatcttctgacgatgacgatatcgatgctttaatcgaagaactacaatctaatcacggtgtcgacgacgaagacagtgataacgatggtccagttgccgccggtgaagctagaccagttccagaagaatatttacaaactgacccatcttacggtttaacttccgatgaagttttgaaaagaagaaagaagtacggtttgaatcaaatggctgacgaaaaagaatctttagtcgttaagttcgttatgtttttcgtcggtccaattcaattcgttatggaagccgctgctattttggctgccggtttgtccgattgggtcgatttcggtgttatctgtggtttgttaatgttaaacgctggtgttggtttcgttcaagaattccaagctggttctattgtcgatgaattgaaaaagactttggctaacactgctgttgttatcagagacggtcaattggttgaaattccagccaacgaagtcgtcccaggtgatattttgcaattggaagatggtactgttatcccaactgatggtcgtattgtcactgaagactgtttcttgcaaatcgatcaatctgctattactggtgaatctttggctgtcgacaaacattacggtgaccaaactttctcttcttccactgttaagagaggtgaaggtttcatggttgttaccgctaccggtgacaacactttcgttggtagagctgctgctttggttaacaaagccgctggtggtcaaggtcatttcactgaagttttgaacggtattggtattatcttattggttttggtcattgccactttgttgttggtctggactgcttgtttctacagaaccaacggtattgttagaatcttgagatacactctaggtattactattattggtgtcccagtcggtttgccagctgtcgttaccaccactatggccgtcggtgctgcttacttggctaagaaacaagccattgttcaaaagttgtctgctattgaatccttggctggtgtcgaaatcttgtgttccgacaaaaccggtactttgaccaagaacaagttgtccttgcacgaaccatacactgttgaaggtgtttctccagacgacttgatgttgactgcttgtttggctgcttccagaaagaagaagggtttggatgctattgataaggctttcttgaagtctttgaagcaatatccaaaggctaaggacgctttgaccaagtacaaggttttggaattccatccatttgaccctgtctccaagaaggttactgccgttgtcgaatctccagaaggtgaaagaattgtttgtgttaagggtgctccattattcgtcttgaagactgtcgaagaagatcacccaatcccagaagatgtccatgaaaactacgaaaacaaggttgctgaattggcttctagagggttccgtgctttaggtgttgctagaaagagaggtgaaggtcactgggaaatcttgggtgttatgccatgtatggatccaccaagagacgatactgctcaaactgttagcgaagctagacacttgggtctaagagttaagatgttaactggtgatgctgttggtattgctaaggaaacttgtagacaattgggtttgggtaccaacatttacaacgctgaaagattaggtctaggtggcggtggtgacatgccaggttctgaattagctgattttgttgaaaatgccgatggtttcgctgaagttttcccacaacataaatacagagttgttgaaatcttgcaaaacagaggttacttggttgctatgactggtgatggtgttaacgatgctccatctttgaagaaggctgatactggtattgctgtcgaaggtgctactgatgctgccagatctgctgctgatattgttttcttggctcctggtctatctgctattattgatgctttgaagacctccagacaaatttttcacagaatgtactcttacgttgtttaccgtattgctttgtctctacatttggaaatcttcttgggtctatggattgctattttggataactctttggacattgatttgattgttttcatcgctattttcgctgatgttgctactttggctattgcttacgataatgctccttactctccaaagcccgttaaatggaacctaccaagattatggggtatgtctattattttgggcatagttttagctataggttcttggattaccttgactactatgttcttaccaaagggtggtattatccaaaacttcggtgctatgaacggtattatgttcttgcaaatttccttgactgaaaactggttgattttcattaccagagctgctggtccattctggtcttctatcccatcctggcaattggctggtgccgtcttcgctgtcgacatcatcgctaccatgtttaccttattcggttggtggtctgaaaactggactgatattgttactgtcgtccgtgtctggatctggtctatcggtatcttctgtgttttgggtggtttctactacgaaatgtccacttctgaagcctttgacagattgatgaacggtaagccaatgaaggaaaagaagtctaccagaagtgtcgaagacttcatggctgctatgcaaagagtctctactcaacacgaaaaggaaacctaa

SEQ ID NO: 4136 - DNA, 2757 bp, Artificial Sequence
  Description of Artificial Sequence: Synthetic polynucleotide
atgactgatacatcttcctcttcttcttcctcttctgcatcttctgtttctgctcatcagccaactcaagaaaagcctgctaagacttacgatgacgctgcatctgaatcttctgacgatgacgatatcgatgctttaatcgaagaattacaatctaatcacggtgtcgacgacgaagacagtgataacgatggtccagttgccgccggtgaagctagaccagttccagaagaatatttacaaactgacccatcttacggtttaacttccgatgaagttttgaaaagaagaaagaagtacggtttgaatcaaatggctgacgaaaaagaatctttagtcgttaagttcgttatgtttttcgtcggtccaattcaattcgttatggaagccgctgctattttggctgccggtttgtccgattgggtcgatttcggtgttatctgtggtttgttaatgttaaacgctggtgttggtttcgttcaagaattccaagctggttctattgtcgatgaattgaaaaagactttggctaacactgctgttgttatcagagacggtcaattggttgaaattccagccaacgaagtcgtcccaggtgatattttgcaattggaagatggtactgttatcccaactgatggtcgtattgtcactgaagactgtttcttgcaaatcgatcaatctgctattactggtgaatctttggctgtcgacaaacattacggtgaccaaactttctcttcttccactgttaagagaggtgaaggtttcatggttgttaccgctaccggtgacaacactttcgttggtagagctgctgctttggttaacaaagccgctggtggtcaaggtcatttcactgaagttttgaacggtattggtattatcttattggttttggtcattgccactttgttgttggtctggactgcttgtttctacagaaccaacggtattgttagaatcttgagatacactttaggtattactattattggtgtcccagtcggtttgccagctgtcgttaccaccactatggccgtcggtgctgcttacttggctaagaaacaagccattgttcaaaagttgtctgctattgaatccttggctggtgtcgaaatcttgtgttccgacaaaaccggtactttgaccaagaacaagttgtccttgcacgaaccatacactgttgaaggtgtttctccagacgacttgatgttgactgcttgtttggctgcttccagaaagaagaagggtttggatgctattgataaggctttcttgaagtctttgaagcaatatccaaaggctaaggacgctttgaccaagtacaaggttttggaattccatccatttgaccctgtctccaagaaggttactgccgttgtcgaatctccagaaggtgaaagaattgtttgtgttaagggtgctccattattcgtcttgaagactgtcgaagaagatcacccaatcccagaagatgtccatgaaaactacgaaaacaaggttgctgaattggcttctagagggttccgtgctttaggtgttgctagaaagagaggtgaaggtcactgggaaatcttgggtgttatgccatgtatggatccaccaagagacgatactgctcaaactgttagcgaagctagacacttgggtttaagagttaagatgttaactggtgatgctgttggtattgctaaggaaacttgtagacaattgggtttgggtaccaacatttacaacgctgaaagattaggtttaggtggcggtggtgacatgccaggttctgaattagctgattttgttgaaaatgccgatggtttcgctgaagttttcccacaacataaatacagagttgttgaaatcttgcaaaacagaggttacttggttgctatgactggtgatggtgttaacgatgctccatctttgaagaaggctgatactggtattgctgtcgaaggtgctactgatgctgccagatctgctgctgatattgttttcttggctcctggtctttctgctattattgatgctttgaagacctccagacaaatttttcacagaatgtactcttacgttgtttaccgtattgctttgtctttgcatttggaaatcttcttgggtttatggattgctattttggataactctttggacattgatttgattgttttcatcgctattttcgctgatgttgctactttggctattgcttacgataatgctccttactctccaaagcccgttaaatggaacttaccaagattatggggtatgtctattattttgggcatagttttagctataggttcttggattaccttgactactatgttcttaccaaagggtggtattatccaaaacttcggtgctatgaacggtattatgttcttgcaaatttccttgactgaaaactggttgattttcattaccagagctgctggtccattctggtcttctatcccatcctggcaattggctggtgccgtcttcgctgtcgacatcatcgctaccatgtttaccttattcggttggtggtctgaaaactggactgatattgttactgtcgtccgtgtctggatctggtctatcggtatcttctgtgttttgggtggtttctactacgaaatgtccacttctgaagcctttgacagattgatgaacggtaagccaatgaaggaaaagaagtctaccagaagtgtcgaagacttcatggctgctatgcaaagagtctctactcaacacgaaaaggaaacctga

SEQ ID NO: 4137 - DNA, 87 bp, Saccharomyces cerevisiae
atgctcccctccattagtttcgattatataaaaaggccaaatattgtattattttcaaatgtcctatcattatcgtctaacatctaa

SEQ ID NO: 4138 - DNA, 87 bp, Artificial Sequence
  Description of Artificial Sequence: Synthetic oligonucleotide
atgctcccctccattagtttcgattatataaaaaggccaaatattgtattattttctaatgtcctttctttatcttctaacatctga

SEQ ID NO: 4139 - DNA, 378 bp, Saccharomyces cerevisiae
atgatggaaaaggaaggaaaaaaacccgaaaggcatatggataacattctgaaaatgtctattcctgtcaaaagcatgtcagaggtctcgaggcctggaagtgccgcattaggaaatacagatgcaatgcgcgcgagtttacgaaattctcgcaggagtttctccggccatgtgcggctggttctacgtctcgtgtatgggtttatttctgcggtaattatcgccggatctccgcttcgagaccgggtttgttttcaaattaccggaaaaggtcaggcaaaacagagtgatgtatgggtgatcccagcaatgcctgtttatgtttctccgtttcaggaagcttgttttgttttttccccgtcagcgatggtgacgtaa

SEQ ID NO: 4140 - DNA, 378 bp, Artificial Sequence
  Description of Artificial Sequence: Synthetic polynucleotide
atgatggaaaaggaaggaaaaaaacccgaaaggcatatggataacattttgaaaatgtctattcctgtcaaaagcatgtctgaggtctccaggcctggaagtgccgcattaggaaatacagatgcaatgcgcgcgagtttaagaaattctcgcaggagtttctccggccatgtgagattggttttacgtctcgtgtatgggtttatttctgcggtaattatcgccggatctccgcttcgtgacagagtttgttttcaaattaccggaaaaggtcaggcaaaacagagtgatgtatgggtgatcccagcaatgcctgtttatgtttctccgtttcaggaagcttgttttgttttttccccgtctgcgatggtgacgtga

SEQ ID NO: 4141 - DNA, 111 bp, Saccharomyces cerevisiae
atgctaatcttcataattcattatcatcgccacttggcattgcatttaatgggcgccttccaaaaacattcaaatagtatcagcccccccccaaggaaaggctttatttga

SEQ ID NO: 4142 - DNA, 111 bp, Artificial Sequence
  Description of Artificial Sequence: Synthetic polynucleotide
atgttgatcttcataattcattatcatcgccacttggcattgcatttaatgggcgccttccaaaaacattctaatagtatcagcccccccccaaggaaaggctttatttga

SEQ ID NO: 4143 - DNA, 3522 bp, Saccharomyces cerevisiae
atgtctagacaagacgaaaattctgctttactagcgaataatgaaaataacaaaccatcgtatacgggaaatgagaacggagtctacgataatttcaaattatcaaaaagtcaactttcggatcttcataaccctaaatcaataagatcatttgtcagattatttggatatgagtctaacagcctcttcaaatacttgaaaacagataaaaatgcaggcatttctcttccagaaatatcaaattatcgaaagacaaaccggtataaaaattatggcgataattcacttcctgaaagaataccaaagtcttttttacaattagtatgggctgcttttaatgacaaaacaatgcaattactgacagtcgccgctgttgtttcctttgttttaggtctatacgaactatggatgcaacctccacagtatgatcctgaaggaaataaaattaagcaagttgactggattgaaggggttgctatcatgattgcggtctttgtggtagttctagtgagtgccgctaacgattaccagaaggagttgcaatttgcaaagctaaataaaaagaaggaaaaccgtaaaattatagtcataagaaatgatcaggaaatattaatttccattcaccacgttttagtcggtgatgtcatttcattacaaaccggtgatgttgtccccgctgattgtgttatgatatcagggaagtgtgaggcagatgaatcatccatcactggtgaatctaacacaatacagaaatttccggtggataactcattaagagatttcaaaaaatttaattctatcgatagtcataaccatagcaaaccattagatataggtgacgttaacgaagacggtaacaagattgctgattgtatgttgatttcaggttccagaattctctctggcttgggcaggggtgtcatcacgtccgtgggtataaactcagtttacggtcaaaccatgacttcattaaatgccgaacctgaaagtactccattacagttacatttgagccaattggctgataatatatccgtttacggttgcgtgtctgctataattcttttcttggtccttttcactaggtacttattttacataatacctgaggatggcaggttccatgatctagatcccgctcaaaagggttctaaatttatgaacatttttatcacatctatcacggttattgtggtggctgttccggaaggtttaccattagctgtaactttggccttagcgtttgcaacaacaagaatgacaaaagacggtaatttagtacgggttttaagaagctgtgaaacgatgggatctgctactgcagtgtgctctgataagactggcactttgacagaaaatgtcatgactgtcgttcgtggcttcccgggcaattctaaatttgatgatagtaaatcgttgcccgttagcgaacaaaggaagctgaattctaagaaagtttttgaagaaaattgttcgtcatccttgagaaatgatttattagccaatattgtcctgaattctaccgccttcgaaaacagagattataagaaaaacgataaaaatacaaatggtagtaaaaatatgtcaaaaaatttgagttttttagataagtgtaaatctagattatcgttttttaaaaaaggcaacagggaagatgacgaggatcaattattcaaaaatgtcaacaagggtaggcaagaaccctttattggctctaaaacggaaacagccttactcagtttggcaagattatcattaggattacaaccgggagaattgcaatatttgagagatcaaccgatggaaaagtttaatatcgaaaaagttgttcaaacaattccgtttgaaagttctcgtaaatgggccggcttagtggtaaagtacaaagaaggcaaaaataaaaaaccattttacaggtttttcattaaaggtgcagcagaaattgtttccaagaattgttcgtacaagaggaattcagatgatactttggaagaaatcaatgaggacaataaaaaagaaactgatgatgaaatcaaaaatcttgcgtccgatgctctcagagccataagtgttgcccacaaagatttctgcgaatgtgatagctggccccctgaacagctgcgtgataaagactcaccaaatatagctgctcttgacttgctatttaacagtcaaaagggcttaattctagatggtttacttgggattcaagaccctttacgtgcaggcgttagggagtcagtacaacagtgccaacgtgctggtgtaactgtgcgtatggttactggtgacaatatattaacagcaaaagcaatcgcgaggaattgtgcgattctttctactgatattagttcagaggcttattctgcaatggaaggcactgaattcagaaagttaacgaaaaacgaacgtataagaatcctgccaaatttaagggtcttagcaaggtcttcgcctgaggataaaaggttattagtagaaacattgaaggggatgggagatgttgttgcggtcactggcgatggtacgaacgatgctccagctttaaagctagctgatgttggtttctcaatgggtatttccggtacggaggttgccagagaggcttctgacattattttgatgactgatgatttctcagctattgtcaacgctattaagtggggaagatgtgtttcagtctccataaaaaagttcatacagtttcaattaattgttaatatcaccgcagtgattttaacgttcgtttcatccgttgcatctagtgatgaaacatcagtactgacggcggtccaactgttatggatcaatctaatcatggatactctagcagctttagctttagccactgataaacccgatccaaatatcatggacagaaaacctaggggccgctcaacttctttgatttctgtgtcaacttggaaaatgattctatcacaagctacattgcagttgatagttactttcattttgcatttttacgggccagagttattcttcaagaaacatgaagatgaaataacaagtcaccaacagcagcaactgaatgccatgacattcaacacttttgtttggttgcaattttttaccatgttagtatcgagaaaattagatgaaggtgatggtatatcaaactggagaggcaggatttctgccgccaatttgaatttcttccaagacttgggtagaaactattattttctcacgatcatggcgatcattggcagctgtcaagttttaatcatgttttttggtggcgcaccattttctattgccagacaaaccaaatcaatgtggataaccgcggtactgtgtggtatgttgtctctaatcatgggggtgctagtgagaatctgccccgatgaagtagcagtgaaggtatttccggctgctttcgttcaaagattcaagtacgtatttggactcgagttcctcagaaaaaaccatactggaaaacacgacgatgaagaagcgctgttggaggaatctgatagtccagagtccaccgccttttattaa

SEQ ID NO: 4144 - DNA, 3522 bp, Artificial Sequence
  Description of Artificial Sequence: Synthetic polynucleotide
atgtctagacaagacgaaaattctgctttattggcgaataatgaaaataacaaaccatcttatacgggaaatgagaacggagtctacgataatttcaaattatccaaaagtcaactttctgatcttcataaccctaaatctataagatcttttgtcagattatttggatatgagtctaacagcctcttcaaatacttgaaaacagataaaaatgcaggcatttctcttccagaaatatccaattatagaaagacaaacagatataaaaattatggcgataattctcttcctgaaagaataccaaagtcttttttacaattagtatgggctgcttttaatgacaaaacaatgcaattattaacagtcgccgctgttgtttcctttgttttaggtttatacgaattatggatgcaacctccacagtatgatcctgaaggaaataaaattaagcaagttgactggattgaaggggttgctatcatgattgcggtctttgtggtagttttggtgagtgccgctaacgattaccagaaggagttgcaatttgcaaagttgaataaaaagaaggaaaaccgtaaaattatagtcataagaaatgatcaggaaatattaatttccattcaccacgttttagtcggtgatgtcatttctttacaaaccggtgatgttgtccccgctgattgtgttatgataagcgggaagtgtgaggcagatgaatcttccatcactggtgaatctaacacaatacagaaatttccggtggataactctttaagagatttcaaaaaatttaattctatcgatagtcataaccatagcaaaccattagatataggtgacgttaacgaagacggtaacaagattgctgattgtatgttgatttctggttccagaattctctctggcttgggcaggggtgtcatcacgtccgtgggtataaactctgtttacggtcaaaccatgacttctttaaatgccgaacctgaaagtactccattacagttacatttgagccaattggctgataatatatccgtttacggttgcgtgtctgctataattcttttcttggtccttttcactaggtacttattttacataatacctgaggatggcaggttccatgatttggatcccgctcaaaagggttctaaatttatgaacatttttatcacatctatcacggttattgtggtggctgttccggaaggtttaccattagctgtaactttggccttagcgtttgcaacaacaagaatgacaaaagacggtaatttagtaagagttttaagaagctgtgaaacgatgggatctgctactgcagtgtgctctgataagactggcactttgacagaaaatgtcatgactgtcgttcgtggcttcccgggcaattctaaatttgatgatagtaaatctttgcccgttagcgaacaaaggaagttgaattctaagaaagtttttgaagaaaattgttcttcttccttgagaaatgatttattagccaatattgtcttgaattctaccgccttcgaaaacagagattataagaaaaacgataaaaatacaaatggtagtaaaaatatgtccaaaaatttgagttttttagataagtgtaaatctagattatctttttttaaaaaaggcaacagggaagatgacgaggatcaattattcaaaaatgtcaacaagggtaggcaagaaccctttattggctctaaaacggaaacagccttactcagtttggcaagattatctttaggattacaaccgggagaattgcaatatttgagagatcaaccgatggaaaagtttaatatcgaaaaagttgttcaaacaattccgtttgaaagttctcgtaaatgggccggcttagtggtaaagtacaaagaaggcaaaaataaaaaaccattttacaggtttttcattaaaggtgcagcagaaattgtttccaagaattgttcttacaagaggaattctgatgatactttggaagaaatcaatgaggacaataaaaaagaaactgatgatgaaatcaaaaatcttgcgtccgatgctctcagagccataagtgttgcccacaaagatttctgcgaatgtgatagctggccccctgaacagttgcgtgataaagactctccaaatatagctgctcttgacttgttatttaacagtcaaaagggcttaattttagatggtttacttgggattcaagaccctttacgtgcaggcgttagggagagtgtacaacagtgccaacgtgctggtgtaactgtgcgtatggttactggtgacaatatattaacagcaaaagcaatcgcgaggaattgtgcgattctttctactgatattagtagtgaggcttattctgcaatggaaggcactgaattcagaaagttaacgaaaaacgaacgtataagaatcttgccaaatttaagggtcttagcaaggtcttctcctgaggataaaaggttattagtagaaacattgaaggggatgggagatgttgttgcggtcactggcgatggtacgaacgatgctccagctttaaagttggctgatgttggtttctccatgggtatttccggtacggaggttgccagagaggcttctgacattattttgatgactgatgatttcagtgctattgtcaacgctattaagtggggaagatgtgtttctgtctccataaaaaagttcatacagtttcaattaattgttaatatcaccgcagtgattttaacgttcgtttcttccgttgcatctagtgatgaaacatctgtattgacggcggtccaattattatggatcaatttgatcatggatactttggcagctttagctttagccactgataaacccgatccaaatatcatggacagaaaacctaggggccgctccacttctttgatttctgtgtccacttggaaaatgattttatctcaagctacattgcagttgatagttactttcattttgcatttttacgggccagagttattcttcaagaaacatgaagatgaaataacaagtcaccaacagcagcaattgaatgccatgacattcaacacttttgtttggttgcaattttttaccatgttagtatctagaaaattagatgaaggtgatggtataagcaactggagaggcaggatttctgccgccaatttgaatttcttccaagacttgggtagaaactattattttctcacgatcatggcgatcattggcagctgtcaagttttaatcatgttttttggtggcgcaccattttctattgccagacaaaccaaatctatgtggataaccgcggtattatgtggtatgttgtctttgatcatgggggtgttagtgagaatctgccccgatgaagtagcagtgaaggtatttccggctgctttcgttcaaagattcaagtacgtatttggactcgagttcctcagaaaaaaccatactggaaaacacgacgatgaagaagcgttattggaggaatctgatagtccagagtccaccgccttttattga

SEQ ID NO: 4145 - DNA, 840 bp, Saccharomyces cerevisiae
atggtagagttgacaattacgggtgatgatgatgatatattgagtatgttttttgatgaggagttcgttccccatgcattcgttgatatactcttatcaaatgccttaaacgaagatcagattcaaacgcaatcagtatcctcattgctattaaccaggttggatttttacacaaagaaccttacaaaagagttggaaagcaccatatggaatttggataaattatctcaaacgttaccaagaacttgggcatcttctaggtatcacaaagaagcagaacagaacgattcctcattgtattctactgaatccttaaaatcatcgaagcttgaatattacttagatacgttggcaagtgctgtaagagcattagaaacaggaatgcataatgtaactgagaaactaagcgatctagataacgaaaataatcgcaataccaatgtgaggcaacaactgcaaagtttaatgttgattaaggagagaattgaaaaagtggtatattacctggaacaagttaggaccgttacgaatatttcgacagttagagaaaataatacaaccagcacggggacagatctttcgataacagattttagaacatcattgaaagcattagaggatacaatcgatgaatctttaagctctgcgattgataacgaggctaaagatgaaacaaacaaggatttgattgggagaattgattcactttctgaactgaaatgtctgtttaaaggcctagataagttctttgctgagtatagcaacttttcggagagcataaaatcaaaagcacaaagttatttatcaaccaagaatattgacgatggtatgatatcataa

SEQ ID NO: 4146 - DNA, 840 bp, Artificial Sequence
  Description of Artificial Sequence: Synthetic polynucleotide
atggtagagttgacaattacgggtgatgatgatgatatattgagtatgttttttgatgaggagttcgttccccatgcattcgttgatatactcttatccaatgccttaaacgaagatcagattcaaacgcaaagtgtatcctctttgttattaaccaggttggatttttacacaaagaaccttacaaaagagttggaaagcaccatatggaatttggataaattatctcaaacgttaccaagaacttgggcatcttctaggtatcacaaagaagcagaacagaacgattcctctttgtattctactgaatccttaaaaagctctaagcttgaatattacttagatacgttggcaagtgctgtaagagcattagaaacaggaatgcataatgtaactgagaaattaagcgatttggataacgaaaataatcgcaataccaatgtgaggcaacaattacaaagtttaatgttgattaaggagagaattgaaaaagtggtatattacttggaacaagttaggaccgttacgaatatttctacagttagagaaaataatacaaccagcacggggacagatctttccataacagattttagaacatctttgaaagcattagaggatacaatcgatgaatctttaagctctgcgattgataacgaggctaaagatgaaacaaacaaggatttgattgggagaattgattctctttctgaattgaaatgtttatttaaaggcttggataagttctttgctgagtatagcaacttttctgagagcataaaatctaaagcacaaagttatttatctaccaagaatattgacgatggtatgatatcttga

SEQ ID NO: 4147 - DNA, 1254 bp, Saccharomyces cerevisiae
atgactaagaccatcacagttgctcatatccagtatgattttaaagctgttctggaagaaaatgatgaaaatgacgatgaattttacatcaatgttgacaaaaacctaaatgaaatcaaggagcataagatagtagtgttaggaaatagcaggggtgtagatgcaggcaaaggaaatacatttgaaaaggttggctcccacttatacaaggcgcggttggatggacatgattttttattcaatactatcataagagatggttcaaagatgctcaagagggcggattatactgccgtagacacagctaaacttcagatgagacggttcatattaggcactacagaaggcgatattaaagtattggattcaaatttcaaccttcaaagagaaattgaccaagctcacgttagtgaaataacaaaactaaagttttttccaagcggtgaagctttgatatctagttcacaggatatgcaattaaagatctggtcagtaaaagacggctcaaatcctcgcacgttaattggacacagggcgacagtcacagatattgccataatagaccgaggaaggaatgtgctctctgcctctttggatggtacaattcgcctttgggagtgcggcacaggaacgacaattcacacgtttaacagaaaagaaaacccgcatgatggtgttaacagcatagcgctgttcgtagggacagacagacaattacatgaaatttctacttccaagaaaaataatctagagtttggaacatatggaaaatatgtgattgctggtcacgtttctggtgttattactgtacataatgtattttccaaagagcaaactattcaactcccaagcaagttcacatgttcatgtaattcattgacagtcgatggcaataatgcaaactatatttatgccggatatgaaaatggaatgctagctcaatgggatctaagatcaccggaatgcccagttggtgagtttttaattaatgaaggcaccccaataaacaatgtctactttgcagccggagccttatttgtatcttctggattcgacaccagtattaagcttgacattatttcagacccagaaagtgaacggcccgctattgaatttgagacgcccacctttttagtttccaatgacgatgaggtcagccaattctgttacgtttctgatgatgaatcaaatggggaggtgcttgaagttggaaaaaacaacttctgcgctttgtataacttaagtaatccttaa

SEQ ID NO: 4148 - DNA, 1254 bp, Artificial Sequence
  Description of Artificial Sequence: Synthetic polynucleotide
atgactaagaccatcacagttgctcatatccagtatgattttaaagctgttttggaagaaaatgatgaaaatgacgatgaattttacatcaatgttgacaaaaacttgaatgaaatcaaggagcataagatagtagtgttaggaaatagcaggggtgtagatgcaggcaaaggaaatacatttgaaaaggttggctcccacttatacaaggcgcgtttggatggacatgattttttattcaatactatcataagagatggttccaagatgctcaagagggcggattatactgccgtagacacagctaaacttcagatgagaagattcatattaggcactacagaaggcgatattaaagtattggattctaatttcaaccttcaaagagaaattgaccaagctcacgttagtgaaataacaaaattgaagttttttccaagcggtgaagctttgatatctagttctcaggatatgcaattaaagatctggtctgtaaaagacggcagtaatcctcgcacgttaattggacacagggcgacagtcacagatattgccataatagacagaggaaggaatgtgctctctgcctctttggatggtacaattcgcctttgggagtgcggcacaggaacgacaattcacacgtttaacagaaaagaaaacccgcatgatggtgttaacagcatagcgttattcgtagggacagacagacaattacatgaaatttctacttccaagaaaaataatttggagtttggaacatatggaaaatatgtgattgctggtcacgtttctggtgttattactgtacataatgtattttccaaagagcaaactattcaactcccaagcaagttcacatgttcttgtaattctttgacagtcgatggcaataatgcaaactatatttatgccggatatgaaaatggaatgttggctcaatgggatttgagatctccggaatgcccagttggtgagtttttaattaatgaaggcaccccaataaacaatgtctactttgcagccggagccttatttgtatcttctggattcgacaccagtattaagcttgacattatttctgacccagaaagtgaaaggcccgctattgaatttgagacgcccacctttttagtttccaatgacgatgaggtcagccaattctgttacgtttctgatgatgaaagtaatggggaggtgcttgaagttggaaaaaacaacttctgcgctttgtataacttaagtaatccttga

SEQ ID NO: 4149 - DNA, 1701 bp, Saccharomyces cerevisiae
atgtccacaaacctgaacccattcatgaataatacgccttcctcctccccactcaagggttctgaaagtaagagggtatcgaaaaggccaatatctagttcttcgtccgcctcactattatcatctccctccaggcgatcgaggccgtctacagtatatggtgataggtatattccttcccgaacagatatagatttcaattccatcgtttccatcagtagtatggcaagcgttccagcccttaatccatcgagtacggaagatcaagtagaataccaaaaggaaagacaggcacatgaaacttataatactttgctgaagaatgagctttttggcgagatgctaagcaaggatacggtaggctcagagagcagtatagatcgcattaagaatacgagaccatctactagaggcaatgtgcacgcagaaaatacaactagacatggttatgaactggaacgagtatcaactccacctcctgaagctgctggtttagaggaattttcgccacattccacgccagtcactcctcgacgtctttttacatcacagcaagatgaaatcacgagaccctcaagcaactcagttaggggcgccagcctgttgacttatcaacaacgtaaaggtagaagactatctgcggcctctttgttacaatctcaattttttgattccatgtcgccagttaggccggattccaaacagctcctattatcaccggggaagcaatttagacaaatagctaaagttccctatagagttttagatgccccatcattagcagacgatttttactacagcttgatagattggtcaagtactgatgttttggcagttgctcttggaaaatcgatttttttaaccgataataacactggcgacgttgttcacttatgcgacacggaaaacgaatacacaagcttaagctggattggagcaggctctcatctggcagtaggtcaagcaaatggacttgtagaaatttatgacgtaatgaaaagaaaatgtattaggacgttgtcgggacatattgacagagtagcgtgtttatcttggaataatcatgttttgacgtctgggagtagagatcatcgaatactgcatagggatgttaggatgccagatcccttttttgaaactatagaatcgcacactcaggaagtctgtggcctaaagtggaatgtagcggacaacaaacttgcctcaggtggtaacgataacgtcgtccatgtttacgaaggaacgtcgaaatctccaatcttgacgtttgacgaacataaggctgctgttaaggcaatggcctggtctcctcataaacgaggtgtgctagctaccggtggtggtacagcagatagaagactaaaaatctggaacgttaatacgtcaataaagatgagtgatatagatagcggctctcaaatatgtaatatggtatggtcaaagaatactaacgagcttgtgacatcacatggttactcaaaatataacttaaccttgtgggactgtaactctatggatccaattgcaattctgaaaggtcatagtttcagggttctgcatttaacgttatccaatgatggaaccacggtggtttctggggctggagatgaaacattgcgatattggaaactttttgataaaccaaaagcgaaggtacagccaaattcgttaatatttgacgcatttaatcaaatacgttag

SEQ ID NO: 4150 - DNA, 1701 bp, Artificial Sequence
  Description of Artificial Sequence: Synthetic polynucleotide
atgtccacaaacttgaacccattcatgaataatacgccttcctcctccccactcaagggttctgaaagtaagagggtatccaaaaggccaatatctagttcttcttccgcctctttattatcttctccctccaggagaagtaggccgtctacagtatatggtgataggtatattccttccaggacagatatagatttcaattccatcgtttccatcagtagtatggcaagcgttccagcccttaatccatctagtacggaagatcaagtagaataccaaaaggaaagacaggcacatgaaacttataatactttgttgaagaatgagctttttggcgagatgttaagcaaggatacggtaggcagtgagagcagtatagatcgcattaagaatacgagaccatctactagaggcaatgtgcacgcagaaaatacaactagacatggttatgaattggaaagagtatccactccacctcctgaagctgctggtttagaggaattttctccacattccacgccagtcactcctcgtcgtctttttacatctcagcaagatgaaatcacgagaccctctagcaactctgttaggggcgccagccttttgacttatcaacaacgtaaaggtagaagattatctgcggcctctttgttacaatctcaattttttgattccatgtctccagttaggccggattccaaacagctcttgttatctccggggaagcaatttagacaaatagctaaagttccctatagagttttagatgccccatctttagcagacgatttttactacagcttgatagattggtctagtactgatgttttggcagttgctcttggaaaatccatttttttaaccgataataacactggcgacgttgttcacttatgcgacacggaaaacgaatacacaagcttaagctggattggagcaggctctcatttagcagtaggtcaagcaaatggacttgtagaaatttatgacgtaatgaaaagaaaatgtattaggacgttgagtggacatattgacagagtagcgtgtttatcttggaataatcatgttttgacgtctgggagtagagatcatagaatattacatagggatgttaggatgccagatcccttttttgaaactatagaatctcacactcaggaagtctgtggcttgaagtggaatgtagcggacaacaaacttgcctctggtggtaacgataacgtcgtccatgtttacgaaggaacgtccaaatctccaatcttgacgtttgacgaacataaggctgctgttaaggcaatggcctggtctcctcataaaagaggtgtgttggctaccggtggtggtacagcagatagaagattgaaaatctggaacgttaatacgtctataaagatgagtgatatagatagcggctctcaaatatgtaatatggtatggtccaagaatactaacgagcttgtgacatctcatggttactctaaatataacttaaccttgtgggactgtaactctatggatccaattgcaattttgaaaggtcatagtttcagggttttgcatttaacgttatccaatgatggaaccacggtggtttctggggctggagatgaaacattgagatattggaaactttttgataaaccaaaagcgaaggtacagccaaattctttaatatttgacgcatttaatcaaatacgttga

SEQ ID NO: 4151 - DNA, 651 bp, Saccharomyces cerevisiae
atgttatcacactacatcttcctggcattcgttttattgccattcagagtttccgcgttttacttctatggttatggtggagacagaaaatgcttcctgaaggaactatccaaagacacccttttaaaaggttcttacaatttggaagtttacgatgataagttggcagattatgcgcttcccagttataatgactatggcattgtcatagatgtggaagaagtctttgataataatcatagggtagtccaccaacagggctctccttccggtgacttcagctttctagctttggaatctggagaatataagatctgtttacagtctagggtaaataactgggtagggaaaaccaaaacaaagttagaaatcgaatttgaagtcggttttgaagcaatgttggacatgcaaagaaaagaaaccttggaaagtttgcacggaaaagtcagtatattgaattctaagatcgtggatatcaggagagagcaacaactgatgagagaacgtgaagaatcctttagagacatatcagagtctgtgaattctcgcgcaatgtggtggacggtaactcaagttactcttctcattataatttgtgtatggcaaatgaaaagtttacgctcgttttttgttaagcagaaagtattatga

SEQ ID NO: 4152 - DNA, 651 bp, Artificial Sequence
  Description of Artificial Sequence: Synthetic polynucleotide
atgttatcccactacatcttcttggcattcgttttattgccattcagagtttccgcgttttacttctatggttatggtggagacagaaaatgcttcttgaaggaattatccaaagacacccttttaaaaggttcttacaatttggaagtttacgatgataagttggcagattatgcgcttcccagttataatgactatggcattgtcatagatgtggaagaagtctttgataataatcatagggtagtccaccaacagggctctccttccggtgacttcagctttttggctttggaatctggagaatataagatctgtttacagtctagggtaaataactgggtagggaaaaccaaaacaaagttagaaatcgaatttgaagtcggttttgaagcaatgttggacatgcaaagaaaagaaaccttggaaagtttgcacggaaaagtcagtatattgaattctaagatcgtggatatcaggagagagcaacaattgatgagagaacgtgaagaatcctttagagacatatctgagtctgtgaattctcgcgcaatgtggtggacggtaactcaagttactcttctcattataatttgtgtatggcaaatgaaaagtttacgctccttttttgttaagcagaaagtattatga

SEQ ID NO: 4153 - DNA, 1050 bp, Saccharomyces cerevisiae
atgtcaaagatagattcagttttaattatcggtggttctggttttcttggattgcacttaattcagcaattttttgatattaatcctaagccagacatccacatttttgatgttagagatctccctgaaaaactttcaaaacagtttacttttaatgtagacgacataaaatttcataagggtgatttaacatcacctgatgatatggaaaacgcaattaacgaaagtaaagcaaatgttgttgttcattgtgcttctccaatgcatggtcaaaatccagatatttatgacatagtgaatgttaagggaacccgtaacgtgatagatatgtgcaagaaatgtggcgttaatatacttgtatatacttcctctgctggtgttatttttaatgggcaagatgtgcacaatgcagacgaaacctggccaatcccagaagttcctatggatgcgtacaatgagactaaagctatcgccgaagatatggtcttgaaggcgaatgatccaagcagtgatttctatactgttgctcttcgtccagctggtatttttggcccaggtgataggcaattagtacctggtctaagacaggttgcgaaattggggcagtcgaagttccaaattggtgataataacaatctatttgattggacttatgctggaaatgttgctgacgcgcatgtgttagctgcacagaaacttctcgatccaaaaacaagaactgctgtctcgggtgaaacttttttcattaccaatgatacccccacctatttttgggccttggcccgtactgtgtggaaggcagatggtcatattgataaacatgttattgttttgaaaaggccagttgcaatttgtgcaggttatctttcagaatgggtatccaagatgctgggtaaagagccaggtttgactccattcagagtcaagattgtgtgtgcataccgttatcacaacattgctaaggccaaaaagttgctaggctacacaccaagagttggtattgaagaaggaattaacaaaacgttggcctggatggacgaaggtttgtaa

SEQ ID NO: 4154 - DNA, 1050 bp, Artificial Sequence
  Description of Artificial Sequence: Synthetic polynucleotide
atgtccaagatagattctgttttaattatcggtggttctggttttcttggattgcacttaattcagcaattttttgatattaatcctaagccagacatccacatttttgatgttagagatctccctgaaaaactttctaaacagtttacttttaatgtagacgacataaaatttcataagggtgatttaacatctcctgatgatatggaaaacgcaattaacgaaagtaaagcaaatgttgttgttcattgtgcttctccaatgcatggtcaaaatccagatatttatgacatagtgaatgttaagggaacccgtaacgtgatagatatgtgcaagaaatgtggcgttaatatacttgtatatacttcctctgctggtgttatttttaatgggcaagatgtgcacaatgcagacgaaacctggccaatcccagaagttcctatggatgcgtacaatgagactaaagctatcgccgaagatatggtcttgaaggcgaatgatccaagcagtgatttctatactgttgctcttcgtccagctggtatttttggcccaggtgataggcaattagtacctggtttaagacaggttgcgaaattggggcagtccaagttccaaattggtgataataacaatttatttgattggacttatgctggaaatgttgctgacgcgcatgtgttagctgcacagaaacttctcgatccaaaaacaagaactgctgtctctggtgaaacttttttcattaccaatgatacccccacctatttttgggccttggcccgtactgtgtggaaggcagatggtcatattgataaacatgttattgttttgaaaaggccagttgcaatttgtgcaggttatctttctgaatgggtatccaagatgttgggtaaagagccaggtttgactccattcagagtcaagattgtgtgtgcataccgttatcacaacattgctaaggccaaaaagttgttgggctacacaccaagagttggtattgaagaaggaattaacaaaacgttggcctggatggacgaaggtttgtga

SEQ ID NO: 4155 - DNA, 747 bp, Saccharomyces cerevisiae
atgtccgactccgactccgactccgattatgaattgacactttctgctaatgccctcgctgcccttgaagaattcaaaagagaggaacaacaacatcaagaagcctttcaaaagctttacgacgaaacggatgaagacttccaaaagaaaaaaaaagaagaagggatgaagcttttcaaggaagattggcagctttcccagttttggtacagcgatgacacagccgcaattttagcagatgccatattggaaggtgcggacgaaaacactgtaattgcaatagttagtgcgccatccgtctatgctgccattcaaaagaaacctactaatgaaattccaaccgaacatatctacttgttcgaatttgataagagattcgagttgttagctggaagagatcatttctttttttatgattacaataaaccactggacttcagtgatgaaattaaaggaaaagttgatagattgttaattgacccaccttttttaaatgaagattgtcaaacaaagtcctctatcactgcaaagtgtttattagcgccaaatgacaactctaaaactaagaaaggagtttttaagcaccgcctcataagttgtactggtgaaagaatgtctgaagtcatatccaaagtttattctgacacaagaataacaacttttcttcctgaacattctaatggtttgagtaacgaatttaggtgctacgcaaattttgaatgtagttcatggaaatttgcttcttga

SEQ ID NO: 4156 - DNA, 747 bp, Artificial Sequence
  Description of Artificial Sequence: Synthetic polynucleotide
atgtccgactccgactccgactccgattatgaattgacactttctgctaatgccctcgctgcccttgaagaattcaaaagagaggaacaacaacatcaagaagcctttcaaaagctttacgacgaaacggatgaagacttccaaaagaaaaaaaaagaagaagggatgaagcttttcaaggaagattggcagctttcccagttttggtacagcgatgacacagccgcaattttagcagatgccatattggaaggtgcggacgaaaacactgtaattgcaatagttagtgcgccatccgtctatgctgccattcaaaagaaacctactaatgaaattccaaccgaacatatctacttgttcgaatttgataagagattcgagttgttagctggaagagatcatttctttttttatgattacaataaaccattggacttcagtgatgaaattaaaggaaaagttgatagattgttaattgacccaccttttttaaatgaagattgtcaaacaaagtcctctatcactgcaaagtgtttattagcgccaaatgacaactctaaaactaagaaaggagtttttaagcaccgcctcataagttgtactggtgaaagaatgtctgaagtcatatccaaagtttattctgacacaagaataacaacttttcttcctgaacattctaatggtttgagtaacgaatttaggtgctacgcaaattttgaatgtagttcttggaaatttgcttcttga

SEQ ID NO: 4157 - DNA, 1431 bp, Saccharomyces cerevisiae
atgtcatcatcagacatctttgatgtactaaacattaagcaaaaatccagaagtccaactaatggccaggtatcagtgccttcgtcctcggcagccaaccggcccaagcctcaagtgacgggcatgcaaagagaactatttaacctgctaggagagaaccaaccccccgttgttattaagtctggaaataactttaaagaaaaaatgctttcgacgtccaagccatctccttggtcatttgtagagttcaaagctaataactctgtgactctgcgtcattgggtcaagggttccaaagaattaataggagacacaccaaaagaatcgccatattctaagttcaatcagcatttatctattccatcattcaccaaggaggagtacgaggcttttatgaatgaaaacgaaggaactcaaaaaagcgtagaaagtgaaaaaaaccataacgaaaactttactaatgaaaagaaggatgaaagtaaaaatagctggtcttttgaagaaatagaatacctgttcaatctctgcaaaaaatacgatttacgttggttcctgatctttgacagatacagttataataattcaagaacacttgaagatctcaaagaaaaattttattacacctgtaggaattattttaaagcaagtgatcctagcaatccgcttttatcttctttgaatttttcagctgaaaaggagatagagagaaaaaagtatttacagcgtcttctttctcgttctgcagcagaaattgctgaagaagaggcactcgtagtagagtccaaaaaatttgaaatggctgccaagagaacacttgcagaaagagaatcattactccgactgttggactcgccacattcagatcagacaattacacaataccttacctctcagggaatgtctcagttatataacgcgcttctagcagataaaactagaaagcggaagcacgatttgaacatccctgaaaatccttggatgaagcagcaacagcagtttgcccaacataggcaacttcaacaactgaatgtaaaaaagtcagaagtcaaggaaaatctctcccccaagaaaaccaaaagacaaagacaggaaatgcaaacggcgctcaaaagaaagtcagaaagcgcatatgcagaacaattgctgaaagatttcaattcagatgaaaggaaggctttaggtgtgattacgcatggtgagaagctatcgccgggtgtatacttaagatctacaaaattatcgaccttcaaacctgcgctgcagaacaaaattctcgccattcttcaagaattatcgttaccttctcgccctgtgatgccctcatttgatgtaatggaaagacaagaggagcttttgaaaaaaatcaatacgcttatcgatttaaaaaaacacgttgacaaatacgaagctggtatgtcaatcaccaagtga

SEQ ID NO: 4158 - DNA, 1431 bp, Artificial Sequence
  Description of Artificial Sequence: Synthetic polynucleotide
atgtcttcttctgacatctttgatgtattgaacattaagcaaaaatccagaagtccaactaatggccaggtatctgtgccttcttcctctgcagccaacaggcccaagcctcaagtgacgggcatgcaaagagaattatttaacttattaggagagaaccaaccccccgttgttattaagtctggaaataactttaaagaaaaaatgctttctacgtccaagccatctccttggtcttttgtagagttcaaagctaataactctgtgactttacgtcattgggtcaagggttccaaagaattaataggagacacaccaaaagaatctccatattctaagttcaatcagcatttatctattccatctttcaccaaggaggagtacgaggcttttatgaatgaaaacgaaggaactcaaaaaagcgtagaaagtgaaaaaaaccataacgaaaactttactaatgaaaagaaggatgaaagtaaaaatagctggtcttttgaagaaatagaataccttttcaatctctgcaaaaaatacgatttacgttggttcttgatctttgacagatacagttataataattctagaacacttgaagatctcaaagaaaaattttattacacctgtaggaattattttaaagcaagtgatcctagcaatccgcttttatcttctttgaatttttctgctgaaaaggagatagagagaaaaaagtatttacagcgtcttctttctcgttctgcagcagaaattgctgaagaagaggcactcgtagtagagtccaaaaaatttgaaatggctgccaagagaacacttgcagaaagagaatctttactcagattattggactctccacattctgatcagacaattacacaataccttacctctcagggaatgtctcagttatataacgcgcttttagcagataaaactagaaagagaaagcacgatttgaacatccctgaaaatccttggatgaagcagcaacagcagtttgcccaacataggcaacttcaacaattgaatgtaaaaaagtctgaagtcaaggaaaatctctcccccaagaaaaccaaaagacaaagacaggaaatgcaaacggcgctcaaaagaaagtctgaaagcgcatatgcagaacaattgttgaaagatttcaattctgatgaaaggaaggctttaggtgtgattacgcatggtgagaagctttctccgggtgtatacttaagatctacaaaattatctaccttcaaacctgcgttgcagaacaaaattctcgccattcttcaagaattatctttaccttctcgccctgtgatgcccagttttgatgtaatggaaagacaagaggagcttttgaaaaaaatcaatacgcttatcgatttaaaaaaacacgttgacaaatacgaagctggtatgtccatcaccaagtga

SEQ ID NO: 4159 - DNA, 2235 bp, Saccharomyces cerevisiae
atgataactaataagaaaataaagataagtgtcccagaaaaactcggtttgtcagaagaatcttttgaggaatcctgggaaacagttaaatatgccattgatcatatatacagcgatgacatggccgacctttccttcgaacaagtgtacaagaccatttatactatcgttttaaataaaaaggggccaatactttataacagattgaaagattatttaatccaaaaattagcgcttttgagggaaacgatagtcaaggacaatactcatgattatgagtttcttggaactatggcacggttatgggaggtgcaatgccattgttttaaaataacgggagacttaatgatgtatatggacaaagtttattgcaaaccaaatagatgcatggaggtatacgacatgtgcctcgatcttttccgaatcgaaatattgcaaaaatgctcatcttctctcatctcagcactgatatctgatatagaaaggattcgtaatttaggatctgtcgactccgaacatactagtttgtggaaagtactaataggaatgatggagacattacatgacaatagagatagttttttcttaaccgattttgagccggttttgattagcgcgacagaagaatactacaataaagctattgatattgaattattaacgccaattgagagcctggaaaagattaggaagttaaggcagtttgaaagtatgctagactcctcttttctaaatgtggattctcataataagttgaagactgtattagaaaatgtccttatatggggaaagttgagtgatattattgaagatctaacgcacgaagcaatggtaatttcaaatggaaagctactccaagaaatttatgacttgtcaagcgaggaaaaatatcgcgttactgtcattgaatctattaaatcttacatcaataaaaatgccataaatattccttttaatgaaggtaaccgcaaaaaagggcagaatgcgattacttggtcttcggaaattgtagagctatatcgcagtcaacactcgtttttggaaagtattgattttggttctgttcgtcttaataatttgaccggggatgtatctaatgcaatacttggcgatgttttctcaatgtatttctctaaagaaggagcattaccatctgagtatctttctacctacgtggaccattgtatgaaacgaaccaaggaaaaagatgctgaaatagtgaagatcaagcaagatttgcttgatagtaccaaattaatcggactcctaactgagaaggatatatttgaaaagatttacaaaaaacaactctccagaagattactgcagcagaggtctttagtggaaattgaaaaatggatggtgcaaatgataaagaaggttctaggaactttttttacctcaaaattggagataatgctgcgagatatatctttatcctctgaaatgtatcaagcattccaacactcaacaatcaacagcatagaatatttgagttttgcaccacaagttttgacgagaacgagctggccctttcagagtactaatccaattgatgaaggtatttcactacctcctagaatgtcacaaattttagctggctttgagggctattacagcttaaaatacaaagaaagagtgctaaagtgggctcatcatctaagtgtaattgaaattggctgccaatttaatagcggttactacgaaataagtttttctgtttacgctggagtgattttccttctatttgaagattatgaagaattaacgttgggggaaatatatgaactaactcatattcccatagatgacgttaagtctcttgtaatgtcaatgtcgacaatacccagatgtaagattttgaaaaaatcatccagttcaggaaatatgaaattttcagttaattatttcttttcttctccaaacaggaaagtgaaagtgccggttattgcatgccctctaccatctcagaaatcagataatttggcaaccgcaagttccgtggacacttatgataatgaaattgttatggagcttagtgctattattgttcgtatcatgaaaacagaaggtaagctaagccatcagcaattacttgaaagaactacgaaacggacacagtctcggctcagtcttacaccgagcattttgaaacgaagcattcagcttttaatagagaaagaatacatccagagaaacgcagatgacccctcttattaccattacctttcctaa

SEQ ID NO: 4160 - DNA, 2235 bp, Artificial Sequence
  Description of Artificial Sequence: Synthetic polynucleotide
atgataactaataagaaaataaagataagtgtcccagaaaaactcggtttgagtgaagaatcttttgaggaatcctgggaaacagttaaatatgccattgatcatatatacagcgatgacatggccgacctttccttcgaacaagtgtacaagaccatttatactatcgttttaaataaaaaggggccaatactttataacagattgaaagattatttaatccaaaaattagcgcttttgagggaaacgatagtcaaggacaatactcatgattatgagtttcttggaactatggcaagattatgggaggtgcaatgccattgttttaaaataacgggagacttaatgatgtatatggacaaagtttattgcaaaccaaatagatgcatggaggtatacgacatgtgcctcgatcttttcagaatcgaaatattgcaaaaatgctcttcttctctcatctctgcattaatatctgatatagaaaggattcgtaatttaggatctgtcgactccgaacatactagtttgtggaaagtattaataggaatgatggagacattacatgacaatagagatagttttttcttaaccgattttgagccggttttgattagcgcgacagaagaatactacaataaagctattgatattgaattattaacgccaattgagagcttggaaaagattaggaagttaaggcagtttgaaagtatgttggactcctcttttttgaatgtggattctcataataagttgaagactgtattagaaaatgtccttatatggggaaagttgagtgatattattgaagatttgacgcacgaagcaatggtaatttctaatggaaagttactccaagaaatttatgacttgagtagcgaggaaaaatatcgcgttactgtcattgaatctattaaatcttacatcaataaaaatgccataaatattccttttaatgaaggtaaccgcaaaaaagggcagaatgcgattacttggtcttctgaaattgtagagttgtatcgcagtcaacacagttttttggaaagtattgattttggttctgttcgtcttaataatttgaccggggatgtatctaatgcaatacttggcgatgttttctccatgtatttctctaaagaaggagcattaccatctgagtatctttctacctacgtggaccattgtatgaaaagaaccaaggaaaaagatgctgaaatagtgaagatcaagcaagatttgcttgatagtaccaaattaatcggactcttaactgagaaggatatatttgaaaagatttacaaaaaacaactctccagaagattattgcagcagaggtctttagtggaaattgaaaaatggatggtgcaaatgataaagaaggttttaggaactttttttacctccaaattggagataatgttaagagatatatctttatcctctgaaatgtatcaagcattccaacactctacaatcaacagcatagaatatttgagttttgcaccacaagttttgacgagaacgagctggccctttcagagtactaatccaattgatgaaggtatttctttgcctcctagaatgtctcaaattttagctggctttgagggctattacagcttaaaatacaaagaaagagtgttgaagtgggctcatcatttgagtgtaattgaaattggctgccaatttaatagcggttactacgaaataagtttttctgtttacgctggagtgattttccttttatttgaagattatgaagaattaacgttgggggaaatatatgaattgactcatattcccatagatgacgttaagtctcttgtaatgtccatgtctacaatacccagatgtaagattttgaaaaaatcttccagtagtggaaatatgaaattttctgttaattatttcttttcttctccaaacaggaaagtgaaagtgccggttattgcatgccctttaccatctcagaaatctgataatttggcaaccgcaagttccgtggacacttatgataatgaaattgttatggagcttagtgctattattgttcgtatcatgaaaacagaaggtaagttgagccatcagcaattacttgaaagaactacgaaaagaacacagtctagactcagtcttacaccgagcattttgaaaagaagcattcagcttttaatagagaaagaatacatccagagaaacgcagatgacccctcttattaccattacctttcctga

SEQ ID NO: 4161 - DNA, 1389 bp, Saccharomyces cerevisiae
atgagcgaaataaataatgaaaatctagagccaacctcaagtacagtagctgagtctacagaaagcaagaataaacacattcgtagcgctttaagaaaacgaagaggtaaattaagcgcccaaacttatgaggaagatcaagaggctattttatcatctcctttattgacttcaacacctaaaacagtctccaggtcattagtgaggttatacccatatttaattgttgtggataactttctaagtatcatcacttggtccaatgacaatgtctctgcaaacttgcttggaatattcttatttacggtttgtgttctatattttggatttattacaaggtattttggacatttaatgatcgttggtataatatgggtatatcttttaattgacaagcacgttcaagaaacaatggcatcttgcccttcattggatgatataatacacgttatggatagggtttctatgaaatctagcgctgtgttatctcctattacgattttgagcgctcaggatgttagaagactgttatttaccattgccttcctatccccagtttatatttttctaacagtgtttgtgctatctccaaactatttaatgttaatagggggtctgtatgtgcttacgtaccattctaaactaatccgaagaatgagaagatacttgtggaaatttcgcgttgttagattacttgtatttttcataacaggattagaccttggtggaccagataataataggcgcttgtttgcttctgtcaataagaaaataaggtcctttgtttggaatgaggtagggaacacatctaacactaaaaagactgtacttttcaaggttgctctgtttgaaaaccagcgccgctggcttggcatcggatggacatcaactatgttgagttatgagcgcgcatcttggacagatgaattcctaaatacttctccaagcccagaagtgtttactttaccagaggagcagtcgggaatggcttgggaatggcacgataaagattggatgcttgacctaacaaatgatgggatcattcaacttcctgcttctgctgctaagacaaaagttaagccaggtgcagatgaaggtttcatatattatgataacacctggaataatccctctgcaacggacacatataaaaagtacacaagaagaaggaggtggatcaggactgcaacagtaacaacaacgtatgacgatgagcccactgtagaaaaagctacaccgaattctcatgctctgaagagtgaagaaaataatagagttagaaaaagaaaagtgtcatttagtacagcaaatgaagtgcatatcataccttcctcggacagtagcaaattaatacaaatatctgatgtttcaatgtctccttctctataa

SEQ ID NO: 4162 - DNA, 1389 bp, Artificial Sequence
  Description of Artificial Sequence: Synthetic polynucleotide
atgagcgaaataaataatgaaaatttggagccaacctctagtacagtagctgagtctacagaaagcaagaataaacacattcgtagcgctttaagaaaaagaagaggtaaattaagcgcccaaacttatgaggaagatcaagaggctattttatcttctcctttattgacttctacacctaaaacagtctccaggtctttagtgaggttatacccatatttaattgttgtggataactttttgagtatcatcacttggtccaatgacaatgtctctgcaaacttgcttggaatattcttatttacggtttgtgttttatattttggatttattacaaggtattttggacatttaatgatcgttggtataatatgggtatatcttttaattgacaagcacgttcaagaaacaatggcatcttgcccttctttggatgatataatacacgttatggatagggtttctatgaaatctagcgctgtgttatctcctattacgattttgagcgctcaggatgttagaagattattatttaccattgccttcttatccccagtttatatttttttaacagtgtttgtgttatctccaaactatttaatgttaatagggggtttatatgtgcttacgtaccattctaaattaatcagaagaatgagaagatacttgtggaaatttcgcgttgttagattacttgtatttttcataacaggattagaccttggtggaccagataataataggcgcttgtttgcttctgtcaataagaaaataaggtcctttgtttggaatgaggtagggaacacatctaacactaaaaagactgtacttttcaaggttgctttgtttgaaaaccagcgccgctggcttggcatcggatggacatctactatgttgagttatgagcgcgcatcttggacagatgaattcttgaatacttctccaagcccagaagtgtttactttaccagaggagcagtccggaatggcttgggaatggcacgataaagattggatgcttgacttgacaaatgatgggatcattcaacttcctgcttctgctgctaagacaaaagttaagccaggtgcagatgaaggtttcatatattatgataacacctggaataatccctctgcaacggacacatataaaaagtacacaagaagaaggaggtggatcaggactgcaacagtaacaacaacgtatgacgatgagcccactgtagaaaaagctacaccgaattctcatgctttgaagagtgaagaaaataatagagttagaaaaagaaaagtgtcctttagtacagcaaatgaagtgcatatcataccttccagtgacagtagcaaattaatacaaatatctgatgtttctatgtctccttctttgtga

SEQ ID NO: 4163 - DNA, 1203 bp, Saccharomyces cerevisiae
atgagcagtggttcagcaggggcaccagcactttctaataattccacgaactctgtcgcgaaggagaaatcaggtaacatttccggtgatgagtatctttcgcaagaggaggaagtttttgacggtaatgatattgagaataatgaaaccaaagtttatgaagaatccttagatttggacttggaacgtagtaatagacaagtctggttagttagattgcccatgtttctagcagagaaatggagggacagaaacaacttgcatggccaagaactgggtaaaattaggataaacaaggatgggagtaaaatcacacttctattgaatgaaaatgataacgattctataccgcacgaatatgatttagaacttacaaagaaagtagtagaaaatgaatatgttttcacagaacaaaatttaaagaaatatcaacaacgtaaaaaggagttggaagcagatcctgaaaagcaaaggcaagcttacctgaagaagcaagaacgtgaagaggaacttaagaagaagcagcagcagcaaaaacgtagaaataatagaaaaaagtttaatcacagagttatgacagatagggatggtagagatagatatataccatatgtgaagacgattcccaaaaaaaccgccattgtgggtacagtttgccacgaatgtcaggttatgccatcaatgaatgatcctaattatcacaagattgttgaacagagaagaaatattgtcaagcttaataataaggaaaggatcacaactttggatgaaaccgttggtgttacgatgagccacacaggtatgtccatgaggtcagacaactcgaatttcttgaaagtggggcgtgagaaggccaagagcaatattaaatctattcgtatgccaaagaaggaaatcttggattacttgttcaagttatttgatgagtatgactactggtccttgaaggggttgaaggaacgtactaggcaacctgaagcacatttaaaggagtgtttggataaagttgccactctagtgaagaagggcccatatgcattcaaatacactttaaggccagagtataaaaagttgaaagaggaggagagaaaggcaaccttaggtgaactagctgatgagcaaacaggttccgctggagacaatgcgcaaggagacgcggaggctgacttggaagatgaaatagaaatggaagatgtcgtttag

SEQ ID NO: 4164 - DNA, 1203 bp, Artificial Sequence
  Description of Artificial Sequence: Synthetic polynucleotide
atgagcagtggttctgcaggggcaccagcactttctaataattccacgaactctgtcgcgaaggagaaatctggtaacatttccggtgatgagtatctttctcaagaggaggaagtttttgacggtaatgatattgagaataatgaaaccaaagtttatgaagaatccttagatttggacttggaacgtagtaatagacaagtctggttagttagattgcccatgtttttggcagagaaatggagggacagaaacaacttgcatggccaagaattgggtaaaattaggataaacaaggatgggagtaaaatcacacttttattgaatgaaaatgataacgattctataccgcacgaatatgatttagaacttacaaagaaagtagtagaaaatgaatatgttttcacagaacaaaatttaaagaaatatcaacaacgtaaaaaggagttggaagcagatcctgaaaagcaaaggcaagcttacttgaagaagcaagaacgtgaagaggaacttaagaagaagcagcagcagcaaaaacgtagaaataatagaaaaaagtttaatcacagagttatgacagatagggatggtagagatagatatataccatatgtgaagacgattcccaaaaaaaccgccattgtgggtacagtttgccacgaatgtcaggttatgccaagcatgaatgatcctaattatcacaagattgttgaacagagaagaaatattgtcaagcttaataataaggaaaggatcacaactttggatgaaaccgttggtgttacgatgagccacacaggtatgtccatgaggagtgacaacagtaatttcttgaaagtggggcgtgagaaggccaagagcaatattaaatctattcgtatgccaaagaaggaaatcttggattacttgttcaagttatttgatgagtatgactactggtccttgaaggggttgaaggaacgtactaggcaacctgaagcacatttaaaggagtgtttggataaagttgccactttggtgaagaagggcccatatgcattcaaatacactttaaggccagagtataaaaagttgaaagaggaggagagaaaggcaaccttaggtgaattggctgatgagcaaacaggttccgctggagacaatgcgcaaggagacgcggaggctgacttggaagatgaaatagaaatggaagatgtcgtttga

SEQ ID NO: 4165 - DNA, 756 bp, Saccharomyces cerevisiae
atggacctagatctagccagtatcttaaaaggtgaaatttctaagaagaagaaagagctggccaactctaaaggtgttcagccaccatgcactgagaaattccagccacatgaatccgcaaacatagacgaaacaccgcgacaggtagaacaagaaagtacagatgaagaaaacctgtcagacaatcagagtgacgatattaggaccaccattagcaaattagaaaatcggccagaaaggatacaagaagcgatagctcaagacaaaaccatctctgtaatcattgatccatcacaaattggttctactgaaggaaaacctcttttgtcaatgaaatgtaatttatatattcacgaaatattatctcgttggaaggcgtctttggaagcttatcatccggagctgttcttagacactaaaaaagcactctttccactcctactgcaactacgaaggaaccagcttgccccggatttacttatttcccttgcgaccgttctctatcatttacaacaacctaaagaaataaatttagccgttcagtcctatatgaaactcagtatcggcaatgtggcctggcctattggtgttactagcgtaggcattcatgctcgtagtgcacattcgaaaattcaaggaggccggaatgctgctaacataatgattgatgaaagaacgcgattatggattaccagtattaaaagattaataacttttgaagaatggtataccagcaaccacgatagcttagcctaa

SEQ ID NO: 4166 - DNA, 756 bp, Artificial Sequence
  Description of Artificial Sequence: Synthetic polynucleotide
atggacttggatttggccagtatcttaaaaggtgaaatttctaagaagaagaaagagttggccaactctaaaggtgttcagccaccatgcactgagaaattccagccacatgaatccgcaaacatagacgaaacaccgagacaggtagaacaagaaagtacagatgaagaaaacttaagtgacaatcagagtgacgatattaggaccaccattagcaaattagaaaatagaccagaaaggatacaagaagcgatagctcaagacaaaaccatctctgtaatcattgatccatctcaaattggttctactgaaggaaaacctcttttgtccatgaaatgtaatttatatattcacgaaatattatctcgttggaaggcgtctttggaagcttatcatccggagcttttcttagacactaaaaaagcactctttccactcttattacaattaagaaggaaccagcttgccccggatttacttatttcccttgcgaccgttctctatcatttacaacaacctaaagaaataaatttagccgttcagtcctatatgaaactcagtatcggcaatgtggcctggcctattggtgttactagcgtaggcattcatgctcgtagtgcacattctaaaattcaaggaggcagaaatgctgctaacataatgattgatgaaagaacgagattatggattaccagtattaaaagattaataacttttgaagaatggtataccagcaaccacgatagcttagcctga

SEQ ID NO: 4167 - DNA, 972 bp, Saccharomyces cerevisiae
atgacggtaaacttagatccggataaagtttggatagacggctgctttgatttcacacatcatgggcatgcgggagccattttgcaggctcgtcgaacagtttcaaaagaaaatggtaaactattctgtggtgtgcataccgatgaagatattcagcataacaaaggaacaccagtaatgaactcttcagaaagatatgagcatactagatcaaataggtggtgttcggaagtggttgaagcggcgccatatgttacagatcccaattggatggataaatatcagtgccaatatgttgttcatggtgatgatatcaccatagatgctaatggagaagactgctataagttggtgaaagagatggggcgcttcaaggtagttaaaagaacatatggcgtaagtactaccgagattatacatagaatattgacgaaaaaatctttgccaccgactcatcctgattattatcccaccacccaggaattgagtttctattctgtcgcccaagatgccgtttcaaaacattgttatgtctttcagagggatttggacaatgtcttggtcaatggtggatacaaattcgatgcagaagattgtgtttatgttgacggggattttgacttattccatatgggggatattgatcagttaagaaagctgaaaatggatcttcaccccgataagaaattgattgttggtattaccacaagcgattactcgagtaccattatgacgatgaaggaacgcgtcttgagcgttttaagttgtaaatatgttgatgccgttattatcgatgctgacgccacctcaatgtctcagtataactgcgagaagtatcatattggcacggctgtcctcactgctgccggaaaattcagtgaatacttgactaaagagcttattgtgaagagggtggaatcgcaaagggaggtttacattgcgaggaaccaaaaaaagggaatgtccatataa

SEQ ID NO: 4168 - DNA, 972 bp, Artificial Sequence
  Description of Artificial Sequence: Synthetic polynucleotide
atgacggtaaacttagatccggataaagtttggatagacggctgctttgatttcacacatcatgggcatgcgggagccattttgcaggctcgtagaacagtttccaaagaaaatggtaaattattctgtggtgtgcataccgatgaagatattcagcataacaaaggaacaccagtaatgaactcttctgaaagatatgagcatactagatctaataggtggtgttctgaagtggttgaagcggcgccatatgttacagatcccaattggatggataaatatcagtgccaatatgttgttcatggtgatgatatcaccatagatgctaatggagaagactgctataagttggtgaaagagatggggcgcttcaaggtagttaaaagaacatatggcgtaagtactaccgagattatacatagaatattgacgaaaaaatctttgccaccgactcatcctgattattatcccaccacccaggaattgagtttctattctgtcgcccaagatgccgtttccaaacattgttatgtctttcagagggatttggacaatgtcttggtcaatggtggatacaaattcgatgcagaagattgtgtttatgttgacggggattttgacttattccatatgggggatattgatcagttaagaaagttgaaaatggatcttcaccccgataagaaattgattgttggtattaccacaagcgattactctagtaccattatgacgatgaaggaacgcgtcttgagcgttttaagttgtaaatatgttgatgccgttattatcgatgctgacgccacctccatgtctcagtataactgcgagaagtatcatattggcacggctgtcctcactgctgccggaaaattcagtgaatacttgactaaagagcttattgtgaagagggtggaatctcaaagggaggtttacattgcgaggaaccaaaaaaagggaatgtccatatga

SEQ ID NO: 4169 - DNA, 255 bp, Saccharomyces cerevisiae
atgacgagaacaaacaagtggaccgaacgtgaaggaaaggctgatccaaagtacttttcgcacactggtaactacggtgaatctccaaatcacatcaagaagcaaggttccggcaagggtaattggggtaagccaggcgatgagattgatgacttaattgataatggtgaaatacccccagtgttcaagaaagatagaagaggctcaaatttgcaatcgcatgaacaaaagtttgaaaacgtccaaaaggaatga

SEQ ID NO: 4170 - DNA, 255 bp, Artificial Sequence
  Description of Artificial Sequence: Synthetic polynucleotide
atgacgagaacaaacaagtggaccgaacgtgaaggaaaggctgatccaaagtacttttctcacactggtaactacggtgaatctccaaatcacatcaagaagcaaggttccggcaagggtaattggggtaagccaggcgatgagattgatgacttaattgataatggtgaaatacccccagtgttcaagaaagatagaagaggcagtaatttgcaatctcatgaacaaaagtttgaaaacgtccaaaaggaatga

SEQ ID NO: 4171 - DNA, 1956 bp, Saccharomyces cerevisiae
atgggattaaagaaattttttaagattaagcctccagaggaagcgacaccagaacagaacaaggatactttgatggaactgggtattagtgtcaaaaaccctagcaagaaaagaaaagagaaatttgccgcctacggtaaatttgcaaatgataaagctgaagataaggtatacgcgccaccaggttatgagcagtatgctaggccacaggatgaacttgaggatttgaatgcttctcccttagatgccaatgctaacgaggcaactgctggttctaatagaggttcaagtggcacgcaagatctcggaaatggagcagaatccaattctatgcaagatccgtacgctatcgaaaatgatgattaccgatatgatgacgatccttatgcaaggtttcaagctaataaaagtaatgggagaggtagcgtcaatgctgcgccttatggtgattatggaggggggtacaatggcacatctctgaattcatataataacgatggcccgtatagtaaccaaaatacttcaaacagctgggtgaatgcgaatggccgtaatagtttaaatcattcaaacagcactttaaacgtagggccttcgaggcaaacaaggcaaccgccggtttcaacgtcgaccaacagcttatcgcttgaccaaagaagtcccttagcaaacccgatgcaagaaaagagaaatccttacgctgatatgaatagttatggcggggcgtatgactccaatactaatagatctagcggtactcgacaaggaagctccaagaatgcaaatccatacgcctctatggcgaacgactcatatagtaatggaaatttgaacaggtctgcaaatccatattctagtagaagtgtgcgtcaaccgcaatcgcaacaagctccaatgacttatacgccctcttttattgcttctgatgaagcagcacgcaatagtgaagttgatttaaatgaagaacctagaacaggtgaatttgattttgaagaagtttatgctgacaagtctgcagaaaatagagcggcattagatgagcctgatttgaatgcagtaatgacgaatgaagattcaatagatttaaatgcgtccgaagttgatcatagttcaagacagcagcagcagcaacagtggttcatggatgagcagcaacagcaacagcaacactttaacgcaacaaataaccaatatggagatcaaaggggttacaaaacatttgaagaaatacaaaaagaagaggaggctcgccagcagcaggaagaagatgaagcagtagatgaaatcaagcaggagatcaaatttacgaaacagagttccgtagcctctactagaaatacactaaaaatggctcaagacgccgaaagagcaggtatgaacacattgggtatgctgggtcatcaaagtgaacaattgaataacgtagaaggaaacttagatttaatgaaggtgcaaaataaagttgcagatgaaaaagttgcagaactaaaaaaattgaaccgtagtatattggctgtccatgtttctaatccgtttaattccaagagaaggagaagggagagggaagagcagctgaagaataggaaaattgaagaaaaattaatgagagagcaaacaagtcaacaattgtctcagtccactcaaagaatagagggtgctatgaacgcaaataataacataagtgaggtgcgggaaagatatcagaggaagaatgttctagaaaaggcaaagagatatcagtttgagaatgatgaagaagatgacgaaatggaattggaaattgataggaatttggaccagattcagcaggttagcaacagattgaagaaaatggccttgaccactggtaaagaattagactctcagcaaaaacgtctcaacaacattgaggaaagcactgatgatctagatatcaatctccatatgaataccaacaggttggcaggtatcagatag

SEQ ID NO: 4172 - DNA, 1956 bp, Artificial Sequence
  Description of Artificial Sequence: Synthetic polynucleotide
atgggattaaagaaattttttaagattaagcctccagaggaagcgacaccagaacagaacaaggatactttgatggaattgggtattagtgtcaaaaaccctagcaagaaaagaaaagagaaatttgccgcctacggtaaatttgcaaatgataaagctgaagataaggtatacgcgccaccaggttatgagcagtatgctaggccacaggatgaacttgaggatttgaatgcttctcccttagatgccaatgctaacgaggcaactgctggttctaatagaggtagtagtggcacgcaagatctcggaaatggagcagaatccaattctatgcaagatccgtacgctatcgaaaatgatgattacagatatgatgacgatccttatgcaaggtttcaagctaataaaagtaatgggagaggtagcgtcaatgctgcgccttatggtgattatggaggggggtacaatggcacatctttgaattcttataataacgatggcccgtatagtaaccaaaatacttctaacagctgggtgaatgcgaatggccgtaatagtttaaatcattccaacagcactttaaacgtagggccttctaggcaaacaaggcaaccgccggtttccacgtccaccaacagcttatctcttgaccaaagaagtcccttagcaaacccgatgcaagaaaagagaaatccttacgctgatatgaatagttatggcggggcgtatgactccaatactaatagatctagcggtactaggcaaggaagctccaagaatgcaaatccatacgcctctatggcgaacgactcttatagtaatggaaatttgaacaggtctgcaaatccatattctagtagaagtgtgcgtcaaccgcaatctcaacaagctccaatgacttatacgccctcttttattgcttctgatgaagcagcacgcaatagtgaagttgatttaaatgaagaacctagaacaggtgaatttgattttgaagaagtttatgctgacaagtctgcagaaaatagagcggcattagatgagcctgatttgaatgcagtaatgacgaatgaagattctatagatttaaatgcgtccgaagttgatcatagtagtagacagcagcagcagcaacagtggttcatggatgagcagcaacagcaacagcaacactttaacgcaacaaataaccaatatggagatcaaaggggttacaaaacatttgaagaaatacaaaaagaagaggaggctcgccagcagcaggaagaagatgaagcagtagatgaaatcaagcaggagatcaaatttacgaaacagagttccgtagcctctactagaaatacattaaaaatggctcaagacgccgaaagagcaggtatgaacacattgggtatgttgggtcatcaaagtgaacaattgaataacgtagaaggaaacttagatttaatgaaggtgcaaaataaagttgcagatgaaaaagttgcagaattgaaaaaattgaaccgtagtatattggctgtccatgtttctaatccgtttaattccaagagaaggagaagggagagggaagagcagttgaagaataggaaaattgaagaaaaattaatgagagagcaaacaagtcaacaattgtctcagtccactcaaagaatagagggtgctatgaacgcaaataataacataagtgaggtgagagaaagatatcagaggaagaatgttttggaaaaggcaaagagatatcagtttgagaatgatgaagaagatgacgaaatggaattggaaattgataggaatttggaccagattcagcaggttagcaacagattgaagaaaatggccttgaccactggtaaagaattagactctcagcaaaaacgtctcaacaacattgaggaaagcactgatgatttggatatcaatctccatatgaataccaacaggttggcaggtatcagatga

SEQ ID NO: 4173 - DNA, 1188 bp, Saccharomyces cerevisiae
atggatcccaccaaagcacccgattttaaaccgccacagccaaatgaagaactacaaccaccgccagatccaacacatacgataccaaaatctggacccatagttccatatgttttagctgattataattcttcgatcgatgctcctttcaatctcgacatttacaaaaccctgtcgtcaaggaaaaaaaacgccaactcaagcaaccgaatggaccatattccattaaatactagtgacttccagccactatctcgggatgtatcatcggaggaggaaagtgaagggcaatcgaatggaattgacgctactctacaggatgttacgatgactgggaatttgggggtactgaagagccaaattgctgatttggaagaagttcctcacacaattgtaagacaagccagaactattgaagattacgaatttcctgtacacagattgacgaaaaagttacaagatcctgaaaaactgcctctgatcatcgttgcttgtggatcattttctcccataacatacctacatttgagaatgtttgaaatggctttagatgatatcaatgagcaaacgcgttttgaagtggttggtggttatttttctccagtaagtgataactatcaaaagcgagggttagccccagcttatcatcgtgtccgcatgtgcgaattagcatgcgagcggacatcatcttggttaatggttgatgcctgggaatctttacaatcaagttatacaaggacagcaaaagtcttggaccatttcaatcatgaaataaatatcaagagaggtggaatcatgactgtagatggtgaaaaaatgggcgtaaaaatcatgttattggcaggcggtgatcttatcgaatccatgggcgagcctcatgtgtgggctgattcagacctgcaccatattttgggtaattatggatgtttgatcgtggaaaggactggttctgatgttaggtccttcttgctttcccatgatatcatgtatgaacacagaagaaatatccttattatcaaacaacttatttacaatgatatttcctctacgaaagtgcggcttttcatcagacgtggaatgtcagttcaatatcttcttccaaactctgtcatccgttacatccaagagtataatctatacattaatcaaagtgaaccggtcaagcaggtcttggatagcaaagagtga

SEQ ID NO: 4174 - DNA, 1188 bp, Artificial Sequence
  Description of Artificial Sequence: Synthetic polynucleotide
atggatcccaccaaagcacccgattttaaaccgccacagccaaatgaagaattacaaccaccgccagatccaacacatacgataccaaaatctggacccatagttccatatgttttagctgattataattcttctatcgatgctcctttcaatctcgacatttacaaaaccttatcttccaggaaaaaaaacgccaactccagcaacagaatggaccatattccattaaatactagtgacttccagccattatctagagatgtatcttctgaggaggaaagtgaagggcaaagcaatggaattgacgctactttacaggatgttacgatgactgggaatttgggggtattgaagagccaaattgctgatttggaagaagttcctcacacaattgtaagacaagccagaactattgaagattacgaatttcctgtacacagattgacgaaaaagttacaagatcctgaaaaattacctttgatcatcgttgcttgtggaagtttttctcccataacatacttgcatttgagaatgtttgaaatggctttagatgatatcaatgagcaaacgcgttttgaagtggttggtggttatttttctccagtaagtgataactatcaaaagagagggttagccccagcttatcatcgtgtccgcatgtgcgaattagcatgcgagagaacatcttcttggttaatggttgatgcctgggaatctttacaaagtagttatacaaggacagcaaaagtcttggaccatttcaatcatgaaataaatatcaagagaggtggaatcatgactgtagatggtgaaaaaatgggcgtaaaaatcatgttattggcaggcggtgatcttatcgaatccatgggcgagcctcatgtgtgggctgattctgacttgcaccatattttgggtaattatggatgtttgatcgtggaaaggactggttctgatgttaggtccttcttgctttcccatgatatcatgtatgaacacagaagaaatatccttattatcaaacaacttatttacaatgatatttcctctacgaaagtgaggcttttcatcagacgtggaatgtctgttcaatatcttcttccaaactctgtcatccgttacatccaagagtataatctttacattaatcaaagtgaaccggtcaagcaggtcttggatagcaaagagtga

SEQ ID NO: 4175 - DNA, 1182 bp, Saccharomyces cerevisiae
atgtcctgttctcaaaataagacttctgtcagtctggcctggcgtgaatgcatatccatcgcttccgtcctaattggcgcgtatgcatcatacaaatactataagctgttcaaaacacgcgatattccacgtccaaaagaaggcgttgaagaactcataggaaacactcctctggttaagatcagatctcttaccaaggctactggagttaacatttacgctaagttggagttatgcaacccagcaggaagtgctaaggatagagtggctttaaacatcataaagacggctgaggaattaggcgagctcgtcagaggtgaacctggctgggtatttgaaggaacaagtgggtcgactggtatctctatagcagtggtctgtaatgcgttgggttatagggcacacatttctttgcccgatgacacatcgctagaaaaattggcattactagaaagcctcggtgctactgttaataaggttaagcccgctagtattgtcgatccaaaccaatacgtaaatgccgccaaaaaggcatgtaatgaactaaagaagagtggtaatggaataagagcagtttttgccgatcagttcgaaaacgaagccaactggaaagtacattaccagaccacaggcccagaaattgcccatcaaactaagggaaatattgacgcattcattgctggctgcggtactggtggcaccataactggtgtggcaaaattcttaaaggaaagagcaaagataccttgccatgtcgttctagcggatccacaaggatctggcttttataatagagtcaactatggcgtgatgtatgactatgtagagaaggaaggtactagaagaaggcatcaagttgacactatcgtagaagggattgggttaaacagaatcactcataattttcatatgggcgaaaagtttattgatgaatcaatacgagtcaacgataatcaagccattagaatggcaaaatacctatcggtaaacgacgggctattcgtggggagtagtacagctattaatgcggtagccgctattcaggttgcaaaaacgcttcctcacggctcaaacattgtgattattgcatgcgacagcggttcaagacacctaagtaaattctggaaagaagctaaagaaatcgatcacgacgtgtcattagaagaagtaataaatatctaa

SEQ ID NO: 4176 - DNA, 1182 bp, Artificial Sequence
  Description of Artificial Sequence: Synthetic polynucleotide
atgtcctgttctcaaaataagacttctgtcagtttggcctggcgtgaatgcatatccatcgcttccgtcttgattggcgcgtatgcaagctacaaatactataagcttttcaaaacacgcgatattccacgtccaaaagaaggcgttgaagaactcataggaaacactcctttggttaagatcagatctcttaccaaggctactggagttaacatttacgctaagttggagttatgcaacccagcaggaagtgctaaggatagagtggctttaaacatcataaagacggctgaggaattaggcgagctcgtcagaggtgaacctggctgggtatttgaaggaacaagtgggtccactggtatctctatagcagtggtctgtaatgcgttgggttatagggcacacatttctttgcccgatgacacatctttggaaaaattggcattattggaaagcctcggtgctactgttaataaggttaagcccgctagtattgtcgatccaaaccaatacgtaaatgccgccaaaaaggcatgtaatgaattgaagaagagtggtaatggaataagagcagtttttgccgatcagttcgaaaacgaagccaactggaaagtacattaccagaccacaggcccagaaattgcccatcaaactaagggaaatattgacgcattcattgctggctgcggtactggtggcaccataactggtgtggcaaaattcttaaaggaaagagcaaagataccttgccatgtcgttttggcggatccacaaggatctggcttttataatagagtcaactatggcgtgatgtatgactatgtagagaaggaaggtactagaagaaggcatcaagttgacactatcgtagaagggattgggttaaacagaatcactcataattttcatatgggcgaaaagtttattgatgaaagtataagagtcaacgataatcaagccattagaatggcaaaatacttaagtgtaaacgacgggcttttcgtggggagtagtacagctattaatgcggtagccgctattcaggttgcaaaaacgcttcctcacggctctaacattgtgattattgcatgcgacagcggttccagacacttaagtaaattctggaaagaagctaaagaaatcgatcacgacgtgtctttagaagaagtaataaatatctga

SEQ ID NO: 4177 - DNA, 1863 bp, Saccharomyces cerevisiae
atgagggatattgtatttgtatcaccgcagctgtatttgtcatcacaggagggttggaaaagtgattctgccaaaagtgggttcatccctatcctcaaaaatgatctacaacgttttcaggactcattaaaacatatagttgacgccagaaacagcttatcagagacactgctaaatagcaacgatgatgggagtatacacaattctgaccagaatactggtttgaataaagacaaagaggcttcaatagcagataacaatagtgctaacaagtgcgccacaagctcttcccgttaccaagagctcaaacaatttcttcccatttccttagaccaacagattcatacagtatctttacaaggtgtctcttcatcattttctcgcggacagatagaatcattgctagaccactgtttgaatttagcgttgactgaaactcaaagcaattccgcattgaaagtagaagcttggtcttctttttcttcgtttttagatacccaggacatttttataagattcagtaaggttgatgaagatgaggcatttgttaatacgctgaactactgcaaagccttattcgcgtttattagaaagctacatgaggatttcaagattgagttacacttggatttgaacacaaaagaatatgtcgaagaccgaacaggaactataccgagtgttaagccagaaaaggctagcgaattttattctgttttcaaaaacattgaagatcaaacagacgaaagaaattcaaagaaagaacagttggatgactcttccacacaatacaaagtggatacaaacactttaagtgatttgccatcggatgctttggaccaattgtgcaaggatataatagaatttaggacaaaagttgtcagtatagagaaagaaaaaaaaatgaaaagtacgtacgaggaaagtaggcgtcaaagacaccaaatgcaaaaagtttttgatcaaataaggaaaaaccactcaggagccaaagggagcgccaatacagaggaggaggatactaatatggaagatgaagatgaggaggatgacactgaagacgaccttgccttagagaagagaaaagaagaaagagacctggaagaatcaaatcgtagatatgaggatatgttacaccaattacattccaatacagagcctaagataaaatccattagggctgatatcatgagtgctgaaaactatgaggaacatttggagaaaaatcgctcattatatttgaaggagctattacaccttgccaacgacgttcattacgaccaccatagatctttcaaggagcaagaggaaagaagggacgaagaggatagagctaaaaatggaaatgcaaaggaactggcgcctatacaactatcggatggtaaggccatatctgcagggaaggctgccgccatcacccttcctgaaggcactgtgaagagcgagaactataacgcggacaagaatgtgtctgagagctcagaacacgtcaagatcaaattcgactttaagaaggctattgatcactcagttgaaagctctagcgaagacgagggatacagagagagcgagctacctccaacaaaaccctccgagagaagcgcggcagaggaccgtttgccatttacagcagatgaactgaacataagactaactaatctgaaggaatcgcgctacgtggacgaactggtgcgtgaattcctcggcgtctacgaggacgagctggtggaatacattcttgagaacatccgcgtgaaccagagcaaacaggcccttttaaatgagctaagggagactttcgacgaggacggggaaacgatagctgatagactgtggagtcgtaaagaatttcgcttggggacctga

SEQ ID NO: 4178 - DNA, 1863 bp, Artificial Sequence
  Description of Artificial Sequence: Synthetic polynucleotide
atgagggatattgtatttgtatccccgcagttatatttgagttctcaggagggttggaaaagtgattctgccaaaagtgggttcatccctatcctcaaaaatgatttgcaacgttttcaggactctttaaaacatatagttgacgccagaaacagcttatctgagacattgttgaatagcaacgatgatgggagtatacacaattctgaccagaatactggtttgaataaagacaaagaggcttctatagcagataacaatagtgctaacaagtgcgccacaagctcttcccgttaccaagagctcaaacaatttcttcccatttccttagaccaacagattcatacagtatctttacaaggtgtctcttcttctttttctcgcggacagatagaatctttgttggaccactgtttgaatttagcgttgactgaaactcaaagcaattccgcattgaaagtagaagcttggtcttctttttcttcttttttagatacccaggacatttttataagattcagtaaggttgatgaagatgaggcatttgttaatacgttgaactactgcaaagccttattcgcgtttattagaaagttgcatgaggatttcaagattgagttacacttggatttgaacacaaaagaatatgtcgaagacagaacaggaactataccgagtgttaagccagaaaaggctagcgaattttattctgttttcaaaaacattgaagatcaaacagacgaaagaaattctaagaaagaacagttggatgactcttccacacaatacaaagtggatacaaacactttaagtgatttgccaagtgatgctttggaccaattgtgcaaggatataatagaatttaggacaaaagttgtcagtatagagaaagaaaaaaaaatgaaaagtacgtacgaggaaagtaggcgtcaaagacaccaaatgcaaaaagtttttgatcaaataaggaaaaaccactctggagccaaagggagcgccaatacagaggaggaggatactaatatggaagatgaagatgaggaggatgacactgaagacgaccttgccttagagaagagaaaagaagaaagagacttggaagaaagtaatcgtagatatgaggatatgttacaccaattacattccaatacagagcctaagataaaatccattagggctgatatcatgagtgctgaaaactatgaggaacatttggagaaaaatcgctctttatatttgaaggagttattacaccttgccaacgacgttcattacgaccaccatagatctttcaaggagcaagaggaaagaagggacgaagaggatagagctaaaaatggaaatgcaaaggaattggcgcctatacaattaagtgatggtaaggccatatctgcagggaaggctgccgccatcacccttcctgaaggcactgtgaagagcgagaactataacgcggacaagaatgtgtctgagagctctgaacacgtcaagatcaaattcgactttaagaaggctattgatcactctgttgaaagctctagcgaagacgagggatacagagagagcgagcttcctccaacaaaaccctccgagagaagcgcggcagaggaccgtttgccatttacagcagatgaattgaacataagattaactaatttgaaggaatctcgctacgtggacgaattagtgcgtgaattcctcggcgtctacgaggacgagttggtggaatacattcttgagaacatccgcgtgaaccagagcaaacaggcccttttaaatgagttgagggagactttcgacgaggacggggaaacgatagctgatagattatggagtcgtaaagaatttcgcttggggacctga

SEQ ID NO: 4179 - DNA, 3921 bp, Saccharomyces cerevisiae
atgcagtttccattcgcttgtctcctatcgacccttgtaattagtgggtcattggcccgggccagccccttcgactttatattcggcaatggaacgcaacaagctcagagccaaagcgagagtcaaggtcaagtttctttcaccaatgaagcttctcaggatagttccaccacctctttggtaacagcctattctcaaggtgttcattcgcaccagtctgcaacaatagtgagtgccacaatctcttccctcccatctacttggtatgatgcgagctccacttcccagacttctgtgtcatatgccagtcaagaatccgactatgccgttaatcaaaactcttggagcgcgtctactaatcaactgccatctaccagtacgacaagctactatgcgccaaccttcagtacatcggccgattttgctgcttctagtgtaaatgcagcttctgatgtctccactgccagtgttcccattgatacgagtgctaattctatccctttcacaactacaagtaacatagagactacaacgagtgcacctctcacttcggacactccacttatttccactagtacgatgtccgcagctgataacgtattttcgtcagcaaaccctatttctgcctccctaacaaccaccgatagttcagaaagttttgaccaaacttcgactgctggtgccattccggtgcaaagttcagcagattttagtagttctagtgaaattttagtacaaagttcggcggatttcagtagccctagttctccaactactaccgatatatcgctatcagctgccccactgcaaacaagtgaatcaagcagttttaccactgcatcagcagctctaccagtaagttcaacagacgttgatggctcaagcgcctcacctgtagtgagcatgagcgccgcaggacaaatagctagctcaagcagcacagataatccaactatgtcagaaaccttttcgttaacatctacagaagttgatggttccgatgtttcatcaacagtgagcgcattattatcggctccttttttacaaacaagtacttccaacagtttcagcattgttagcccatcggtatcttttgttccatcacagagttcctcagacgttgctagctccagtactgcaaatgtagttagttcatccttttctgatattccaccgcaaactagtacctcagggagcgtagtttcggtagcgcaatccgcatctgccctcgcatttcaaagttcaacagaggtatatggtgccagtgcctcgagcacaatgagttcattattatcaactacttcgctacagtctactactttggatagctcaagtttagctagctcctctgcgtcgagttcagaccttacagattatggcgtctccagtacagcaagcataccgctgttgtcagcctcagaacaagcaagtacttccagcagttttagcgttgttagcccttcggtatcttttgttccatcacaaagttcctcagatgttgctagcaccagtgctccaagtgtagttagttcatccttttcttatacttcactgcaagcaggtggctctagcatgaccaatccctcttcatcaactatagtatattcaagtagtactggcagttctgaggaatccgctgcatctacagcttctgcaacactgtcgggctcctcgtctacttatatggcaggaaatttgcaatcacagcctccatccacttcaagtttgctttcggagtctcaagctacaagcacttcagctgtgctagctagcagttctgtttctacaacttcaccctataccactgcaggtggtgcatctacagaggcctcatccctcatatcatctacatctgcggaaacttcccaggtaagttattcacaaagcacaactgcattgcaaacttcctcattcgcatcgtcttcaacaacagaaggaagtgaaacatctagtcaaggtttttctaccagctctgttttagttcaaatgccttcttcgatttccagcgaattctcaccctctcagacgacaactcaaatgaattctgcaagctcatcatctcagtacactatatcatccactggtatactttctcaggtttcagacacatcggtgtcttatacaacttcaagttcgtctgtttctcaagtttcagacacaccagtttcttatacaacttcaagttcgtctgtttctcaagtttcagacacaccggtttcttatacaacttcaagttcgtctgtttctcaagtttcagacacaccagtttcttatacaacttcaagttcatctgtttctcaagtttcagacacaccggtttcttatacaacttcaagttcgtccgtttctcaagtttcagacacgtcagtaccttctacaagttccagatcgtccgtttctcaagtctcagacactccggtgccttctacaagttcaaggtcgtccgtttctcaaacatctagctcactacagcccaccactacatcctcccaacgtttcaccatttccactcatggagcgctttctgaaagtagttctgttagccaacaagcttctgagattactagctcaatcaatgcaacagcttccgaataccatagcatccagacaaccgcggctactcaatccacaactctatcttttaccgacgcaaacagcagttctgcttccgctccattggaagtggcaacgtctacgccaaccccatcttcaaaggcatcctctctgttgcttacaccatcaacatcctctttaagtcaggttgctacaaatactaatgtacagacgagtttaacaacggaatcgacgaccgttttagaaccatcaacgactaacagttccagtacgtttagtctggtcacttcaagtgacaacaattggtggattccaactgagttaatcacgcaggcaccagaagctgcatccactgcatcttctaccgttggaggaacacaaactatgactttgccccatgcaattgcagccgcgacacaagttcccgagcctgagggctacaccctaatcacaatagggttcaaaaaagctttgaactacgaatttgttgtatcagaaccaaaatcatcggctcaaatcttcggatacttgcctgaagctctgaacacaccttttaagaacgtattcacaaacattacggtactacaaatagtgccattacaggatgactcactcaactacttagtaagtgttgctgaagtatactttccaactgcagaaatagaggagctgtcaaatctaattaccaactcttcaagcgctttttacacggatggaatgggtacagcaaaatctatggctgcaatggttgattcctcaataccgctaacgggcctcttacacgatagtaacagcaactctggcggatcttcggacggatcctcctccagtaattcgaactcaggatcttcaggttcaggatctaattcgaactccggtgtgtcttcatcttccggaaattcctatcaagatgccggtactttggaatattcatccaaatctaactccaacgtatccacttctagcaaatcaaagaaaaaaatcattggtttagttatcggcgttgttgttggtggatgcttatatattttattcatgatttttgctttcaagtatatcataagaaggcggattcaaagtcaagaaattatcaagaacccagaaatttccagtatcagttcaagtgaatttggtggagagaaaaattacaataatgaaaagagaatgagcgttcaagaatccataacacaatctatgcgaattcaaaattggatggatgatagttactatggtcacgggttgacaaataatgactcaactccaaccaggcacaatacatcgagttccataccaaaaatttcaagaccaattgctagccaaaactccctgggttggaacgaagtttga

SEQ ID NO: 4180 - DNA, 3921 bp, Artificial Sequence
  Description of Artificial Sequence: Synthetic polynucleotide
atgcagtttccattcgcttgtctcttgtccacccttgtaattagtgggtctttggccagagccagccccttcgactttatattcggcaatggaacgcaacaagctcagagccaaagcgagagtcaaggtcaagtttctttcaccaatgaagcttctcaggatagttccaccacctctttggtaacagcctattctcaaggtgttcattctcaccagtctgcaacaatagtgagtgccacaatctcttccctcccatctacttggtatgatgcgagctccacttcccagacttctgtgtcttatgccagtcaagaatccgactatgccgttaatcaaaactcttggagcgcgtctactaatcaattaccatctaccagtacgacaagctactatgcgccaaccttcagtacatctgccgattttgctgcttctagtgtaaatgcagcttctgatgtctccactgccagtgttcccattgatacgagtgctaattctatccctttcacaactacaagtaacatagagactacaacgagtgcacctctcacttctgacactccacttatttccactagtacgatgtccgcagctgataacgtattttcttctgcaaaccctatttctgcctccttaacaaccaccgatagttctgaaagttttgaccaaacttctactgctggtgccattccggtgcaaagttctgcagattttagtagttctagtgaaattttagtacaaagttctgcggatttcagtagccctagttctccaactactaccgatatatctttatctgctgccccattgcaaacaagtgaaagtagcagttttaccactgcatctgcagctttgccagtaagttctacagacgttgatggcagtagcgcctctcctgtagtgagcatgagcgccgcaggacaaatagctagcagcagcagcacagataatccaactatgtctgaaaccttttctttaacatctacagaagttgatggttccgatgtttcttctacagtgagcgcattattatctgctccttttttacaaacaagtacttccaacagtttcagcattgttagcccatctgtatcttttgttccatctcagagttccagtgacgttgctagctccagtactgcaaatgtagttagttcttccttttctgatattccaccgcaaactagtacctctgggagcgtagtttctgtagcgcaatccgcatctgccctcgcatttcaaagttctacagaggtatatggtgccagtgcctccagcacaatgagttctttattatctactacttctttgcagtctactactttggatagcagtagtttagctagctcctctgcgtccagtagtgaccttacagattatggcgtctccagtacagcaagcataccgttattgagtgccagtgaacaagcaagtacttccagcagttttagcgttgttagcccttctgtatcttttgttccatctcaaagttccagtgatgttgctagcaccagtgctccaagtgtagttagttcttccttttcttatacttctttacaagcaggtggctctagcatgaccaatccctcttcttctactatagtatattctagtagtactggcagttctgaggaatccgctgcatctacagcttctgcaacattaagtggctcctcttctacttatatggcaggaaatttgcaatctcagcctccatccacttctagtttgctttctgagtctcaagctacaagcactagtgctgtgttggctagcagttctgtttctacaacttctccctataccactgcaggtggtgcatctacagaggcctcttccctcatatcttctacatctgcggaaacttcccaggtaagttattctcaaagcacaactgcattgcaaacttccagtttcgcatcttcttctacaacagaaggaagtgaaacatctagtcaaggtttttctaccagctctgttttagttcaaatgccttcttccatttccagcgaattctctccctctcagacgacaactcaaatgaattctgcaagctcttcttctcagtacactatatcttccactggtatactttctcaggtttctgacacatctgtgtcttatacaacttctagttcttctgtttctcaagtttctgacacaccagtttcttatacaacttctagttcttctgtttctcaagtttctgacacaccggtttcttatacaacttctagttcttctgtttctcaagtttctgacacaccagtttcttatacaacttctagttcttctgtttctcaagtttctgacacaccggtttcttatacaacttctagttcttccgtttctcaagtttctgacacgtctgtaccttctacaagttccagaagttccgtttctcaagtctctgacactccggtgccttctacaagttctaggtcttccgtttctcaaacatctagctctttgcagcccaccactacatcctcccaacgtttcaccatttccactcatggagcgctttctgaaagtagttctgttagccaacaagcttctgagattactagctctatcaatgcaacagcttccgaataccatagcatccagacaaccgcggctactcaatccacaactttatcttttaccgacgcaaacagcagttctgcttccgctccattggaagtggcaacgtctacgccaaccccatcttccaaggcatcctctttgttgcttacaccatctacatcctctttaagtcaggttgctacaaatactaatgtacagacgagtttaacaacggaaagtacgaccgttttagaaccatctacgactaacagttccagtacgtttagtttagtcacttctagtgacaacaattggtggattccaactgagttaatcacgcaggcaccagaagctgcatccactgcatcttctaccgttggaggaacacaaactatgactttgccccatgcaattgcagccgcgacacaagttcccgagcctgagggctacaccttaatcacaatagggttcaaaaaagctttgaactacgaatttgttgtatctgaaccaaaaagcagtgctcaaatcttcggatacttgcctgaagctttgaacacaccttttaagaacgtattcacaaacattacggtattacaaatagtgccattacaggatgactctctcaactacttagtaagtgttgctgaagtatactttccaactgcagaaatagaggagttatccaatttaattaccaactcttctagcgctttttacacggatggaatgggtacagcaaaatctatggctgcaatggttgattcctccataccgttaacgggcctcttacacgatagtaacagcaactctggcggatcttctgacggatcctcctccagtaatagcaactctggatcttctggttctggatctaatagcaactccggtgtgtcttcttcttccggaaattcctatcaagatgccggtactttggaatattcttccaaatctaactccaacgtatccacttctagcaaatccaagaaaaaaatcattggtttagttatcggcgttgttgttggtggatgcttatatattttattcatgatttttgctttcaagtatatcataagaaggagaattcaaagtcaagaaattatcaagaacccagaaatttccagtatcagtagtagtgaatttggtggagagaaaaattacaataatgaaaagagaatgagcgttcaagaatccataacacaatctatgagaattcaaaattggatggatgatagttactatggtcacgggttgacaaataatgactctactccaaccaggcacaatacatctagttccataccaaaaatttctagaccaattgctagccaaaactccttgggttggaacgaagtttga

SEQ ID NO: 4181 - DNA, 987 bp, Saccharomyces cerevisiae
atgtcgagactagcgcataataaagcgctaccttataaaataattgtcgatttatcattccatagaacgcgtttaccctcagatgtttcatcgctaataaaattcgagcaaagacctgcaattattaacatccatggccttttgggctcacacgtgatgtttcattctctcaataagcttctttcaaggaagcttgacgcggatattttttctgttgatgtaagaaatcatggcatttcaccaaaagcaataccttatgactacactacactgaccaatgatttgatttattttattgaaactcatattggcttggagagacctatttatttactgggattctctatgggtggtaaaattgcattattaaccacattgtacaagaatattaatatacgaaagtgtatatcaattgatttaccgccttatgaaaccccagaattagatcccatgatattacaaaactatgacttaataatgcggattatccgcagagatgtcaagattttaagaggttcccccagctggcagaaaaaagttcttgagcttttcaaaagtttggaatgtaataagaggaaatgtggtggagctgtggcactctactttgccaacggttttctttctgtaaaatccaataatgtacaccaagcacagttacactatgaacaacaacagcatgatccttatataaattactcaatgcctctctccagcatgccgaacctgttggatgaagtgaaaaaatggccggatctatcgaaccaaagggacttcttccaaaaaggcacagccagtcgtaaagttttattcatgaaaggcctgcagtctaactttattaacaatgattattccctcctgaggtataactttccctgtgctgatgtccgagaatttaatactgggcataatttactgttggagaatccagaggactcattcaaatgtattctgaacttttttgcggaggagacgctggattttgaataa

SEQ ID NO: 4182 - DNA, 987 bp, Artificial Sequence
  Description of Artificial Sequence: Synthetic polynucleotide
atgagtagattagcgcataataaagcgttaccttataaaataattgtcgatttatctttccatagaacgcgtttaccctctgatgtttcttctttgataaaattcgagcaaagacctgcaattattaacatccatggccttttgggctctcacgtgatgtttcattctctcaataagcttctttctaggaagcttgacgcggatattttttctgttgatgtaagaaatcatggcatttctccaaaagcaataccttatgactacactacattaaccaatgatttgatttattttattgaaactcatattggcttggagagacctatttatttattaggattctctatgggtggtaaaattgcattattaaccacattgtacaagaatattaatataagaaagtgtatatctattgatttaccgccttatgaaaccccagaattagatcccatgatattacaaaactatgacttaataatgagaattatccgcagagatgtcaagattttaagaggttcccccagctggcagaaaaaagttcttgagcttttcaaaagtttggaatgtaataagaggaaatgtggtggagctgtggcactctactttgccaacggttttctttctgtaaaatccaataatgtacaccaagcacagttacactatgaacaacaacagcatgatccttatataaattactccatgcctctctccagcatgccgaaccttttggatgaagtgaaaaaatggccggatttatctaaccaaagggacttcttccaaaaaggcacagccagtcgtaaagttttattcatgaaaggcttgcagtctaactttattaacaatgattattccctcttgaggtataactttccctgtgctgatgtcagagaatttaatactgggcataatttattattggagaatccagaggactctttcaaatgtattttgaacttttttgcggaggagacgttagattttgaatga

SEQ ID NO: 4183 - DNA, 573 bp, Saccharomyces cerevisiae
atgtccagattaagaagattcaatagaaagatcttaagcttgagttctgactacactcatgacggtgaatctgatcaagaagatgtatccatattaccattagatacagaagagcaggaagaactcatacaaaaatttgagactaatgctcacatcacaaataagctgtacataaacctgttaagcatattgtatttgctatatggcggactgctaatgatactcgtaagaaaatcgcgagggtatattaagttagcacttcttgctggcgctaattctttgatctgttcgtgcatcacacttagatatgatattgtaaacgactatcttttgttcaaaaagtttaagttaagagtgagcaatttttctattaacataataaacattattttactagtacttatggcttggataagtttcaatcatgtggtcgaagataaaaaaacggtgctctgtttgcaagttccaatgtttttattctgggtcgctgtgcttgtgaaaagatgggctcgaaatatcgaagatgaaatcgcagatctaagatgcttgaaatacaaatacaaaaatgcttag

SEQ ID NO: 4184 - DNA, 573 bp, Artificial Sequence
  Description of Artificial Sequence: Synthetic polynucleotide
atgtccagattaagaagattcaatagaaagatcttaagcttgagttctgactacactcatgacggtgaatctgatcaagaagatgtatccatattaccattagatacagaagagcaggaagaactcatacaaaaatttgagactaatgctcacatcacaaataagttgtacataaacttattaagcatattgtatttgttatatggcggattattgatgatactcgtaagaaaatctagagggtatattaagttagcacttcttgctggcgctaattctttgatctgtagttgcatcacacttagatatgatattgtaaacgactatcttttgttcaaaaagtttaagttaagagtgagcaatttttctattaacataataaacattattttattggtacttatggcttggataagtttcaatcatgtggtcgaagataaaaaaacggtgctctgtttgcaagttccaatgtttttattctgggtcgctgtgcttgtgaaaagatgggctagaaatatcgaagatgaaatcgcagatttgagatgcttgaaatacaaatacaaaaatgcttga

SEQ ID NO: 4185 - DNA, 894 bp, Saccharomyces cerevisiae
atgtcgcatcaaatggcgccatggatacccatgtttattcaatcgtgcaaaaataacactgaaccgtttgtatcatttcaatttgctactgttgacgaactaacgaacaaaccacgttgtagaacggtagtgttcagagattttttatttcatgacaaaagaactaatgtgttgacttttaacactgatatgaggagctcaaagataactgaatcatttataactccaaattcaaataactctagcgacagcaaaagatgtgagactccatttttcgaagcatgtttctatttcccggaaacttgggagcagtatcgcttcagtggccaatgctttacaatatctaaacaatttaagaaaataccggctgagattgtaaccaagtatgacatattttcaccgcggttttcagagacaaatgatgacagcactgacgaagaaatagatactccaattaacgacgacgacgacgacgataaaaataatgacgccgacaataatgacattaacgaagataacaaacttatagaatccatagagaacgatgaacaccatgaggatgaagacgactactaccctcaaccacaagaatgggaggctgaattactaagacaatggtcctctctatcaaggcataccaagtcattgtataggaagccagccccgggccagaaacttacctctgaaactagcaaacaactggacaaactccatagaggagttgacggtgctaaagaggacgctggactggaaaactttggtattgtctgtctttgtgttgattctgttgattttttgaacttgaaagagggaagaggtggtgaaagatggattttccagaaaaccgacggcaaagacgaagatctgtgggaggaacaagaagtgtgtccgtga

SEQ ID NO: 4186 - DNA, 894 bp, Artificial Sequence
  Description of Artificial Sequence: Synthetic polynucleotide
atgtcccatcaaatggcgccatggatacccatgtttattcaaagttgcaaaaataacactgaaccgtttgtatcctttcaatttgctactgttgacgaattgacgaacaaaccacgttgtagaacggtagtgttcagagattttttatttcatgacaaaagaactaatgtgttgacttttaacactgatatgaggagctctaagataactgaaagttttataactccaaatagtaataactctagcgacagcaaaagatgtgagactccatttttcgaagcatgtttctatttcccggaaacttgggagcagtatcgcttcagtggccaatgctttacaatatctaaacaatttaagaaaataccggctgagattgtaaccaagtatgacatattttctccgagattttctgagacaaatgatgacagcactgacgaagaaatagatactccaattaacgacgacgacgacgacgataaaaataatgacgccgacaataatgacattaacgaagataacaaacttatagaatccatagagaacgatgaacaccatgaggatgaagacgactactaccctcaaccacaagaatgggaggctgaattattaagacaatggtcctctttatctaggcataccaagtctttgtataggaagccagccccgggccagaaacttacctctgaaactagcaaacaattggacaaactccatagaggagttgacggtgctaaagaggacgctggattagaaaactttggtattgtctgtctttgtgttgattctgttgattttttgaacttgaaagagggaagaggtggtgaaagatggattttccagaaaaccgacggcaaagacgaagatttatgggaggaacaagaagtgtgtccgtga

SEQ ID NO: 4187 - DNA, 330 bp, Saccharomyces cerevisiae
atgattgacatttctcacggacacacttcttgttcctcccacagatcttcgtctttgccgtcggttttctggaaaatccatctttcaccacctcttccctctttcaagttcaaaaaatcaacagaatcaacacaaagacagacaataccaaagttttccagtccagcgtcctctttagcaccgtcaactcctctatggagtttgtccagttgtttgctagtttcagaggtaagtttctggcccggggctggcttcctatacaatgacttggtatgccttgatagagaggaccattgtcttagtaattcagcctcccattcttgtggttga

SEQ ID NO: 4188 - DNA, 330 bp, Artificial Sequence
  Description of Artificial Sequence: Synthetic polynucleotide
atgattgacatttctcacggacacacttcttgttcctcccacagatcttcttctttgccgtctgttttctggaaaatccatctttctccacctcttccctctttcaagttcaaaaaatctacagaatctacacaaagacagacaataccaaagttttccagtccagcgtcctctttagcaccgtctactcctttatggagtttgtccagttgtttgttggtttctgaggtaagtttctggcccggggctggcttcttgtacaatgacttggtatgccttgatagagaggaccattgtcttagtaattctgcctcccattcttgtggttga

SEQ ID NO: 4189 - DNA, 1416 bp, Saccharomyces cerevisiae
atgtctatttgtgaacaatactacccagaagagccaaccaaaccaactgttaagaccgagtccattcctggtcctgaatcccagaagcagttaaaggaactgggtgaagtttttgacacaagaccagcatattttttggctgattatgagaaatctttaggtaactatatcactgatgtggatgggaacacatatttggatttgtatgcccaaatctcttcaattgcacttggttataacaaccctgctttgatcaaggcagcacaatcaccagaaatgatccgtgctttggtcgaccgtcctgccttaggtaacttcccatctaaggatttagacaagatattgaagcaaatattgaaatctgcgccaaagggtcaagatcacgtctggtcagggctttccggtgcagatgccaatgaattagcgttcaaggctgcctttatttattaccgtgccaaacaaaggggctatgatgccgatttttctgaaaaggaaaacttgtctgtcatggacaatgacgcccctggcgcccctcatcttgccgtactatcgttcaagagagcgttccacggtagattgtttgcctccggttccacaacttgttctaaaccaattcacaagttggatttcccagccttccactggcctcatgctgagtatccatcttaccaatacccattagatgaaaattctgatgcaaaccgtaaagaggatgaccattgcttggccattgttgaagaattaatcaaaacctggtctattccagttgctgccttaatcatcgaaccaattcaatctgagggaggtgataaccacgcttctaagtatttcttacaaaagctaagagacattaccttgaagtataacgttgtctacatcatagatgaagtgcaaacaggtgtcggagccaccggtaagctatggtgtcatgagtacgccgatattcaaccacctgtggatttagtgaccttttccaagaaattccaaagtgcaggatatttcttccacgaccctaaattcattccaaacaaaccatacagacaattcaacacatggtgtggtgaacctgcaagaatgatcattgcaggtgccattggacaggaaatctccgacaagaagttgactgaacaatgttcaagagtaggtgattatttgttcaagaaattggagggtttgcagaagaaataccctgaaaactttcaaaacttgagaggtaaaggaagaggcacattcattgcctgggatttgcctactggtgagaagagagacttactattgaagaaattgaagttgaatggttgcaacgttggtggatgtgcagtccatgcagtgagattaagaccttcattaacattcgaggagaagcatgctgatatctttattgaagcattagccaaatcagttaatgaattatga

SEQ ID NO: 4190 - DNA, 1416 bp, Artificial Sequence
  Description of Artificial Sequence: Synthetic polynucleotide
atgtctatttgtgaacaatactacccagaagagccaaccaaaccaactgttaagaccgagtccattcctggtcctgaatcccagaagcagttaaaggaattgggtgaagtttttgacacaagaccagcatattttttggctgattatgagaaatctttaggtaactatatcactgatgtggatgggaacacatatttggatttgtatgcccaaatctcttccattgcacttggttataacaaccctgctttgatcaaggcagcacaatctccagaaatgatccgtgctttggtcgaccgtcctgccttaggtaacttcccatctaaggatttagacaagatattgaagcaaatattgaaatctgcgccaaagggtcaagatcacgtctggtctgggctttccggtgcagatgccaatgaattagcgttcaaggctgcctttatttattaccgtgccaaacaaaggggctatgatgccgatttttctgaaaaggaaaacttgtctgtcatggacaatgacgcccctggcgcccctcatcttgccgtattatctttcaagagagcgttccacggtagattgtttgcctccggttccacaacttgttctaaaccaattcacaagttggatttcccagccttccactggcctcatgctgagtatccatcttaccaatacccattagatgaaaattctgatgcaaaccgtaaagaggatgaccattgcttggccattgttgaagaattaatcaaaacctggtctattccagttgctgccttaatcatcgaaccaattcaatctgagggaggtgataaccacgcttctaagtatttcttacaaaagttgagagacattaccttgaagtataacgttgtctacatcatagatgaagtgcaaacaggtgtcggagccaccggtaagttatggtgtcatgagtacgccgatattcaaccacctgtggatttagtgaccttttccaagaaattccaaagtgcaggatatttcttccacgaccctaaattcattccaaacaaaccatacagacaattcaacacatggtgtggtgaacctgcaagaatgatcattgcaggtgccattggacaggaaatctccgacaagaagttgactgaacaatgttccagagtaggtgattatttgttcaagaaattggagggtttgcagaagaaataccctgaaaactttcaaaacttgagaggtaaaggaagaggcacattcattgcctgggatttgcctactggtgagaagagagacttattattgaagaaattgaagttgaatggttgcaacgttggtggatgtgcagtccatgcagtgagattaagaccttctttaacattcgaggagaagcatgctgatatctttattgaagcattagccaaatctgttaatgaattatga

SEQ ID NO: 4191 - DNA, 357 bp, Saccharomyces cerevisiae
atggctgagaaacgtactcttatagctgtgatagctgacgaagatactacaactggtttattgttagccgggattggacaaatcactcctgaaacccaagaaaagaacttttttgtttaccaagaaggtaagactactaaggaggaaatcactgacaagtttaatcactttactgaagagagagacgatattgccatccttctaatcaaccaacatatcgcggaaaacataagagctagagtggactccttcaccaatgcgttccctgctattttagaaattccatctaaagatcatccctacgaccctgaaaaggactctgtattgaagagagtcagaaagttgttcggtgagtaa

SEQ ID NO: 4192 - DNA, 357 bp, Artificial Sequence
  Description of Artificial Sequence: Synthetic polynucleotide
atggctgagaaacgtactcttatagctgtgatagctgacgaagatactacaactggtttattgttagccgggattggacaaatcactcctgaaacccaagaaaagaacttttttgtttaccaagaaggtaagactactaaggaggaaatcactgacaagtttaatcactttactgaagagagagacgatattgccatccttttgatcaaccaacatatcgcggaaaacataagagctagagtggactccttcaccaatgcgttccctgctattttagaaattccatctaaagatcatccctacgaccctgaaaaggactctgtattgaagagagtcagaaagttgttcggtgagtga

SEQ ID NO: 4193 - DNA, 873 bp, Saccharomyces cerevisiae
atgttggtaagaaataggtatctgggtgaactgctcaaaaactctcgatcgtttagtgtgctgaattcctcggtacgttcaggtcacaacaaatggtcaaccatcaagcacggtaaagccaagaatgatgcggaacgaaacaaaattaataacaagtttgcaaaccagatagcaatgtcagtcaagttaggcaacggtattacggatccgagcatgaatataagattagccaccagcatcgagctagcaaataaaaacaatgtcagcaaaaaagttattgagaacgccatccggaaagcttctggaagcagcgcatcgggcaaggactcaaacgcttctgagctatgtgtatacgagggaatggggcccggcggggtcgctatagtggtggaagcgctgacagacaacaagaacaggaccataggtctgataaggagtgcatttaataaagctaatggatcgatgactccaacgttgtttttcttcgacaaaaaaggatacgttacaatggtacctccgaagatgttagacactgaggacaaggtgctagaaagcgtactggagattcaaggcatcgaagacattgcgcctgtgcaggaagacgcagaagatttagagtgtgataccgaaactgaaactacaggccaaacttacgaggcggtgatggaacctgccgataccaataaggtggccgccctactgaaggagcgtggtttccacatcagagacttgggcatcggctacaatgccaagccggatatggaagttttcgtgcaaggcgatgaaacgctcgagaaactacagaaactgaccacagcgctcgaggacatcgacgaagtgacgtcgttgtacactaacgctagcaacgcttaa

SEQ ID NO: 4194 - DNA, 873 bp, Artificial Sequence
  Description of Artificial Sequence: Synthetic polynucleotide
atgttggtaagaaataggtatttgggtgaattactcaaaaactctaggtcttttagtgtgttgaattcctctgtacgttctggtcacaacaaatggtctaccatcaagcacggtaaagccaagaatgatgcggaaagaaacaaaattaataacaagtttgcaaaccagatagcaatgtctgtcaagttaggcaacggtattacggatccgagcatgaatataagattagccaccagcatcgagttggcaaataaaaacaatgtcagcaaaaaagttattgagaacgccatcagaaaagcttctggaagcagcgcatctggcaaggactccaacgcttctgagctctgtgtatacgagggaatggggcccggcggggtcgctatagtggtggaagcgttaacagacaacaagaacaggaccataggtttgataaggagtgcatttaataaagctaatggatccatgactccaacgttgtttttcttcgacaaaaaaggatacgttacaatggtacctccgaagatgttagacactgaggacaaggtgttggaaagcgtattggagattcaaggcatcgaagacattgcgcctgtgcaggaagacgcagaagatttagagtgtgataccgaaactgaaactacaggccaaacttacgaggcggtgatggaacctgccgataccaataaggtggccgccttattgaaggagcgtggtttccacatcagagacttgggcatcggctacaatgccaagccggatatggaagttttcgtgcaaggcgatgaaacgctcgagaaattacagaaattgaccacagcgctcgaggacatcgacgaagtgacgtctttgtacactaacgctagcaacgcttga

SEQ ID NO: 4195 - DNA, 1656 bp, Saccharomyces cerevisiae
atggcaagctgcaatccgaccaggaagaagagctctgcttcaagcctatctatgtggagaacgattctcatggcgttaacaacactaccgctaagtgttctttcgcaggagttggttccagctaatagcacaacatcgagcacagctccttccatcacttcgctttccgcagttgagtcatttacgtccagtaccgatgcaacgagcagcgcaagtttatcaacgccgagtatagcttcagtatcctttacttccttcccacaaagttcttcactgcttactctttcgtcaacattatcctcagaactttcctcttcgtccatgcaagtttcgtcgtcttcaacatcgtcgtcttcttcggaggttacgtcatcatcgtcatcatcatcaatatctccttcctcttcatcatcaacaataatatcatcgtcatcatcactgccgacattcactgtggcatcaacatcttcgacagttgcctcctccacactttccactagctcatcgttggttatctctacgtcttcgtcaacgtttacgtttagttcggaaagttcaagctctttgatttcctcttcaatttcaacatccgtttcgacttcttcagtgtacgttccctcctcttcaacttcatctccaccttcgtcctcatccgaattgacatcatcctcgtactcatcatcctcatcctcatccaccctcttttcctactcctcctcattttcatcatcctcatcctcatcatcctcatcatcatcctcatcctcatcatcatcatcatcatcatcatcatatttcaccctctccacatcttcctcttcatccatatactcgtcttcgtcatatccttcattttcatcttcatcttcctcaaaccctacctcatcaatcacttctacatccgcctcatcttctattactcccgcttccgaatattccaatttggcaaaaaccataactagtataatagaaggccagaccatcctctctaactactataccacaataacgtattcaccgacagcatccgcatcttcaggaaaaaattcacatcactcaggcttatcaaaaaagaatcgtaatattatcatcggttgtgtggttggcataggtgcccccctcatcctaattctactaatattgatttacatgttttgtgttcagcctaaaaaaacggatttcattgactctgacggtaaaattgtcacagcttatcgtagtaacattttcaccaaaatatggtatttcttgctgggtaaaaaaattggtgaaacagaaagattcagctcagattcccccatcggcagcaataatattcagaattttggtgatatcgatccagaagatatacttaacaatgacaacccctacacccctaaacacactaatgttgaaggctacgacgacgacgacgacgacgacgctaatgatgaaaacctatcatccaacttccataacagaggcatagatgatcaatactcacctactaaatctgcatcatattcaatgtcgaatagtaatagtcaagattacaacgacgcagatgaagtaatgcacgatgaaaacattcatcgtgtttatgatgacagcgaagctagcatcgacgagaactattacacgaaaccaaacaacggcttaaatatcacgaactattaa

SEQ ID NO: 4196 - DNA, 1656 bp, Artificial Sequence
  Description of Artificial Sequence: Synthetic polynucleotide
atggcaagctgcaatccgaccaggaagaagagctctgcttctagcttgtctatgtggagaacgattctcatggcgttaacaacattgccgttaagtgttctttctcaggagttggttccagctaatagcacaacatctagcacagctccttccatcacttctctttccgcagttgagtcttttacgtccagtaccgatgcaacgagcagcgcaagtttatctacgccgagtatagcttctgtatcctttacttccttcccacaaagttcttctttacttactctttcttctacattatccagtgaactttcctcttcttccatgcaagtttcttcttcttctacatcttcttcttcttctgaggttacgtcttcttcttcttcttcttctatatctccttcctcttcttcttctacaataatatcttcttcttcttctttaccgacattcactgtggcaagcacatcttctacagttgcctcctccacactttccactagctcctctttggttatctctacgtcttcttctacgtttacgtttagttctgaaagtagtagctctttgatttcctcttccatttctacatccgtttccacttcttctgtgtacgttccctcctcttctacttcttctccaccttcttcctcctccgaattgacatcttcctcttactcttcttcctcctcctcctccaccctcttttcctactcctcctctttttcttcttcctcctcctcttcttcctcttcttcttcctcctcctcttcttcttcttcttcttcttcttcttatttcaccctctccacatcttcctcttcttccatatactcttcttcttcttatccttctttttcttcttcttcttccagtaaccctacctcttctatcacttctacatccgcctcttcttctattactcccgcttccgaatattccaatttggcaaaaaccataactagtataatagaaggccagaccatcctctctaactactataccacaataacgtattctccgacagcatccgcatcttctggaaaaaattctcatcactctggcttatccaaaaagaatcgtaatattatcatcggttgtgtggttggcataggtgcccccctcatcttgattttattgatattgatttacatgttttgtgttcagcctaaaaaaacggatttcattgactctgacggtaaaattgtcacagcttatcgtagtaacattttcaccaaaatatggtatttcttgttgggtaaaaaaattggtgaaacagaaagattcagcagtgattcccccatcggcagcaataatattcagaattttggtgatatcgatccagaagatatacttaacaatgacaacccctacacccctaaacacactaatgttgaaggctacgacgacgacgacgacgacgacgctaatgatgaaaacttatcttccaacttccataacagaggcatagatgatcaatactctcctactaaatctgcaagttattccatgagtaatagtaatagtcaagattacaacgacgcagatgaagtaatgcacgatgaaaacattcatcgtgtttatgatgacagcgaagctagcatcgacgagaactattacacgaaaccaaacaacggcttaaatatcacgaactattga

SEQ ID NO: 4197 - DNA, 714 bp, Saccharomyces cerevisiae
atggcaaactctaaatttggatacgtaaggcaatttgaaacacacgatgttattttgcctcagtgttatattgtggtaagaatagacggcaagaagtttcatgaattttccaagttctacgagtttgccaagccaaacgatgaaaatgctttgaagttaatgaatgcatgtgctaagaaccttgtcctcaagtacaaaaatgatattatattggcgttcggggagagtgacgaatactcatttattttgaagtcaagtacaactttatttaacagaaggaaagacaagcttgcgactttatttggttcttttttcacgtccaattacgtcgcattatgggccaagtttttcccagaaaagccgttgaatatcaagcatttgccatatttcgattcaaggtgtgtagcataccctaatttacaaacgataaaagattatttatcctggagatatgtcgatacacatataaacaatctttataatacgacgttttggcagttaataataaagtgtggcttaactccccaggaatccgagaagaaactatgtggaacatttagtaatgagaaacaggaaatactattttctgaatgtgggataaactacaataatgaacctgaaatgtttaaaaagggttcactagtaacaagaaaaggagaaatacttcatattaacgtcatcgcacagatagatgagttgttcgaaggctattaa

SEQ ID NO: 4198 - DNA, 714 bp, Artificial Sequence
  Description of Artificial Sequence: Synthetic polynucleotide
atggcaaactctaaatttggatacgtaaggcaatttgaaacacacgatgttattttgcctcagtgttatattgtggtaagaatagacggcaagaagtttcatgaattttccaagttctacgagtttgccaagccaaacgatgaaaatgctttgaagttaatgaatgcatgtgctaagaaccttgtcctcaagtacaaaaatgatattatattggcgttcggggagagtgacgaatactcttttattttgaagagtagtacaactttatttaacagaaggaaagacaagcttgcgactttatttggttcttttttcacgtccaattacgtcgcattatgggccaagtttttcccagaaaagccgttgaatatcaagcatttgccatatttcgatagtaggtgtgtagcataccctaatttacaaacgataaaagattatttatcctggagatatgtcgatacacatataaacaatctttataatacgacgttttggcagttaataataaagtgtggcttaactccccaggaatccgagaagaaattatgtggaacatttagtaatgagaaacaggaaatattgttttctgaatgtgggataaactacaataatgaacctgaaatgtttaaaaagggttctttagtaacaagaaaaggagaaatacttcatattaacgtcatcgcacagatagatgagttgttcgaaggctattga

SEQ ID NO: 4199 - DNA, 303 bp, Saccharomyces cerevisiae
atgactggctatgagccctttaagtttttctctatccgcatgtcttcaattaattctccatcagtgatttttaaaacaataaaaactttcaatccgggtaaaactgaagaatatagagcgaaaaaagcgtatgtgcaggacaagggatacttacgccaaaaaagaccatgtccattttattataggatacccacttgcacggcgtcaaagtactcaattggctgtgcttcttcaaaaaaactaacatacacaagaaccaaatttaaattcaacttggttacccaaagagagaattcattatag

SEQ ID NO: 4200 - DNA, 303 bp, Artificial Sequence
  Description of Artificial Sequence: Synthetic polynucleotide
atgactggctatgagccctttaagtttttctctatccgcatgtcttccattaattctccatctgtgatttttaaaacaataaaaactttcaatccgggtaaaactgaagaatatagagcgaaaaaagcgtatgtgcaggacaagggatacttacgccaaaaaagaccatgtccattttattataggatacccacttgcacggcgtctaagtactctattggctgtgcttcttctaaaaaattaacatacacaagaaccaaatttaaattcaacttggttacccaaagagagaattctttatga

SEQ ID NO: 4201 - DNA, 837 bp, Saccharomyces cerevisiae
atggcgaagactatcaaagttatcaggaagaaggaccccaaaaagaagaacctatccgatcctttagcaaaacaaaaactagtttggaaaatcggacacgttttaactttagtttttggtttattattttctatcacgtatttctaccatgtcctaatcttcttcaaatatcgttcctggaagtggttgttcttaagggtcaataaaaattactcgtttattcaaagtaagagatggtacatgaaacttttgagttggagcccacaggtaatgtaccgtttgtcattaattggcgtatttatgtctgagtccgtcacaatgcaacagaactgggttggacttaaccctacttggaatgaccttttgtcctctgagaactttcatacccttttgattgcctgtttatggttctttggtggtggtaagtctttttacaagattttgccttacatgattttaagttatctacacctaactaaaatgaactacgaattgaatgctaacaaagaagaaaagatccctttaacacccaaagacagaaaaatgctacacttacttgcgtactctgaattacttgttatcttagcgctaacactagacactatattgtttaagacgggtacatccggatttatgctcgtcatttatgttggtatttattggttgaggttgaacttctctccatacgcacaagtggctgttttggagttacttgtcaagtttgaaaaatacgtccccaaaaaatatagagacaaatggcaggttataaagaactttatttatatgaaaatgaaggagcacgaaaagagaacagaagaagttgccagatacgcgtaa

SEQ ID NO: 4202 - DNA, 837 bp, Artificial Sequence
  Description of Artificial Sequence: Synthetic polynucleotide
atggcgaagactatcaaagttatcaggaagaaggaccccaaaaagaagaacctttccgatcctttagcaaaacaaaaattggtttggaaaatcggacacgttttaactttagtttttggtttattattttctatcacgtatttctaccatgtcttgatcttcttcaaatatcgttcctggaagtggttgttcttaagggtcaataaaaattactcttttattcaaagtaagagatggtacatgaaacttttgagttggagcccacaggtaatgtaccgtttgtctttaattggcgtatttatgtctgagtccgtcacaatgcaacagaactgggttggacttaaccctacttggaatgaccttttgtcctctgagaactttcatacccttttgattgcctgtttatggttctttggtggtggtaagtctttttacaagattttgccttacatgattttaagttatttgcacttgactaaaatgaactacgaattgaatgctaacaaagaagaaaagatccctttaacacccaaagacagaaaaatgttgcacttacttgcgtactctgaattacttgttatcttagcgttaacattagacactatattgtttaagacgggtacatccggatttatgctcgtcatttatgttggtatttattggttgaggttgaacttctctccatacgcacaagtggctgttttggagttacttgtcaagtttgaaaaatacgtccccaaaaaatatagagacaaatggcaggttataaagaactttatttatatgaaaatgaaggagcacgaaaagagaacagaagaagttgccagatacgcgtga

SEQ ID NO: 4203 - DNA, 327 bp, Saccharomyces cerevisiae
atgcctccaaagcaacaattatctaaagctgccaaagccgctgctgcccttgctggtggtaagaagtctaagaagaagtggtccaaaaagtccatgaaagacagagctcaacacgctgtcattttagaccaagagaagtacgacagaatcttgaaggaagttccaacttacagatacgtttctgtctctgttttggtcgacagattaaagattggtggttctttagctagaattgctttgagacacttggaaaaggaaggtatcatcaagccaatctccaagcactccaagcaagctatctacaccagagctactgcttctgaataa

SEQ ID NO: 4204 - DNA, 327 bp, Artificial Sequence
  Description of Artificial Sequence: Synthetic polynucleotide
atgcctccaaagcaacaattatctaaagctgccaaagccgctgctgcccttgctggtggtaagaagtctaagaagaagtggtccaaaaagtccatgaaagacagagctcaacacgctgtcattttagaccaagagaagtacgacagaatcttgaaggaagttccaacttacagatacgtttctgtctctgttttggtcgacagattaaagattggtggttctttagctagaattgctttgagacacttggaaaaggaaggtatcatcaagccaatctccaagcactccaagcaagctatctacaccagagctactgcttctgaatga

SEQ ID NO: 4205 - DNA, 1089 bp, Saccharomyces cerevisiae
atgtctcgcaaatttgatttaaaaacgattactgatctttccgtcctagttgggactggcatatcattatactacctggtcagtcggctactcaacgatgttgaatcaggaccgttatcaggtaaatcaagggaatcaaaggccaaacagtccttgcaatgggaaaagctggtgaaaagatcaccggcattggcagaagtaacattagatgcatatgaaaggactatattatcttctatcgttacgccagatgaaataaatattacattccaggatattggtggcttagacccgcttatttcagatctacatgaaagtgtcatatatcccttgatgatgccagaagtatattctaatagccctttacttcaagcacctagcggtgtcttgctatatgggccaccaggatgtggtaaaaccatgttggcgaaggccctagccaaggaaagtggtgctaattttatctcaataagaatgtcatctataatggataaatggtatggtgaatctaacaaaatagtcgatgcaatgttttcattggcgaacaagttacaaccttgtataatattcattgacgaaattgattcattccttagagaacggtcttctacagatcatgaagttacggcaaccttaaaagctgaattcatgactttatgggatggcttattgaataatggaagggttatgattatcggtgctactaatcggataaatgacatagatgatgcgtttttgaggaggttaccaaaaaggtttcttgtttcattgcctggttctgatcaacgttacaaaatattaagtgttttattaaaagacactaaactagacgaagacgaattcgacttgcaactgattgcagacaataccaaaggattttctgggtcggacctgaaagagctttgcagagaagcggccttagatgcagcaaaggaatacataaaacagaagaggcagctcattgatagtggtacaatcgatgttaatgatacttcttccttgaagataagaccattaaagacaaaagattttacaaaaaaattaagaatggatgctacaagtacgttgtcatctcaacctcttgattaa

SEQ ID NO: 4206 - DNA, 1089 bp, Artificial Sequence
  Description of Artificial Sequence: Synthetic polynucleotide
atgtctcgcaaatttgatttaaaaacgattactgatctttccgtcttggttgggactggcatatctttatactacttagtcagtagattactcaacgatgttgaatctggaccgttatctggtaaatctagggaatccaaggccaaacagtccttgcaatgggaaaagttagtgaaaagatctccggcattggcagaagtaacattagatgcatatgaaaggactatattatcttctatcgttacgccagatgaaataaatattacattccaggatattggtggcttagacccgcttatttctgatttgcatgaaagtgtcatatatcccttgatgatgccagaagtatattctaatagccctttacttcaagcacctagcggtgtcttgttatatgggccaccaggatgtggtaaaaccatgttggcgaaggccttggccaaggaaagtggtgctaattttatctccataagaatgtcttctataatggataaatggtatggtgaatctaacaaaatagtcgatgcaatgttttctttggcgaacaagttacaaccttgtataatattcattgacgaaattgattctttccttagagaaagatcttctacagatcatgaagttacggcaaccttaaaagctgaattcatgactttatgggatggcttattgaataatggaagggttatgattatcggtgctactaatagaataaatgacatagatgatgcgtttttgaggaggttaccaaaaaggtttcttgtttctttgcctggttctgatcaacgttacaaaatattaagtgttttattaaaagacactaaattagacgaagacgaattcgacttgcaattgattgcagacaataccaaaggattttctgggagtgacttgaaagagctttgcagagaagcggccttagatgcagcaaaggaatacataaaacagaagaggcagctcattgatagtggtacaatcgatgttaatgatacttcttccttgaagataagaccattaaagacaaaagattttacaaaaaaattaagaatggatgctacaagtacgttgtcttctcaacctcttgattga

SEQ ID NO: 4207 - DNA, 570 bp, Saccharomyces cerevisiae
atgaaagcaatagataaaatgacggataatccaccacaagaaggcttaagtgggaggaaaataatatatgacgaagatggcaaaccttgccgatcatgtaacaccctacttgactttcagtacgtgaccgggaagatatctaatggcctgaagaacctctcatctaacggtaaactagcaggtacgggggctctcactggcgaagcttcagagttgatgcctggctcaagaacatacaggaaggttgaccctcctgacgtagagcaactaggtagatcttcatggacgctgttacactctgtagctgccagctatcctgctcaacctacagaccaacagaagggtgaaatgaaacagttcttgaatatcttctcacatatttatccttgcaactggtgtgctaaagactttgaaaaatatatcagagaaaatgcaccacaagttgagtcaagagaagaacttgggaggtggatgtgtgaagcccacaataaagtcaataagaaattgaggaagcccaaatttgactgtaatttctgggaaaaaagatggaaggacggctgggacgaataa

SEQ ID NO: 4208 - DNA, 570 bp, Artificial Sequence
  Description of Artificial Sequence: Synthetic polynucleotide
atgaaagcaatagataaaatgacggataatccaccacaagaaggcttaagtgggaggaaaataatatatgacgaagatggcaaaccttgcagatcttgtaacaccttacttgactttcagtacgtgaccgggaagatatctaatggcttgaagaacctctcttctaacggtaaattggcaggtacgggggctctcactggcgaagcttctgagttgatgcctggctccagaacatacaggaaggttgaccctcctgacgtagagcaattgggtagatcttcttggacgttattacactctgtagctgccagctatcctgctcaacctacagaccaacagaagggtgaaatgaaacagttcttgaatatcttctctcatatttatccttgcaactggtgtgctaaagactttgaaaaatatatcagagaaaatgcaccacaagttgagagcagagaagaacttgggaggtggatgtgtgaagcccacaataaagtcaataagaaattgaggaagcccaaatttgactgtaatttctgggaaaaaagatggaaggacggctgggacgaatga

SEQ ID NO: 4209 - DNA, 477 bp, Saccharomyces cerevisiae
atgatcaatggcgtatattacaatgaaattagtagagatttggatatctcttcctccactcaatgtcttcggtttctcaaagaaacagttataccgtccttagcaaataatggtaacaacagtacatcaatacagtatcatggcatatcgaagaacgataacattaagaagtctgtaaataagttagataaacaaatcaacatggcagatagaagtttgggtctacaacaagtagtttgtatattctcttacggtccacatattcaaaaaatgttaagtattttggaaatatttaaaaagggttatattaagaacaataagaaaatttatcagtggaataaattaacatcgttcgatataaaaagagaaggcagaaatgaactacaggaagaaaggctcaaggttccaattttggtcacccttgtttctgattcagagatcattgatttaaacctacattcattcaccaaacaataa

SEQ ID NO: 4210 - DNA, 477 bp, Artificial Sequence
  Description of Artificial Sequence: Synthetic polynucleotide
atgatcaatggcgtatattacaatgaaattagtagagatttggatatctcttcctccactcaatgtcttagatttctcaaagaaacagttataccgtccttagcaaataatggtaacaacagtacatctatacagtatcatggcatatccaagaacgataacattaagaagtctgtaaataagttagataaacaaatcaacatggcagatagaagtttgggtttacaacaagtagtttgtatattctcttacggtccacatattcaaaaaatgttaagtattttggaaatatttaaaaagggttatattaagaacaataagaaaatttatcagtggaataaattaacatctttcgatataaaaagagaaggcagaaatgaattacaggaagaaaggctcaaggttccaattttggtcacccttgtttctgattctgagatcattgatttaaacttacattctttcaccaaacaatga

SEQ ID NO: 4211 - DNA, 1029 bp, Saccharomyces cerevisiae
atgatgatactgggtaaagccgggatcctggcacagtatgggacaatatatgtgagacaaaataccattcggaataatttaagttcctgcatttttaagcagtcactatgtgcctttcattcattagcaaaggtgctgcaacaaaagcaagtcccactggacctttcatatgacataatcaagagagatgcagtaaaaactggggatgaagggaagccaagaccacctattatcatacttcacggcttattcggtaacaagctcaacaaccgaagcattggccgtaaccttaacaagaaattgggaagagacgtgtatctgctggacctaagaaatcatggatcctcaccacacagttcagtccataactacgaagtcatgtcggaagacgtgaaacactttatcacaaagcacgaattaaacaccaatggaggccctattataataggacactcaatgggtggtaaagttgccatgatgctggtcctgaaaaacccgcaactttgttcgatgttagtctgtatagagaacgctccggtgagtttgcgccctaacgctgagtttgtcgaatacatcaaagcgctgatggaaatcgtcaacgacaagggcaaaactatccgcacgctgaaacaggctgatgaacaccttgcagagaggatcggcggcaatgagctagtaaggcggtttctcctaacggcgctgaaaaaggtcaagatggacaattcatcgtctgtgtcgtcatatacattcgaagaacgaattcccctcgcaacactgaaagatgccattgtcaaaggtgaaattgccgcgtggcccctagatcctgctcgtgaacgatggacgcggcctgcgctattcatcagggctactcaatcgcattatgtggtagacgagtatcttccgatcatcggcgcgttctttccacgctttgaaacacgtgacatcgatgcgggtcactgggtaaatgcggagaagcctggggaatgtgccgaaagcatcgtcgattttgtggagcggcacgaggattaa

SEQ ID NO: 4212 - DNA, 1029 bp, Artificial Sequence
  Description of Artificial Sequence: Synthetic polynucleotide
atgatgatattaggtaaagccgggatcttggcacagtatgggacaatatatgtgagacaaaataccattagaaataatttaagttcctgcatttttaagcagtccttatgtgcctttcattctttagcaaaggtgttgcaacaaaagcaagtcccattggacctttcctatgacataatcaagagagatgcagtaaaaactggggatgaagggaagccaagaccacctattatcatacttcacggcttattcggtaacaagctcaacaacagaagcattggccgtaaccttaacaagaaattgggaagagacgtgtatttattagacttgagaaatcatggatcctctccacacagttctgtccataactacgaagtcatgtctgaagacgtgaaacactttatcacaaagcacgaattaaacaccaatggaggccctattataataggacactccatgggtggtaaagttgccatgatgcttgtcttgaaaaacccgcaactttgttccatgttagtctgtatagagaacgctccggtgagtttgcgccctaacgctgagtttgtcgaatacatcaaagcgttaatggaaatcgtcaacgacaagggcaaaactatccgcacgttgaaacaggctgatgaacaccttgcagagaggatcggcggcaatgagttggtaaggaggtttctcttgacggcgttgaaaaaggtcaagatggacaattcttcttctgtgtcttcttatacattcgaagaaagaattcccctcgcaacattaaaagatgccattgtcaaaggtgaaattgccgcgtggcccttagatcctgctcgtgaaagatggacgagacctgcgttattcatcagggctactcaatctcattatgtggtagacgagtatcttccgatcatcggcgcgttctttccacgctttgaaacacgtgacatcgatgcgggtcactgggtaaatgcggagaagcctggggaatgtgccgaaagcatcgtcgattttgtggagagacacgaggattga

SEQ ID NO: 4213 - DNA, 492 bp, Saccharomyces cerevisiae
atgaatagcgcaggccgcgtccatcgttcacgagcaggatctaggggccacgcggcaatttcacctttgacaatggcatctttcagtgttgcgaggggaattcgttcttcgaatgtatatgacgacacagacgatgaattgtccatcttgacctttttcagcgccgttaggagaaaccgccttactagctcattgccgccgatcctctctgcaaggtgttcatcagcctgtttcagcgtgcggatagttttgcccttgtcgttgacgatttccatcagcgctttgatgtattcgacaaactcagcgttagggcgcaaactcaccggagcgttctctatacagactaacatcgaacaaagttgcgggtttttcaggaccagcatcatggcaactttaccacccattgagtgtcctattataatagggcctccattggtgtttaattcgtgctttgtgataaagtgtttcacgtcttccgacatgacttcgtag

SEQ ID NO: 4214 - DNA, 492 bp, Artificial Sequence
  Description of Artificial Sequence: Synthetic polynucleotide
atgaatagcgcaggccgcgtccatcgttctagagcaggatctaggggccacgcggcaatttctcctttgacaatggcatctttcagtgttgcgaggggaattcgttcttccaatgtatatgacgacacagacgatgaattgtccatcttgacctttttcagcgccgttaggagaaaccgccttactagctctttgccgccgatcctctctgcaaggtgttcttctgcctgtttcagcgtgagaatagttttgcccttgtctttgacgatttccatcagcgctttgatgtattctacaaactctgcgttagggcgcaaactcaccggagcgttctctatacagactaacatcgaacaaagttgcgggtttttcaggaccagcatcatggcaactttaccacccattgagtgtcctattataatagggcctccattggtgtttaattcttgctttgtgataaagtgtttcacgtcttccgacatgacttcttga

SEQ ID NO: 4215 - DNA, 5688 bp, Saccharomyces cerevisiae
atgtcctacaacgatccaaacttgaatggacagtattacagtaacggtgatgggactggtgacggtaattaccctacgtaccaagtgacacaggatcaaagtgcgtacgatgagtacggtcagccaatctatacacaaaaccaactggatgatggttattatgatccaaacgaacaatacgttgacggtacacaatttcctcagggacaagatccttcacaagaccaaggtccttataataacgatgctagttactataaccaaccccccaatatgatgaacccgtcttctcaagatggagagaacttctcagattttagcagctatggtcccccatccggcacttatcctaacgatcaatatactccttctcaaatgagttatcctgatcaagatggttcttcaggggcctcaaccccctatggaaatggtgtcgttaatggtaatggccagtactacgaccctaatgctattgaaatggctttaccaaatgatccatatcccgcatggaccgcagatccccagtctcccctgcccatcgaacaaatcgaagatatcttcatagatttaacaaataaattcggttttcagagagattccatgagaaatatgtttgaccattttatgacccttttggactctagatcttctaggatgtctccagaacaggcccttttatcattacatgcagactacataggtggagatacggccaactacaaaaaatggtactttgccgctcaacttgatatggatgatgaaattggtttcaggaatatgaagttgggtaagctatcaagaaaggcaagaaaggctaagaagaaaaataaaaaagccatgcaagaggctagtcctgaagacactgaggagactttaaatcaaattgagggtgataactcattagaagctgcggattttagatggaagtcaaagatgaatcaactttctccatttgaaatggttcgtcaaattgccttgtttttattatgttggggcgaggcaaatcaagtcagatttaccccggagtgtctttgtttcatttataaatgcgcctctgattacttagattctgcacaatgtcaacaacgtcctgatcccttgcctgaaggtgattttttgaatagagttattactcctctttatcgttttattaggagccaggtttacgaaatcgtggatggtcgatacgtgaagagtgaaaaagatcataacaaagttattgggtatgatgatgtcaatcaattattctggtatccagaaggtatagcaaaaattgtcatggaagatggaaccaggttgattgatttgccagcagaggagcgttatttgaaattgggagaaattccctgggatgatgtcttctttaaaacttacaaagaaacacgttcctggttacatttagttaccaacttcaatcgtatttggatcatgcacatctcagtatattggatgtattgtgcttacaatgctccaactttttatactcacaactatcaacaattggtcgacaatcagcctttggcagcttataaatgggccactgcagcattaggtggtactgtggcaagtttgattcaagttgccgctactttgtgcgagtggtcattcgttcctagaaaatgggcgggtgctcaacatttgtcccgtagattctggttcttgtgtgtcattatgggtattaatttggggcctgtgatatttgttttcgcttatgataaggacacagtatattctactgccgctcatgtcgttggagcagttatgttttttgttgctgtggcaacacttgttttcttttccgtaatgccattgggtggattatttacatcgtatatgaaaaagtccacaagaagttatgttgcctcacagaccttcaccgcatcttttgctccattgcatggtttagacaggtggatgtcttatttggtttgggtaaccgtttttgctgctaaatatgcagagtcatatttttttctaatactgtcactaagagatccaattaggattttatctactacatcaatgagatgtactggtgaatactggtggggtaataagatttgtaaggtccagccaaagattgttttaggtttaatgattgcgactgacttcattttgttctttttggatacctacttgtggtatatcgttgttaacactgttttctcggtcggaaaatcgttctatttgggtatttctatcttaactccatggagaaatattttcactagattgccaaaaagaatttattctaagatcttggctactactgatatggaaataaaatataaaccgaaagtactaatttctcagatttggaatgctatcattatctccatgtacagagaacatttattagccatagaccatgtacaaaaattgttatatcatcaggttccgtccgaaattgaaggtaagaggactttgagagcaccaactttctttgtttcccaagatgacaataattttgagactgaatttttccctagagattcagaagctgagcgccgtatttcattttttgcccaatctctatccactccaattccagaaccactaccagttgacaacatgccaacatttactgtattaactccccattacgccgagaggattctattatcattgagagaaattattcgtgaagatgatcaattttcaagagttactcttttggaatacctgaagcaattacacccggtagaatgggactgttttgttaaggatacgaaaattcttgctgaagaaacggccgcatatgaaaacaatgaagatgaacctgaaaaggaagacgctctgaaatctcaaattgatgatttacctttctattgtattggtttcaaatctgctgcaccagaatacaccttacgtacgagaatctgggcctctttaaggtcgcaaactttgtatcgcacaatctcggggtttatgaattattcgagggccataaaattactttatcgtgtggaaaatccagaaatcgttcaaatgttcggtggtaatgctgatggattagaaagagaactggaaaaaatggcaaggcgaaaattcaaattcttggtttcgatgcaaagattggccaagtttaaaccacatgaactagaaaatgctgagttcctgttgagagcttatccggacttgcaaattgcctacctggatgaagaacctcccttaaacgaaggcgaagagccaagaatttactcggccttaattgatggtcattgtgagattttagagaatggtcgtagacgtcccaaatttagagttcaactatccggtaatccaattcttggtgatggtaaatcagataatcaaaatcatgctttgattttttacagaggtgagtatattcaattgattgatgctaatcaagacaattacttggaagagtgtttgaaaatcaggtctgtcttagcagaatttgaagaattgggaattgagcaaattcatccttatactcctggtttaaaatatgaggaccaatccacaaatcatcctgttgcaattgtcggcgctagagaatatattttctcagaaaactctggtgttcttggtgatgtagcggctggtaaagaacaaacttttggtacattatttgcccgtactttggcacagattggtggtaaattgcattatggtcatccagattttattaatgcgacattcatgactactaggggtggtgtttccaaagcacaaaagggtctacatttaaatgaagatatttatgccggtatgaatgccgtacttcggggtggtcgtatcaagcattgcgaatattatcagtgtggtaaaggtagagatttaggttttggtacaattttgaatttcactactaagatcggtgctggtatgggtgaacaaatgttatctcgtgaatactattatttgggtacgcaattacctattgaccgttttttaacattttattatgcgcatccagggtttcacttgaataacttatttattcaattgtctctgcagatgttcatgttaactttagtgaacttgcatgctttggctcatgaatccattctgtgtgtttacgatagggataagccaattactgatgttttgtatccaattggttgttacaactttcatcctgcgattgattgggtgagacgttatacactctctattttcatcgtcttttggattgcttttgtccctattgtcgttcaggaattaatcgagcgtggtctgtggaaggcgacacaaagatttttccgtcacattttatctctatctccaatgtttgaagtctttgctggccaaatctattcttcagcactgttaagtgatatcgctgtgggtggtgctcgttatatttcaacaggtcgtggctttgctacatctcgtatacctttctctattctttattcaagatttgcgggttcagccatttatatgggatcaagatcaatgttgatgttattatttggtaccgtggcacattggcaagctccactattatggttttgggcatcattatcagccttaatctttgcaccattcattttcaatccacatcaatttgcttgggaagattttttcctagactacagagattatatcagatggctgtcaagaggtaataataagtaccacaggaactcatggattggttatgtaagaatgtcgaggtctcgtgttactggtttcaagcgcaaactggtgggtgatgagtctgaaaaatctgcaggcgatgcaagcagggctcatagaaccaatttaattatggctgaaattataccgtgtgcgatttacgcagcaggttgttttattgccttcacgtttattaatgcacaaactggtgtcaagactactgatgaagatagagtaaattccaccttacgtatcatcatttgcaccttggcgcctattgttatcgatattggtgttttattcttctgtatgggtttgtcatgctgctctggccctttgttgggcatgtgctgcaagaaaactggttctgttatggcagggatcgctcacggtatcgctgttgttgtccatattgtctttttcattgtcatgtgggttttagagggttttagttttgttaggatgttgattggcgttgttacatgtatacaatgtcaaaggttgatttttcactgtatgactgtactgttgctgacccgtgagttcaagaatgatcacgctaatactgccttttggacaggcaaatggtacagcaccggtttaggatatatggcatggactcaaccgacaagggaattgactgcaaaagtcattgagctttccgagtttgcagcggattttgttttggggcatgtaattttgatcttccaactaccagtcatttgtattccaaagatagataagtttcactccatcatgttattttggttaaaaccatcccgtcaaatccgtcctcctatttactctttgaaacaagcacgcctacgtaaacgtatggttaggaggtattgcagcttgtactttttggtactgatcatattcgcgggatgcatcgttggccctgccgttgcttcagcacatgttccaaaagaccttggatctgggttgacgggtactttccataacttggttcaaccaaggaacgtatctaacaatgatacagggtcccagatgtctacttataagagtcattattacactcatacgccatccttaaagacctggtctacgatcaaatga

SEQ ID NO: 4216 - DNA, 5688 bp, Artificial Sequence
  Description of Artificial Sequence: Synthetic polynucleotide
atgtcctacaacgatccaaacttgaatggacagtattacagtaacggtgatgggactggtgacggtaattaccctacgtaccaagtgacacaggatcaaagtgcgtacgatgagtacggtcagccaatctatacacaaaaccaattggatgatggttattatgatccaaacgaacaatacgttgacggtacacaatttcctcagggacaagatccttctcaagaccaaggtccttataataacgatgctagttactataaccaaccccccaatatgatgaacccgtcttctcaagatggagagaacttcagtgattttagcagctatggtcccccatccggcacttatcctaacgatcaatatactccttctcaaatgagttatcctgatcaagatggttcttctggggccagcaccccctatggaaatggtgtcgttaatggtaatggccagtactacgaccctaatgctattgaaatggctttaccaaatgatccatatcccgcatggaccgcagatccccagtctcccttgcccatcgaacaaatcgaagatatcttcatagatttaacaaataaattcggttttcagagagattccatgagaaatatgtttgaccattttatgacccttttggactctagatcttctaggatgtctccagaacaggcccttttatctttacatgcagactacataggtggagatacggccaactacaaaaaatggtactttgccgctcaacttgatatggatgatgaaattggtttcaggaatatgaagttgggtaagttatctagaaaggcaagaaaggctaagaagaaaaataaaaaagccatgcaagaggctagtcctgaagacactgaggagactttaaatcaaattgagggtgataactctttagaagctgcggattttagatggaagtccaagatgaatcaactttctccatttgaaatggttcgtcaaattgccttgtttttattatgttggggcgaggcaaatcaagtcagatttaccccggagtgtctttgtttcatttataaatgcgcctctgattacttagattctgcacaatgtcaacaacgtcctgatcccttgcctgaaggtgattttttgaatagagttattactcctctttatcgttttattaggagccaggtttacgaaatcgtggatggtagatacgtgaagagtgaaaaagatcataacaaagttattgggtatgatgatgtcaatcaattattctggtatccagaaggtatagcaaaaattgtcatggaagatggaaccaggttgattgatttgccagcagaggagcgttatttgaaattgggagaaattccctgggatgatgtcttctttaaaacttacaaagaaacacgttcctggttacatttagttaccaacttcaatcgtatttggatcatgcacatctctgtatattggatgtattgtgcttacaatgctccaactttttatactcacaactatcaacaattggtcgacaatcagcctttggcagcttataaatgggccactgcagcattaggtggtactgtggcaagtttgattcaagttgccgctactttgtgcgagtggagtttcgttcctagaaaatgggcgggtgctcaacatttgtcccgtagattctggttcttgtgtgtcattatgggtattaatttggggcctgtgatatttgttttcgcttatgataaggacacagtatattctactgccgctcatgtcgttggagcagttatgttttttgttgctgtggcaacacttgttttcttttccgtaatgccattgggtggattatttacatcttatatgaaaaagtccacaagaagttatgttgcctctcagaccttcaccgcatcttttgctccattgcatggtttagacaggtggatgtcttatttggtttgggtaaccgtttttgctgctaaatatgcagagtcttatttttttttaatattaagtttgagagatccaattaggattttatctactacatctatgagatgtactggtgaatactggtggggtaataagatttgtaaggtccagccaaagattgttttaggtttaatgattgcgactgacttcattttgttctttttggatacctacttgtggtatatcgttgttaacactgttttctctgtcggaaaatctttctatttgggtatttctatcttaactccatggagaaatattttcactagattgccaaaaagaatttattctaagatcttggctactactgatatggaaataaaatataaaccgaaagtacttatttctcagatttggaatgctatcattatctccatgtacagagaacatttattagccatagaccatgtacaaaaattgttatatcatcaggttccgtccgaaattgaaggtaagaggactttgagagcaccaactttctttgtttcccaagatgacaataattttgagactgaatttttccctagagattctgaagctgagcgccgtatttccttttttgcccaatctttatccactccaattccagaaccattaccagttgacaacatgccaacatttactgtattaactccccattacgccgagaggattttattatctttgagagaaattattcgtgaagatgatcaattttccagagttactcttttggaatacttgaagcaattacacccggtagaatgggactgttttgttaaggatacgaaaattcttgctgaagaaacggccgcatatgaaaacaatgaagatgaacctgaaaaggaagacgctttgaaatctcaaattgatgatttacctttctattgtattggtttcaaatctgctgcaccagaatacaccttacgtacgagaatctgggcctctttaaggtctcaaactttgtatcgcacaatctctgggtttatgaattattctagggccataaaattactttatcgtgtggaaaatccagaaatcgttcaaatgttcggtggtaatgctgatggattagaaagagaattggaaaaaatggcaaggagaaaattcaaattcttggtttctatgcaaagattggccaagtttaaaccacatgaattggaaaatgctgagttcttgttgagagcttatccggacttgcaaattgcctacttggatgaagaacctcccttaaacgaaggcgaagagccaagaatttactctgccttaattgatggtcattgtgagattttagagaatggtcgtagacgtcccaaatttagagttcaattatccggtaatccaattcttggtgatggtaaatctgataatcaaaatcatgctttgattttttacagaggtgagtatattcaattgattgatgctaatcaagacaattacttggaagagtgtttgaaaatcaggtctgtcttagcagaatttgaagaattgggaattgagcaaattcatccttatactcctggtttaaaatatgaggaccaatccacaaatcatcctgttgcaattgtcggcgctagagaatatattttctctgaaaactctggtgttcttggtgatgtagcggctggtaaagaacaaacttttggtacattatttgcccgtactttggcacagattggtggtaaattgcattatggtcatccagattttattaatgcgacattcatgactactaggggtggtgtttccaaagcacaaaagggtttgcatttaaatgaagatatttatgccggtatgaatgccgtacttcgtggtggtcgtatcaagcattgcgaatattatcagtgtggtaaaggtagagatttaggttttggtacaattttgaatttcactactaagatcggtgctggtatgggtgaacaaatgttatctcgtgaatactattatttgggtacgcaattacctattgaccgttttttaacattttattatgcgcatccagggtttcacttgaataacttatttattcaattgtctttgcagatgttcatgttaactttagtgaacttgcatgctttggctcatgaatccattctttgtgtttacgatagggataagccaattactgatgttttgtatccaattggttgttacaactttcatcctgcgattgattgggtgagacgttatacactctctattttcatcgtcttttggattgcttttgtccctattgtcgttcaggaattaatcgagcgtggtttatggaaggcgacacaaagatttttccgtcacattttatctttatctccaatgtttgaagtctttgctggccaaatctattcttctgcattattaagtgatatcgctgtgggtggtgctcgttatatttctacaggtcgtggctttgctacatctcgtatacctttctctattctttattctagatttgcgggttctgccatttatatgggaagcagaagtatgttgatgttattatttggtaccgtggcacattggcaagctccattattatggttttgggcatctttatctgccttaatctttgcaccattcattttcaatccacatcaatttgcttgggaagattttttcttggactacagagattatatcagatggttatctagaggtaataataagtaccacaggaacagttggattggttatgtaagaatgtctaggtctcgtgttactggtttcaagcgcaaattagtgggtgatgagtctgaaaaatctgcaggcgatgcaagcagggctcatagaaccaatttaattatggctgaaattataccgtgtgcgatttacgcagcaggttgttttattgccttcacgtttattaatgcacaaactggtgtcaagactactgatgaagatagagtaaattccaccttacgtatcatcatttgcaccttggcgcctattgttatcgatattggtgttttattcttctgtatgggtttgtcttgctgctctggccctttgttgggcatgtgctgcaagaaaactggttctgttatggcagggatcgctcacggtatcgctgttgttgtccatattgtctttttcattgtcatgtgggttttagagggttttagttttgttaggatgttgattggcgttgttacatgtatacaatgtcaaaggttgatttttcactgtatgactgtacttttgttgacccgtgagttcaagaatgatcacgctaatactgccttttggacaggcaaatggtacagcaccggtttaggatatatggcatggactcaaccgacaagggaattgactgcaaaagtcattgagctttccgagtttgcagcggattttgttttggggcatgtaattttgatcttccaattaccagtcatttgtattccaaagatagataagtttcactccatcatgttattttggttaaaaccatcccgtcaaatccgtcctcctatttactctttgaaacaagcacgccttcgtaaacgtatggttaggaggtattgcagcttgtactttttggtattgatcatattcgcgggatgcatcgttggccctgccgttgcttctgcacatgttccaaaagaccttggatctgggttgacgggtactttccataacttggttcaaccaaggaacgtatctaacaatgatacagggtcccagatgtctacttataagagtcattattacactcatacgccatccttaaagacctggtctacgatcaaatga

SEQ ID NO: 4217 - DNA, 720 bp, Saccharomyces cerevisiae
atgagctcaagtttgcctaggtctttactccgtttaggacatagaaagcctttgtttccacgatataatactttcgtgaactcatcggtaataactcatacgtcactgcttagaacaagattatatagtaatggcaccggcgcaacatcaggaaagaaggatgacaagactaggaataaacctaagccattatggcctcaagtaaaatccgcttctacgttcaccttttctggcatacttgtgataggagctgttggtatatctgctattgttatttacctaattctttcagaactattttcgccttcaggtgatacacagcttttcaacagagcagtttctatggtagagaaaaacaaagatataagaagtttgttacagtgcgacgatggcattacgggaaaagaaagattgaaagcgtacggtgagcttataacgaatgacaaatggacaagaaacaggcctatagtatctaccaaaaaattagataaagaaggtaggacacatcactatatgagattccacgttgaatccaaaaagaaaatagcgttggttcacttagaggctaaagaatccaaacagaattatcaacctgactttatcaacatgtacgttgatgttcccggagagaagcgttactatttgatcaagccaaaattgcatccggtttctaattcgaagggctttctgggaattagatggggccccagaaaagattaa

SEQ ID NO: 4218 - DNA, 720 bp, Artificial Sequence
  Description of Artificial Sequence: Synthetic polynucleotide
atgagcagtagtttgcctaggtctttactccgtttaggacatagaaagcctttgtttccaagatataatactttcgtgaactcttctgtaataactcatacgtccttacttagaacaagattatatagtaatggcaccggcgcaacatctggaaagaaggatgacaagactaggaataaacctaagccattatggcctcaagtaaaatccgcttctacgttcaccttttctggcatacttgtgataggagctgttggtatatctgctattgttatttacttgattctttctgaattattttctccttctggtgatacacagcttttcaacagagcagtttctatggtagagaaaaacaaagatataagaagtttgttacagtgcgacgatggcattacgggaaaagaaagattgaaagcgtacggtgagcttataacgaatgacaaatggacaagaaacaggcctatagtatctaccaaaaaattagataaagaaggtaggacacatcactatatgagattccacgttgaatccaaaaagaaaatagcgttggttcacttagaggctaaagaatccaaacagaattatcaacctgactttatcaacatgtacgttgatgttcccggagagaagcgttactatttgatcaagccaaaattgcatccggtttctaattctaagggctttttgggaattagatggggccccagaaaagattga

SEQ ID NO: 4219 - DNA, 384 bp, Saccharomyces cerevisiae
atggctaagcaatctctagacgtttcctctgacagaagaaaggccagaaaggcttatttcactgctccatcctctgaacgtcgtgttttgttatctgctccattatccaaggaattgagagctcaatatggtatcaaggctttgccaatcagaagagacgatgaagtcttggttgttcgtggttccaagaagggtcaagaaggtaagatttcatctgtttacagattgaagtttgctgttcaagttgacaaggtcaccaaggaaaaggtcaacggtgcttccgttccaattaacttgcacccatccaagcttgttatcactaagttacacttggacaaggacagaaaggctttgatccaaagaaagggtggtaaattggaataa

SEQ ID NO: 4220 - DNA, 384 bp, Artificial Sequence
  Description of Artificial Sequence: Synthetic polynucleotide
atggctaagcaatctttggacgtttcctctgacagaagaaaggccagaaaggcttatttcactgctccatcctctgaacgtcgtgttttgttatctgctccattatccaaggaattgagagctcaatatggtatcaaggctttgccaatcagaagagacgatgaagtcttggttgttcgtggttccaagaagggtcaagaaggtaagatttcttctgtttacagattgaagtttgctgttcaagttgacaaggtcaccaaggaaaaggtcaacggtgcttccgttccaattaacttgcacccatccaagcttgttatcactaagttacacttggacaaggacagaaaggctttgatccaaagaaagggtggtaaattggaatga

SEQ ID NO: 4221 - DNA, 351 bp, Saccharomyces cerevisiae
atgttactcacaccagccaagactacaagaacggaagactcagcaaactcaacagatgacagcagtaaaagcagtaattcattcatgcgtgccatagtttcttcccttatggttaagcccataacatctctgactaatacagtcacatgcagacaaagttcccatcacaatagctctccaagtaaaatcacaagatatgatttaatcaaagctgctgctgaaaatgacttgaaaaggagtaagtctcagggacgagaaaaatccagaagaaactctaatcgtagaaataatgaagaaatttttgtggccaatactgcttcagaaatccaacggactaaaagtagcatatag

SEQ ID NO: 4222 - DNA, 351 bp, Artificial Sequence
  Description of Artificial Sequence: Synthetic polynucleotide
atgttactcacaccagccaagactacaagaacggaagactctgcaaactccacagatgacagcagtaaaagcagtaattctttcatgcgtgccatagtttcttcccttatggttaagcccataacatctttgactaatacagtcacatgcagacaaagttcccatcacaatagctctccaagtaaaatcacaagatatgatttaatcaaagctgctgctgaaaatgacttgaaaaggagtaagtctcagggaagagaaaaatccagaagaaactctaatcgtagaaataatgaagaaatttttgtggccaatactgcttctgaaatccaaagaactaaaagtagcatatga

SEQ ID NO: 4223 - DNA, 222 bp, Saccharomyces cerevisiae
atgttgctatatttatatattttatatattgccctcaaaactgtatctcatctttttttctgcaatccttgctttcgtaatctaagtgtgggtgacatgctaaatccgcggctttccttaagctttttcacaaaccatctattatgtccagaagctccgctgattatccgtggaaaagggtcttattctgccgtaggaaacttcttctcgagaaaaaagtga

SEQ ID NO: 4224 - DNA, 222 bp, Artificial Sequence
  Description of Artificial Sequence: Synthetic polynucleotide
atgttgttatatttatatattttatatattgccctcaaaactgtatctcatctttttttctgcaatccttgctttcgtaatttgagtgtgggtgacatgttgaatccgaggctttccttaagctttttcacaaaccatcttttatgtccagaagctccgttgattatccgtggaaaagggtcttattctgccgtaggaaacttcttcagtagaaaaaagtga

SEQ ID NO: 4225 - DNA, 720 bp, Saccharomyces cerevisiae
atgaatagtaccgccgctgcaataaatccaaatccaaatgttataccattcgatgacacatacattctctatgattcgcatgactttctatcattccttagtgcatatttctcgctgatgcccatcctagtgctagctttttatttgtcgtggtttatcatcacaagagagttagaagcctgcattgtagcctttggccaattgatgaacgaaatattcaataacgtgatcaagaatataataaaacagccacgccccgtatcgttcggtgcgtcgttccaaaatgacactataagatccggttacgggatgcccagtgcacactcccaattcatggggttttgttttacctataactctctgaagatatacacttcctggaagaatctaaacttcttagaaaaatgcattttttctggtgcattggctttattatcgttttgcgtttgcttttccagagtttacttgcactaccacaatttagatcaagtaatcgtgggattcagcgtgggggcactgactggatcactttatttttttatagttggcatcataagagagcttggtttaatcaattggtttttaaaactacgtattgtcagattattttacatgacagattcttacaatctggcgcctttgacattgaaagagaattacgaggcgtattggaaaagaataaatcagcgatctttcaatgataaatccaaaagggattag

SEQ ID NO: 4226 - DNA, 720 bp, Artificial Sequence
  Description of Artificial Sequence: Synthetic polynucleotide
atgaatagtaccgccgctgcaataaatccaaatccaaatgttataccattcgatgacacatacattctctatgattctcatgactttttatctttccttagtgcatatttctccttgatgcccatcttagtgttggctttttatttgtcctggtttatcatcacaagagagttagaagcctgcattgtagcctttggccaattgatgaacgaaatattcaataacgtgatcaagaatataataaaacagccacgccccgtatctttcggtgcgtctttccaaaatgacactataagatccggttacgggatgcccagtgcacactcccaattcatggggttttgttttacctataactctttgaagatatacacttcctggaagaatttgaacttcttagaaaaatgcattttttctggtgcattggctttattatctttttgcgtttgcttttccagagtttacttgcactaccacaatttagatcaagtaatcgtgggattcagcgtgggggcattgactggatctctttatttttttatagttggcatcataagagagcttggtttaatcaattggtttttaaaattacgtattgtcagattattttacatgacagattcttacaatttggcgcctttgacattgaaagagaattacgaggcgtattggaaaagaataaatcagagatctttcaatgataaatccaaaagggattga

SEQ ID NO: 4227 - DNA, 264 bp, Saccharomyces cerevisiae
atggtttcccaattattcgaagaaaaagctaaagccgtcaacgagctaccaacgaagccctccactgatgaattattagaattgtatgctctgtacaagcaagccactgtaggtgacaacgacaaggaaaagcctggtattttcaacatgaaggaccgctacaagtgggaagcctgggaaaacttaaaaggtaaatcccaggaagatgccgaaaaggaatacattgcccttgttgatcaactgattgccaagtactcctcttag

SEQ ID NO: 4228 - DNA, 264 bp, Artificial Sequence
  Description of Artificial Sequence: Synthetic polynucleotide
atggtttcccaattattcgaagaaaaagctaaagccgtcaacgagttaccaacgaagccctccactgatgaattattagaattgtatgctttgtacaagcaagccactgtaggtgacaacgacaaggaaaagcctggtattttcaacatgaaggaccgctacaagtgggaagcctgggaaaacttaaaaggtaaatcccaggaagatgccgaaaaggaatacattgcccttgttgatcaattgattgccaagtactcctcttga

SEQ ID NO: 4229 - DNA, 669 bp, Saccharomyces cerevisiae
atgaccgaattagattatcaaggaactgctgaggcggcttctacctcgtatagtcgaaatcaaacggaccttaagccgtttccttctgcaggcagtgcatcttcatcaattaaaacgacggaacctgtgaaagatcatagaagaaggcgttcttccagcataatttcacatgtggaaccggagacttttgaagatgaaaatgaccagcaacttctaccaaatatgaatgctacttgggtagaccaacgcggcgcttggattattcatgtggtcattatcatactgctgaaactattttataatttatttcctggtgttaccacagaatggtcgtggactctgactaatatgacatatgttattgggtcctatgtcatgttccatctgattaagggtacccctttcgatttcaatggtggtgcttatgacaacttgacgatgtgggaacaaattgacgacgagactttatatactccttcaagaaaatttttgattagtgtcccgatcgccctattcttagttagtactcattatgctcactatgatttgaaattgttttcatggaattgttttttgacaacctttggtgctgttgtcccaaagttacctgttactcatagattaaggatttctatcccaggtatcacaggtcgcgcccaaattagttga

SEQ ID NO: 4230 - DNA, 669 bp, Artificial Sequence
  Description of Artificial Sequence: Synthetic polynucleotide
atgaccgaattagattatcaaggaactgctgaggcggcttctacctcttatagtagaaatcaaacggaccttaagccgtttccttctgcaggcagtgcatcttcttccattaaaacgacggaacctgtgaaagatcatagaagaaggcgttcttccagcataatttctcatgtggaaccggagacttttgaagatgaaaatgaccagcaacttttaccaaatatgaatgctacttgggtagaccaacgcggcgcttggattattcatgtggtcattatcatattattgaaattattttataatttatttcctggtgttaccacagaatggtcctggactttaactaatatgacatatgttattgggtcctatgtcatgttccatttgattaagggtacccctttcgatttcaatggtggtgcttatgacaacttgacgatgtgggaacaaattgacgacgagactttatatactccttccagaaaatttttgattagtgtcccgatcgcccttttcttagttagtactcattatgctcactatgatttgaaattgttttcttggaattgttttttgacaacctttggtgctgttgtcccaaagttacctgttactcatagattaaggatttctatcccaggtatcacaggtcgcgcccaaattagttga

SEQ ID NO: 4231 - DNA, 312 bp, Saccharomyces cerevisiae
atgttattttttaccggcttagtaatactgagctacttacttgggggaaagaaagattggctacttattatgtatgaagcctcagattaccttgaattcctcaaccgtttgagcagtatgctcttcaaattcgaactttttgaacatctttcctccacattcctgattttttcacattcaaaacgcgctgtgaagctgttagaaatttacagatcgaggcatatttctatatataatgtatttttattaagacacccaaagtacttccaatctgtagatattgcactttatctgaccagaagccagacttga

SEQ ID NO: 4232 - DNA, 312 bp, Artificial Sequence
  Description of Artificial Sequence: Synthetic polynucleotide
atgttattttttaccggcttagtaatattaagctacttacttgggggaaagaaagattggttacttattatgtatgaagcctctgattaccttgaattcctcaaccgtttgagcagtatgctcttcaaattcgaactttttgaacatctttcctccacattcttgattttttctcattctaaacgcgctgtgaagcttttagaaatttacagaagtaggcatatttctatatataatgtatttttattaagacacccaaagtacttccaatctgtagatattgcactttatttgaccagaagccagacttga

SEQ ID NO: 4233 - DNA, 1107 bp, Saccharomyces cerevisiae
atggctagaaccataacttttgatatcccttcccaatataaactcgtagatttaataggtgagggagcgtacggaacagtatgttcagcaattcataagccttccggcataaaggtagctatcaagaaaatacaaccgtttagcaaaaaattgtttgttacaagaactatacgtgagatcaagcttttacggtatttccatgaacacgaaaacataataagtatattggataaagtaaggccagtatccatagacaaactaaacgctgtttatttagtcgaagagttgatggaaaccgatttacaaaaagtaattaataatcagaatagcgggttttccactttaagtgatgaccatgttcaatactttacataccaaatcctcagagccttaaagtctattcacagtgcacaagttatccatagagacataaagccatcaaacctgttactaaattccaattgtgatctcaaagtctgcgattttggactagcgaggtgtttagctagcagtagcgattcaagagaaacattggtaggattcatgacggagtacgtcgcaacgcgatggtacagggcacccgagataatgctaacttttcaagagtacacaactgcgatggatatatggtcatgcggatgcattttggctgaaatggtctccgggaagcctttgttcccaggcagagactatcatcatcaattatggctaattctagaagtcttgggaactccatctttcgaagactttaatcagatcaaatccaagagggctaaagagtatatagcaaacttacctatgaggccacccttgccatgggagaccgtctggtcaaagaccgatctgaatccagatatgatagatttactagacaaaatgcttcaattcaatcctgacaaaagaataagcgcagcagaagctttaagacacccttacctggcaatgtaccatgacccaagtgatgagccggaatatcctccacttaatttggatgatgaattttggaaactggataacaagataatgcgtccggaagaggaggaagaagtgcccatagaaatgctcaaagacatgctttacgatgaactaatgaagaccatggaatag

SEQ ID NO: 4234 - DNA, 1107 bp, Artificial Sequence
  Description of Artificial Sequence: Synthetic polynucleotide
atggctagaaccataacttttgatatcccttcccaatataaactcgtagatttaataggtgagggagcgtacggaacagtatgttctgcaattcataagccttccggcataaaggtagctatcaagaaaatacaaccgtttagcaaaaaattgtttgttacaagaactatacgtgagatcaagcttttaagatatttccatgaacacgaaaacataataagtatattggataaagtaaggccagtatccatagacaaattgaacgctgtttatttagtcgaagagttgatggaaaccgatttacaaaaagtaattaataatcagaatagcgggttttccactttaagtgatgaccatgttcaatactttacataccaaatcctcagagccttaaagtctattcacagtgcacaagttatccatagagacataaagccatctaacttattattgaattccaattgtgatctcaaagtctgcgattttggattagcgaggtgtttagctagcagtagcgattccagagaaacattggtaggattcatgacggagtacgtcgcaacgagatggtacagggcacccgagataatgttgacttttcaagagtacacaactgcgatggatatatggtcctgcggatgcattttggctgaaatggtctccgggaagcctttgttcccaggcagagactatcatcatcaattatggttgattttggaagtcttgggaactccatctttcgaagactttaatcagatcaaatccaagagggctaaagagtatatagcaaacttacctatgaggccacccttgccatgggagaccgtctggtccaagaccgatttgaatccagatatgatagatttattagacaaaatgcttcaattcaatcctgacaaaagaataagcgcagcagaagctttaagacacccttacttggcaatgtaccatgacccaagtgatgagccggaatatcctccacttaatttggatgatgaattttggaaattggataacaagataatgcgtccggaagaggaggaagaagtgcccatagaaatgctcaaagacatgctttacgatgaattgatgaagaccatggaatga

SEQ ID NO: 4235 - DNA, 1644 bp, Saccharomyces cerevisiae
atgacgaaaataaccagagatgtttcgataacgacagaaaattcaaaatccacatctggatcggcaacggcttcatccgcatctttacctgagaacgaccacccaatattccatcaaccgcgagcaagaataagatctggttcgctgttcatcgaaggatctgattcatttccatcatcagaagtgaagtcatacaatgtttatattgatgatagcaagtatagtgaaatcctcaaaggagatacaaattcaagtagtactgatggtaaacaagtctttgaagatgctagagatgacaatttccatcaggaatcacatagagatctagaggattcaattttagatttagtacgacgagatccagaagtagcagcattccctttacctccgccaaattcaaatgagaggaacagaaattcctcaaacgggtcttccgctgaaactaacctaaatggacacagcagcagcggtaccatctctacttcggtgctgttgaatatgggttcggcagaaaagcacgctgggacgaccagaggagatcatatggaatcatcttcaatgaaatccttcgagaaactgggaaccagaccttcttctttattctatccaccacccgaaggaactgcgccgtaccagggaccaagggctaccgtctccggaaataagtctacaaggcaaacacaaggtacatactcatttccttctatgcggtatggtgtagatcttgtttctcctgtggaaggggctgttgatgtagcaaaaagcagagttcctaacagcacgctaaatggtacttttcccgataaagcgtttatcccacatgaatttcaaattcctaaaaaggcctggaacagaataccagcgaataagtccactagcctcaaaaccccaagaaaccattccctattaattgacatattaaagccttttgaagcagctgaccttgctaatgaccagcgaagttcttccgctgttttaaaaaatacagtgcattctaatgggcagtataatccaactaatgaaacctctggaactcgaatgcaagatcaaaggcagaagaataccaacgaaattgatttagagaaaattcctaatcctcaagtccctcttggtatcgcaatggacaccatgcgtagtccaaaccaactacacgaaaaggaatacgaaagtaatatagaagctggtttagcttctggggtcggaaaaggtgacaatagtattaagcaacatcaatataaaaaaattcctcaagaaattgatcgagatcagcaattaagttttcaaatggaaacaatgcccattcaaagaatagattcctcctccatacgttcatttgattcccgaatatatggcttctccgagatttatagtattccaagggttataactacactgtgcatctgcctttttgttccgcccttattctttttcttttcaatcaatggaaataatggcgtttcaaattatagattaatgagaatgataatgaattatgaacatagaatcggcctcctcaaagggtttgaatgggacattgacgtacaatggttcaggacattgtgctttgtattaggatgtatagagatgttagctatctttgctagcataggaataggatttggtgtgggaataataagagagtaa

SEQ ID NO: 4236 - DNA, 1644 bp, Artificial Sequence
  Description of Artificial Sequence: Synthetic polynucleotide
atgacgaaaataaccagagatgtttctataacgacagaaaattctaaatccacatctggaagtgcaacggcttcttccgcatctttacctgagaacgaccacccaatattccatcaaccgagagcaagaataagatctggttctttattcatcgaaggatctgattcttttccatcttctgaagtgaagtcctacaatgtttatattgatgatagcaagtatagtgaaatcctcaaaggagatacaaatagtagtagtactgatggtaaacaagtctttgaagatgctagagatgacaatttccatcaggaaagtcatagagatttagaggattctattttagatttagtaaggagagatccagaagtagcagcattccctttacctccgccaaatagtaatgagaggaacagaaattccagtaacgggtcttccgctgaaactaacttgaatggacacagcagcagcggtaccatctctacttctgtgttattgaatatgggttctgcagaaaagcacgctgggacgaccagaggagatcatatggaaagctcttctatgaaatccttcgagaaattaggaaccagaccttcttctttattctatccaccacccgaaggaactgcgccgtaccagggaccaagggctaccgtctccggaaataagtctacaaggcaaacacaaggtacatactcttttccttctatgagatatggtgtagatcttgtttctcctgtggaaggggctgttgatgtagcaaaaagcagagttcctaacagcacgttgaatggtacttttcccgataaagcgtttatcccacatgaatttcaaattcctaaaaaggcctggaacagaataccagcgaataagtccactagcctcaaaaccccaagaaaccattccttattaattgacatattaaagccttttgaagcagctgaccttgctaatgaccagagaagttcttccgctgttttaaaaaatacagtgcattctaatgggcagtataatccaactaatgaaacctctggaactagaatgcaagatcaaaggcagaagaataccaacgaaattgatttagagaaaattcctaatcctcaagtccctcttggtatcgcaatggacaccatgcgtagtccaaaccaattacacgaaaaggaatacgaaagtaatatagaagctggtttagcttctggggtcggaaaaggtgacaatagtattaagcaacatcaatataaaaaaattcctcaagaaattgatagagatcagcaattaagttttcaaatggaaacaatgcccattcaaagaatagattcctcctccatacgttcttttgattccagaatatatggcttctccgagatttatagtattccaagggttataactacattgtgcatctgcctttttgttccgcccttattctttttcttttctatcaatggaaataatggcgtttctaattatagattaatgagaatgataatgaattatgaacatagaatcggcctcctcaaagggtttgaatgggacattgacgtacaatggttcaggacattgtgctttgtattaggatgtatagagatgttagctatctttgctagcataggaataggatttggtgtgggaataataagagagtga

SEQ ID NO: 4237 - DNA, 816 bp, Saccharomyces cerevisiae
atgctctctcatatcgttgagtatgaatgccaatacactgatcagctttacaagaaacgtaaaatctggcacgatggtagactgaaatactttcagttaaacaacagattcatgctttatacggaaaaggataacgttttgttagctagtgaatttaaaataaattcaaaagagctgaaagcaattctaaatccagaaggttttgatattgaagaacataggatttttagtcagtttttggtgattatttcaaatattattgaggagtacgatagagatattcaagtggcagcaacgcatgttagggcatatccttcaaatttgtcggtgcaaaaacaacgccctcttatctcagacaatgcaccaagtttgaatcatatctcaactgcgagagaagttcattcgaacataaaagtcacaactcccaatcgcaagcagacagaggacaatgccaccaagggaggattcaacatcagcaaacttactctgaaggtcaataagcctttcaagaagcccaagaggatattaagtactaatgtggtaaatgaatcaaatagaccgagcataaggagccaaaagattcaggaagtgacaccacaactacacgaaacaaacacaagcactaaagtgcagacagccggaaaagttgcgttgaataatgataatattgcgcaaggtaattacgccacgattaccgaagaagctaaagtcagagacggttccgacagaaagaaagatatggcgaacctatccaaaagtggtaaaaggagagtgggcgggatacgaagaattgttcacgaacccctcggaatttga

SEQ ID NO: 4238 - DNA, 816 bp, Artificial Sequence
  Description of Artificial Sequence: Synthetic polynucleotide
atgctctctcatatcgttgagtatgaatgccaatacactgatcagctttacaagaaacgtaaaatctggcacgatggtagattgaaatactttcagttaaacaacagattcatgctttatacggaaaaggataacgttttgttagctagtgaatttaaaataaattctaaagagttgaaagcaattttgaatccagaaggttttgatattgaagaacataggatttttagtcagtttttggtgattatttctaatattattgaggagtacgatagagatattcaagtggcagcaacgcatgttagggcatatccttccaatttgtctgtgcaaaaacaacgccctcttatcagtgacaatgcaccaagtttgaatcatatctctactgcgagagaagttcattccaacataaaagtcacaactcccaatcgcaagcagacagaggacaatgccaccaagggaggattcaacatcagcaaacttactttgaaggtcaataagcctttcaagaagcccaagaggatattaagtactaatgtggtaaatgaaagtaatagaccgagcataaggagccaaaagattcaggaagtgacaccacaattacacgaaacaaacacaagcactaaagtgcagacagccggaaaagttgcgttgaataatgataatattgcgcaaggtaattacgccacgattaccgaagaagctaaagtcagagacggttccgacagaaagaaagatatggcgaacctttccaaaagtggtaaaaggagagtgggcgggataagaagaattgttcacgaacccctcggaatttga

SEQ ID NO: 4239 - DNA, 1002 bp, Saccharomyces cerevisiae
atgtcagaaccttcagagaaaaaacaaaaagttgctacctcatctttagaacaattaaaaaaggccgggacccatgtggttgctgattcgggtgattttgaggctatttcgaagtatgaaccacaggattcaacaactaacccttctctgatattggctgcttcaaagttggagaaatatgcgaggtttatcgacgctgccgttgaatatggtagaaagcatggcaaaactgatcatgagaaaatcgagaacgccatggataagattttggtggaattcggcacccagattttgaaggtagtcccaggaagggtttccactgaagtagacgcaaggttatcttttgataagaaggcgacggtgaagaaggctctccacatcatcaaactatataaagatgcgggagtacctaaagaaagagtcttgatcaagatagcttctacgtgggagggtatccaagctgctagagaattggaagtaaagcatggtattcattgtaatatgacattactgttttcctttacgcaagcagtagcctgtgcggaggcaaatgtcacattgatctccccatttgttggaaggattatggacttttacaaggccctttcaggcaaagactatactgcagaaactgatcccggtgttctttctgttaagaagatatacagttactataagaggcatggttatgcaactgaggtaatggcggcttctttcaggaatttagatgaattgaaggcgttagccggtattgataatatgactctcccactgaaccttctagaacagttatatgaatcaacagatcctattgaaaacaaattgaattctgagagtgctaaggaagaaggcgtcgaaaaagtctcttttatcaacgacgagcctcatttcagatatgttttaaacgaagatcaaatggctacagaaaaactatcagatggtatcagaaaattctccgcagacattgaagcactgtacaaactggttgaagaaaaaatgtga

SEQ ID NO: 4240 - DNA, 1002 bp, Artificial Sequence
  Description of Artificial Sequence: Synthetic polynucleotide
atgtctgaaccttctgagaaaaaacaaaaagttgctacctcttctttagaacaattaaaaaaggccgggacccatgtggttgctgattctggtgattttgaggctatttccaagtatgaaccacaggattctacaactaacccttctttgatattggctgcttccaagttggagaaatatgcgaggtttatcgacgctgccgttgaatatggtagaaagcatggcaaaactgatcatgagaaaatcgagaacgccatggataagattttggtggaattcggcacccagattttgaaggtagtcccaggaagggtttccactgaagtagacgcaaggttatcttttgataagaaggcgacggtgaagaaggctctccacatcatcaaactttataaagatgcgggagtacctaaagaaagagtcttgatcaagatagcttctacgtgggagggtatccaagctgctagagaattggaagtaaagcatggtattcattgtaatatgacattacttttttcctttacgcaagcagtagcctgtgcggaggcaaatgtcacattgatctccccatttgttggaaggattatggacttttacaaggccctttctggcaaagactatactgcagaaactgatcccggtgttctttctgttaagaagatatacagttactataagaggcatggttatgcaactgaggtaatggcggcttctttcaggaatttagatgaattgaaggcgttagccggtattgataatatgactctcccattgaaccttttagaacagttatatgaatctacagatcctattgaaaacaaattgaattctgagagtgctaaggaagaaggcgtcgaaaaagtctcttttatcaacgacgagcctcatttcagatatgttttaaacgaagatcaaatggctacagaaaaattaagtgatggtatcagaaaattctccgcagacattgaagcattgtacaaattggttgaagaaaaaatgtga

SEQ ID NO: 4241 - DNA, 903 bp, Saccharomyces cerevisiae
atgtcaccgtgttatggacaaaacagtgccatcgccaaggggtcttggaacagagaggttttacaagaggtgcaaccgatttatcattggcacgatttcgggcaaaacatgaaagaatattcggcatcacccttagagggggattccagcctgccttccagcctgccttccagcactgaggactgtttactactatcattagaaaacacaatcacagttatagccggaaatcagagacaggcttatgactctacgtcgtctactgaggaaggtacagcacctcaattacggccggatgaaatagcggacagtacacactgtatcacgtcattagttgatccggagttcagagatcttattaattatggacgtcaaaaaggagcaaatcctgtatttattgagagcaatacaacagaacaatcccattcacagtgtattctaggctatccccaaaaatcgcacgtggcacagctatatcacgaccccaaagtactcagcacaatttccgaagggcaaacaaaaagaggaagttaccactgttctcattgttctgaaaagttcgcaacgttagttgagtttgccgcgcacttagacgaattcaaccttgaaagaccgtgtaagtgtcccatagagcaatgtccctggaaaatattgggtttccaacaagcaactggtctgagaagacattgtgcttcccaacatataggagagcttgatatagagatggagaaatcattaaatctaaaagtagaaaaatatccaggactgaattgcccatttcctatctgtcagaaaacgtttaggcgcaaagacgcctataagagacatgtggccatggtgcataacaacgctgattcaagatttaacaagcgtttgaagaaaattttgaacaataccaaatag

SEQ ID NO: 4242 - DNA, 903 bp, Artificial Sequence
  Description of Artificial Sequence: Synthetic polynucleotide
atgtctccgtgttatggacaaaacagtgccatcgccaaggggtcttggaacagagaggttttacaagaggtgcaaccgatttatcattggcacgatttcgggcaaaacatgaaagaatattctgcatctcccttagagggggattccagcttaccttccagcttaccttccagcactgaggactgtttattattatctttagaaaacacaatcacagttatagccggaaatcagagacaggcttatgactctacgtcttctactgaggaaggtacagcacctcaattaagaccggatgaaatagcggacagtacacactgtatcacgtctttagttgatccggagttcagagatcttattaattatggacgtcaaaaaggagcaaatcctgtatttattgagagcaatacaacagaacaatcccattctcagtgtattttgggctatccccaaaaatctcacgtggcacagttatatcacgaccccaaagtactcagcacaatttccgaagggcaaacaaaaagaggaagttaccactgttctcattgttctgaaaagttcgcaacgttagttgagtttgccgcgcacttagacgaattcaaccttgaaagaccgtgtaagtgtcccatagagcaatgtccctggaaaatattgggtttccaacaagcaactggtttaagaagacattgtgcttcccaacatataggagagcttgatatagagatggagaaatctttaaatttgaaagtagaaaaatatccaggattgaattgcccatttcctatctgtcagaaaacgtttaggcgcaaagacgcctataagagacatgtggccatggtgcataacaacgctgattccagatttaacaagcgtttgaagaaaattttgaacaataccaaatga

SEQ ID NO: 4243 - DNA, 363 bp, Saccharomyces cerevisiae
atgtcacagattacatcaaaaggtcggcgtatactggataagaaaatccgaacttttccggtgggctttaccagcagaaaagtggccgggcatgtattaaatatatcaccgtattttctgctggctttttcttatgcagagaacaaaggccagagtgccttcgaggaaattaaagggagcaatgtgatagatatgtcctgtgtcatttgcttcaatttttcctgccatttatttgtagttatatttatatctagatcaaccgaaactataccaacgacgaagctgcttcttagtaaatatattttctactgtgtcaacgcattggaactgacattgttcttatcctataagtcatacagttga

SEQ ID NO: 4244 - DNA, 363 bp, Artificial Sequence
  Description of Artificial Sequence: Synthetic polynucleotide
atgtctcagattacaagtaaaggtcgtcgtatattggataagaaaatcagaacttttccggtgggctttaccagcagaaaagtggccgggcatgtattaaatatatctccgtattttttattagctttttcttatgcagagaacaaaggccagagtgccttcgaggaaattaaagggagcaatgtgatagatatgtcctgtgtcatttgcttcaatttttcctgccatttatttgtagttatatttatatctagatctaccgaaactataccaacgacgaagcttcttcttagtaaatatattttctactgtgtcaacgcattggaattaacattgttcttatcctataagtcctacagttga

SEQ ID NO: 4245 - DNA, 1158 bp, Saccharomyces cerevisiae
atgttacgagtttctgaaaatggtctacggtttctgctgaaatgccattcaacgaacgtaagcatgtttaataggcttctgagtactcaaataaaggaggggagaagttccatagatgatgctggcattatccccgatggaactattaacgaaaggccgaatcactacatcgagggaattactaaaggcagtgatctggacctcttggaaaaaggtataagaaaaactgacgaaatgacttccaattttacaaattatatgtacaagtttcacagattgccccccaactatggaagtaaccagctcattactatcgataaggaacttcaaaaggaactggatggggtaatgtcatccttcaaagctccgtgccggtttgtatttggttacggctcaggagttttcgaacaagcgggatattccaaaagtcatagcaaacctcaaatcgatataatcttgggcgtcacatatccatcacattttcactctattaatatgaggcagaatccgcaacattattcaagtttgaaatacttcggttccgagttcgtgtctaaatttcaacagatcggcgcaggcgtatattttaatccatttgcaaatataaatggacacgacgtaaaatatggggtggtttctatggaaacacttttaaaggacatagctacttggaatacattctatttagcaggacgactacaaaagcctgtaaaaatattgaagaatgatttgagagtgcaatattggaaccaattaaacttaaaagctgcagctactttggccaaacattacaccttagagaaaaataacaataagtttgacgaattccaattttacaaggagatcactgccttaagttatgcaggtgatattagatacaaactgggtggagaaaatcccgacaaagttaacaacattgttaccaaaaactttgaaagatttcaagagtattacaagccgatttacaaagaagtggtcctaaatgattcattttatcttccaaaagggttcacattaaagaatactcagagacttttgctcagccgtattagtaaatcaagtgcattacaaactattaaaggtgttttcacagctggaatcacaaagtcaattaagtatgcttgggccaaaaaactaaaatcgatgaggagaagctag

SEQ ID NO: 4246 - DNA, 1158 bp, Artificial Sequence
  Description of Artificial Sequence: Synthetic polynucleotide
atgttaagagtttctgaaaatggtttgagatttttattgaaatgccattctacgaacgtaagcatgtttaataggcttttaagtactcaaataaaggaggggagaagttccatagatgatgctggcattatccccgatggaactattaacgaaaggccgaatcactacatcgagggaattactaaaggcagtgatttggacctcttggaaaaaggtataagaaaaactgacgaaatgacttccaattttacaaattatatgtacaagtttcacagattgccccccaactatggaagtaaccagctcattactatcgataaggaacttcaaaaggaattagatggggtaatgtcttccttcaaagctccgtgcagatttgtatttggttacggcagtggagttttcgaacaagcgggatattccaaaagtcatagcaaacctcaaatcgatataatcttgggcgtcacatatccatctcattttcactctattaatatgaggcagaatccgcaacattattctagtttgaaatacttcggttccgagttcgtgtctaaatttcaacagatcggcgcaggcgtatattttaatccatttgcaaatataaatggacacgacgtaaaatatggggtggtttctatggaaacacttttaaaggacatagctacttggaatacattctatttagcaggaagattacaaaagcctgtaaaaatattgaagaatgatttgagagtgcaatattggaaccaattaaacttaaaagctgcagctactttggccaaacattacaccttagagaaaaataacaataagtttgacgaattccaattttacaaggagatcactgccttaagttatgcaggtgatattagatacaaattgggtggagaaaatcccgacaaagttaacaacattgttaccaaaaactttgaaagatttcaagagtattacaagccgatttacaaagaagtggtcttgaatgattctttttatcttccaaaagggttcacattaaagaatactcagagacttttgctcagccgtattagtaaatctagtgcattacaaactattaaaggtgttttcacagctggaatcacaaagtctattaagtatgcttgggccaaaaaattgaaatctatgaggagaagctga

SEQ ID NO: 4247 - DNA, 3078 bp, Saccharomyces cerevisiae
atggcagcaggaaaattgaaaaaggaacagcaaaatcaatcagctgaacgagaaagcgctgatacgggtaaagttaacgatgaggatgaagagcatctatacggaaatattgatgactataagcatttgattcaagatgaggaatatgatgacgaggatgtacctcatgatctacaattaagcgaagatgaatataattccgaacgagacagttctttgttggcagaattctcggactacggtgaaatatctgaagacgatgaggaagatttcatgaacgcgattagggaagcaagtaactttaaggtaaaaaagaagaagaaaaatgacaaaggtaaatcttacggccgccaaagaaaagaaagagtgcttgatccagaggtagcgcaattactttctcaagccaatgaagcttttgtcaggaatgatttacaagtggccgaaagattatttaatgaggtaattaaaaaagatgcacgtaattttgctgcttacgagaccctaggagatatatatcaattgcaaggaaggcttaatgattgttgtaactcttggttcctggcagctcacctaaatgcttccgattgggaattctggaagatagtcgctatactgtccgccgatttagatcatgttaggcaggccatctactgcttttccagggtaataagtttgaatcctatggaatgggaatcaatttatcgccggtctatgttgtacaagaagacaggacagttagcaagagctttagatggatttcaaaggctttacatgtacaatccttatgatgcaaacatattgagggagttggccattctttatgttgattatgatcggattgaagattcaattgagctctatatgaaagtgtttaatgctaatgttgagagaagggaagcgatattagctgctttagaaaatgccttagattcttcagacgaagaaagcgccgcagaaggggaggatgcagacgaaaaggaaccccttgaacaagatgaagataggcagatgtttcctgacatcaactggaaaaaaattgatgcaaaatataaatgcataccatttgactggtcttctttgaacattctcgcggaacttttcttaaaactcgcagttagtgaggtcgatggtataaagacaattaaaaaatgtgcacggtggattcaacgccgcgaaagccagacattttgggatcatgttccagatgattcagaatttgacaatagaaggtttaaaaacagtacctttgattcactacttgccgcagaaaaggaaaaatcgtataacattccaatcgatattagagttagattgggattgttaagattgaacacagataaccttgttgaagctctgaatcattttcaatgcctgtatgatgagactttcagtgacgttgcggatttatattttgaggctgcaactgctttaacaagggctgaaaagtataaagaggctatcgatttctttacgccgttgttatcccttgaggaatggcgtaccactgacgtcttcaaaccactagcaagatgctacaaggaaatcgaaagttatgaaacggctaaagagttttatgaactagctataaaatctgaaccagatgatttagatattcgtgtatctttggcagaagtttactatcgcttaaatgatccagagacttttaaacatatgttagttgacgttgtagaaatgaggaaacaccaggttgatgaaacactgcacaggatttctaacgagaaaagttctaacgatacttcggatatttctagtaaaccgctgctggaggatagtaaatttagaactttcaggaaaaagaaacgtacaccttatgatgcagaaagagagagaatagaaagggaaagaagaataacggcaaaagtcgttgataaatacgaaaagatgaaaaaatttgaactaaattcaggtctcaatgaagccaaacaggcatctatatggatcaatacagtttctgaattagttgatatattttcgagcgttaagaacttttttatgaaaagtcgatccaggaaattcgttggaatactaaggagaactaaaaagtttaacaccgagcttgatttccaaattgaaaggttatctaagttagctgaaggagatagtgtgtttgaagggccgctaatggaggaaagagtaaccttaacttctgccacagaattgagaggattgtcgtatgagcagtggtttgagttatttatggaactttctttagtaatcgcaaaatatcaaagtgttgaagacggcctgagtgttgtggaaacagcccaggaagtaaacgtgttcttccaggatccagagagggttaagatgatgaaatttgtgaaactagctattgttcttcaaatggatgatgaagaggaattggccgaaaatttaagaggtttactaaatcaatttcaatttaatagaaaagttttgcaggtatttatgtattccctatgtcgaggaccctcttctctgaatattttgagctctaccattcaacaaaaatttttcttaagacaactgaaagcttttgacagttgtagatataataccgaggtaaatgggcaagcttcaattacgaacaaagaggtgtacaaccctaataaaaagtcgtcgccatatttgtactatatctatgctgttcttctctattccagtaggggctttctttcagccctacagtatttaactaggttggaagaggatatcccagatgacccgatggtcaatcttttaatgggtctgtcacatattcatcgtgctatgcagagactaacagcacaaaggcattttcaaatttttcatggattacgttatctatatcgttatcataaaataaggaaaagcctatatacggatttggaaaagcaagaggcagactacaacttagggcgtgctttccatttaatcggtctggtatcgattgcaattgagtactataatagagttctagaaaactacgatgatggaaagttgaaaaaacatgctgcctataacagtattataatatatcagcaaagcggaaatgttgagttggccgaccacctcatggagaagtatttaagtatttga

SEQ ID NO: 4248 - DNA, 3078 bp, Artificial Sequence
  Description of Artificial Sequence: Synthetic polynucleotide
atggcagcaggaaaattgaaaaaggaacagcaaaatcaatctgctgaaagagaaagcgctgatacgggtaaagttaacgatgaggatgaagagcatctttacggaaatattgatgactataagcatttgattcaagatgaggaatatgatgacgaggatgtacctcatgatttgcaattaagcgaagatgaatataattccgaaagagacagttctttgttggcagaattcagtgactacggtgaaatatctgaagacgatgaggaagatttcatgaacgcgattagggaagcaagtaactttaaggtaaaaaagaagaagaaaaatgacaaaggtaaatcttacggccgccaaagaaaagaaagagtgcttgatccagaggtagcgcaattactttctcaagccaatgaagcttttgtcaggaatgatttacaagtggccgaaagattatttaatgaggtaattaaaaaagatgcacgtaattttgctgcttacgagaccttaggagatatatatcaattgcaaggaaggcttaatgattgttgtaactcttggttcttggcagctcacttgaatgcttccgattgggaattctggaagatagtcgctatattatccgccgatttagatcatgttaggcaggccatctactgcttttccagggtaataagtttgaatcctatggaatgggaaagtatttatcgcagatctatgttgtacaagaagacaggacagttagcaagagctttagatggatttcaaaggctttacatgtacaatccttatgatgcaaacatattgagggagttggccattctttatgttgattatgatagaattgaagattctattgagctctatatgaaagtgtttaatgctaatgttgagagaagggaagcgatattagctgctttagaaaatgccttagattcttctgacgaagaaagcgccgcagaaggggaggatgcagacgaaaaggaaccccttgaacaagatgaagataggcagatgtttcctgacatcaactggaaaaaaattgatgcaaaatataaatgcataccatttgactggtcttctttgaacattctcgcggaacttttcttaaaactcgcagttagtgaggtcgatggtataaagacaattaaaaaatgtgcaagatggattcaacgccgcgaaagccagacattttgggatcatgttccagatgattctgaatttgacaatagaaggtttaaaaacagtacctttgattctttacttgccgcagaaaaggaaaaaagttataacattccaatcgatattagagttagattgggattgttaagattgaacacagataaccttgttgaagctttgaatcattttcaatgcttatatgatgagactttcagtgacgttgcggatttatattttgaggctgcaactgctttaacaagggctgaaaagtataaagaggctatcgatttctttacgccgttgttatcccttgaggaatggcgtaccactgacgtcttcaaaccattggcaagatgctacaaggaaatcgaaagttatgaaacggctaaagagttttatgaattggctataaaatctgaaccagatgatttagatattcgtgtatctttggcagaagtttactatcgcttaaatgatccagagacttttaaacatatgttagttgacgttgtagaaatgaggaaacaccaggttgatgaaacattacacaggatttctaacgagaaaagttctaacgatacttctgatatttctagtaaaccgttattggaggatagtaaatttagaactttcaggaaaaagaaacgtacaccttatgatgcagaaagagagagaatagaaagggaaagaagaataacggcaaaagtcgttgataaatacgaaaagatgaaaaaatttgaattgaattctggtctcaatgaagccaaacaggcatctatatggatcaatacagtttctgaattagttgatatattttctagcgttaagaacttttttatgaaaagtagatccaggaaattcgttggaatattaaggagaactaaaaagtttaacaccgagcttgatttccaaattgaaaggttatctaagttagctgaaggagatagtgtgtttgaagggccgttaatggaggaaagagtaaccttaacttctgccacagaattgagaggattgagttatgagcagtggtttgagttatttatggaactttctttagtaatcgcaaaatatcaaagtgttgaagacggcttaagtgttgtggaaacagcccaggaagtaaacgtgttcttccaggatccagagagggttaagatgatgaaatttgtgaaattggctattgttcttcaaatggatgatgaagaggaattggccgaaaatttaagaggtttattgaatcaatttcaatttaatagaaaagttttgcaggtatttatgtattccttatgtaggggaccctcttctttgaatattttgagctctaccattcaacaaaaatttttcttaagacaattgaaagcttttgacagttgtagatataataccgaggtaaatgggcaagcttccattacgaacaaagaggtgtacaaccctaataaaaagtcttctccatatttgtactatatctatgctgttcttctctattccagtaggggctttctttctgccttgcagtatttaactaggttggaagaggatatcccagatgacccgatggtcaatcttttaatgggtttatctcatattcatcgtgctatgcagagattgacagcacaaaggcattttcaaatttttcatggattacgttatttgtatcgttatcataaaataaggaaaagcttgtatacggatttggaaaagcaagaggcagactacaacttagggcgtgctttccatttaatcggtttagtatctattgcaattgagtactataatagagttttggaaaactacgatgatggaaagttgaaaaaacatgctgcctataacagtattataatatatcagcaaagcggaaatgttgagttggccgaccacctcatggagaagtatttaagtatttga

SEQ ID NO: 4249 - DNA, 1086 bp, Saccharomyces cerevisiae
atgttttctggctttagttcttttggcggcggaaatggttttgtaaatatgcctcaaacgtttgaggagttctttagatgctaccctatagctatgatgaatgatagaatacggaaggatgacgcaaacttcggcgggaaaatattcctgccaccaagtgctctaagcaaactatccatgttgaacataagataccccatgctttttaaactaactgccaatgaaactggacgtgtgacacatggaggtgttttagaatttattgctgaagagggcagagtttacttaccacaatggatgatggaaactttgggtatacagccaggatctctactgcaaatttcatctactgatgtacctctgggccagtttgtgaagttagaacctcagtctgtagatttcttggatatttccgaccccaaagcagttttggaaaacgtactgaggaatttctcgactttgaccgtggacgatgttattgagattagttacaatggtaaaactttcaaaattaagatcttagaagtcaaaccagaatcatcatcgaagagtatatgtgtcattgaaacagatttagtaacagattttgctccacctgtaggatatgtggaaccggattacaaagcgctgaaagctcagcaagataaagaaaaaaagaattcttttggtaagggccaagttttggatccctcggtgcttggccagggatcgatgtccacaagaatcgactatgcgggtatcgctaacagtagcagaaacaaactatctaaatttgtaggtcagggacaaaacatatctggtaaagctccgaaagcggagcccaagcaagatataaaagatatgaagataacgtttgatggcgagcccgccaagctagatctgcctgaaggccaattattctttggtttcccaatggtcctaccgaaagaagacgaagaaagtgccgctggtagcaaatccagtgaacaaaatttccaaggccaagggatctcactaaggaagagcaataagagaaaaacgaaaagtgaccatgattcgtccaagtccaaggctcccaaaagcccggaagtaatcgaaattgactaa

SEQ ID NO: 4250 - DNA, 1086 bp, Artificial Sequence
  Description of Artificial Sequence: Synthetic polynucleotide
atgttttctggctttagttcttttggcggcggaaatggttttgtaaatatgcctcaaacgtttgaggagttctttagatgctaccctatagctatgatgaatgatagaataagaaaggatgacgcaaacttcggcgggaaaatattcttaccaccaagtgctttgagcaaactttccatgttgaacataagataccccatgctttttaaattaactgccaatgaaactggacgtgtgacacatggaggtgttttagaatttattgctgaagagggcagagtttacttaccacaatggatgatggaaactttgggtatacagccaggatctttattacaaatttcttctactgatgtacctttgggccagtttgtgaagttagaacctcagtctgtagatttcttggatatttccgaccccaaagcagttttggaaaacgtattgaggaatttctctactttgaccgtggacgatgttattgagattagttacaatggtaaaactttcaaaattaagatcttagaagtcaaaccagaatcttcttccaagagtatatgtgtcattgaaacagatttagtaacagattttgctccacctgtaggatatgtggaaccggattacaaagcgttgaaagctcagcaagataaagaaaaaaagaattcttttggtaagggccaagttttggatccctctgtgcttggccagggatccatgtccacaagaatcgactatgcgggtatcgctaacagtagcagaaacaaattatctaaatttgtaggtcagggacaaaacatatctggtaaagctccgaaagcggagcccaagcaagatataaaagatatgaagataacgtttgatggcgagcccgccaagttggatttacctgaaggccaattattctttggtttcccaatggtcttgccgaaagaagacgaagaaagtgccgctggtagcaaatccagtgaacaaaatttccaaggccaagggatctctttgaggaagagcaataagagaaaaacgaaaagtgaccatgattcttccaagtccaaggctcccaaaagcccggaagtaatcgaaattgactga

SEQ ID NO: 4251 - DNA, 564 bp, Saccharomyces cerevisiae
atgcaagtctccccagctattgtaaaaggtatcgcagtctcatcattaggtttatacgccggtattttaacttcatctaccgtgatttctattaccaccccaataaatgttctaactcaacatttgaagaatgttttgtgcacattaggatgctggagcaccgttttaggtggtttagctactggtgcctttggactcagctactatctagctgcaccaggagaaagaccaaactaccttttgtgcggacttggtgtcgccccattatctgcagcctacctatacttagtatcactgttcaatcacaagctagccccaaaatgcacacgtgaccaaaatgatttagaaaagcaaaaggatgaaaaattaccccaacatcacccggaagtcaaagatggggaagctgcatgcccattctcaaagatgaacaacgccaaaacattaaaacctgaatccgaaagaagcgtaaaatgtcactcatacatgtcattgcacatgagcattgtaaccggtataacaatttttacctttggtaagtgtatcctagatggattcaaagcatga

SEQ ID NO: 4252 - DNA, 564 bp, Artificial Sequence
  Description of Artificial Sequence: Synthetic polynucleotide
atgcaagtctccccagctattgtaaaaggtatcgcagtcagttctttaggtttatacgccggtattttaacttcttctaccgtgatttctattaccaccccaataaatgttttaactcaacatttgaagaatgttttgtgcacattaggatgctggagcaccgttttaggtggtttagctactggtgcctttggactcagctactatttggctgcaccaggagaaagaccaaactaccttttgtgcggacttggtgtcgccccattatctgcagcctacttgtacttagtatctttattcaatcacaagttggccccaaaatgcacacgtgaccaaaatgatttagaaaagcaaaaggatgaaaaattaccccaacatcacccggaagtcaaagatggggaagctgcatgcccattctccaagatgaacaacgccaaaacattaaaacctgaatccgaaagaagcgtaaaatgtcactcttacatgtctttgcacatgagcattgtaaccggtataacaatttttacctttggtaagtgtatcttagatggattcaaagcatga

SEQ ID NO: 4253 - DNA, 357 bp, Saccharomyces cerevisiae
atgaaaaccaatctaatctcctcgtttgctttccgaccgcatgtaaggttcggctttcttgacttcggatatagcttaaagtcgattcttgacgtcacttcgcaatatcatttcattcccattaaactggcgtatggactttgcgatcctttattaatagtttatccggatcccagttttagtttggctcaagctgcaggtgaaaagaaaaaagtcgtattccctacgtatgaagatgttccgaaactactgttgacgtttaagcagattatgaatacgtataggaagggaagtttgggacagagacagagacagagagtgtacgggcgaaatgggaatgaatcacattctacgtaa

SEQ ID NO: 4254 - DNA, 357 bp, Artificial Sequence
  Description of Artificial Sequence: Synthetic polynucleotide
atgaaaaccaatttgatctcctcttttgctttcaggccgcatgtaaggttcggctttcttgacttcggatatagcttaaagtctattcttgacgtcacttctcaatatcatttcattcccattaaattagcgtatggactttgcgatcctttattaatagtttatccggatcccagttttagtttggctcaagctgcaggtgaaaagaaaaaagtcgtattccctacgtatgaagatgttccgaaattattattgacgtttaagcagattatgaatacgtataggaagggaagtttgggacagagacagagacagagagtgtacgggagaaatgggaatgaaagtcattctacgtga

SEQ ID NO: 4255 - DNA, 1110 bp, Saccharomyces cerevisiae
atgtatacaaaactaagatctatacaatcaggaacatttagcacagtttataaagcatggagtactacacataaccgctacgtcgctttaaagattactcctaaatacaaaacttcagaagccaacatgaagaacgagtatgatgtaatgaagattttgagttcttgtaatcctcaccccaacatctgttcgatgctcgacttttacacggatgactcgtactacatcatggtgctagaatactgcgaatgtggtgatctttatgactttctagatattgctaagagtcaaggtagcccgtcgtctccatctttgattcaaattgatatgcaaaagataatcaaacaactgtgctcagcaatcagctttgctcacagcttgggtattgctcatcgtgatatcaaaccagaaaatattttgctaacgataaatggtgacatcaagttggcagactggggtcacgctatccaatcccctaaatctaacgacttccagattggtaccgataattacagggcgccagaaactttctctggccgcgttagtaactcttgttttaagaagaatttcgatcggtcatcggctccattgtataacacataccaagctgactattggtcattgggtgccaccatattttatctgatgttcggcgattgcctttttagagtctccaaatcaaagaaggttcagcatctaaaaaatttcgatgagtttgaaaaagatccatttgcattcatttacaggaaatacgtagtaccaaggctctcctgtggttacaatgatgaagaagacctacacgttagcctgcagcatacgaggcagtacatatggcaagatctacccgacatttatgatgtcttccatttgtgcaagattatggttgataccttattaaaggtatcgaacgctaaagagaggtcgatggagaatttcatcaatgaagttgattctgcatggaacaaagatagctcgatggacagctgcttctcgtaccaaaataagattgatctgttttgggaacagtggtctgtgaacacggaaacagtaccagcaaagttccaattgaaaaattttgagaaaccttgcctaattcaagatggaaaataa

SEQ ID NO: 4256 - DNA, 1110 bp, Artificial Sequence
  Description of Artificial Sequence: Synthetic polynucleotide
atgtatacaaaattgagatctatacaaagtggaacatttagcacagtttataaagcatggagtactacacataaccgctacgtcgctttaaagattactcctaaatacaaaacttctgaagccaacatgaagaacgagtatgatgtaatgaagattttgagttcttgtaatcctcaccccaacatctgttccatgctcgacttttacacggatgactcttactacatcatggtgttggaatactgcgaatgtggtgatctttatgactttttggatattgctaagagtcaaggtagcccgtcttctccatctttgattcaaattgatatgcaaaagataatcaaacaattatgctctgcaatcagctttgctcacagcttgggtattgctcatcgtgatatcaaaccagaaaatattttgttgacgataaatggtgacatcaagttggcagactggggtcacgctatccaatcccctaaatctaacgacttccagattggtaccgataattacagggcgccagaaactttctctggccgcgttagtaactcttgttttaagaagaatttcgatagatcttctgctccattgtataacacataccaagctgactattggtctttgggtgccaccatattttatttaatgttcggcgattgcctttttagagtctccaaatccaagaaggttcagcatttgaaaaatttcgatgagtttgaaaaagatccatttgcattcatttacaggaaatacgtagtaccaaggctctcctgtggttacaatgatgaagaagacttgcacgttagcttacagcatacgaggcagtacatatggcaagatttgcccgacatttatgatgtcttccatttgtgcaagattatggttgataccttattaaaggtatccaacgctaaagagaggtctatggagaatttcatcaatgaagttgattctgcatggaacaaagatagcagtatggacagctgcttctcttaccaaaataagattgatttattttgggaacagtggtctgtgaacacggaaacagtaccagcaaagttccaattgaaaaattttgagaaaccttgcttgattcaagatggaaaatga

SEQ ID NO: 4257 - DNA, 852 bp, Saccharomyces cerevisiae
atgttactaaagtgtgtttgcagagccggcataatatctatcaaaggaatctttcctcgatggtactccaattctcaaaaagtggccaatttggggcaaataacagattatttagtggttaaaggtgttcccaatttgttacaaaaaatgttcaaggagtcagtgttggcggataacgttgtttttagactatttccaacatcgcatccatatattccagtgttacatggaaaatcaaaatacatggcttctttgaatgcaatgcgaatgatagtacgaaagtttatcttgggcgatgaatgtcgcttgcatataagttcagtaaagactctaacatcgacatcgcatgatgaagaagttaaatctgctcttcagagttataataccataacatgtaatgacaaattggtgatcaaatggcaaagctgcataccggaagaccattgcaagattaccaaattagaaattaatgacagattgaaagaggagaaacgaggcaatggtgcaggcggttcattttcaatgaggtcggtaccagtcatagactacattttacatcctacagccaataatttgaaccaaagtgttatctctgagtaccttgaaaatgcagctgaaaggtcaatggaaaataaggtcaacgaaactcaaaattccaaagaagatgagaagaagaaaaatgatggcgacggtaaaagaagtaaaaaaaagagattatcccggctgattaagggaacattcatattcgaatttaacgaagaaaattcgaaaattctggttcataccattgaagatgttgaactgatccattacgagaagaaaattgccactcgcggtgcatttgcatgttaa

SEQ ID NO: 4258 - DNA, 852 bp, Artificial Sequence
  Description of Artificial Sequence: Synthetic polynucleotide
atgttattgaagtgtgtttgcagagccggcataatatctatcaaaggaatctttcctcgttggtactccaattctcaaaaagtggccaatttggggcaaataacagattatttagtggttaaaggtgttcccaatttgttacaaaaaatgttcaaggagtctgtgttggcggataacgttgtttttagattatttccaacatctcatccatatattccagtgttacatggaaaatctaaatacatggcttctttgaatgcaatgagaatgatagtaagaaagtttatcttgggcgatgaatgtcgcttgcatataagttctgtaaagactttgacatctacatctcatgatgaagaagttaaatctgctcttcagagttataataccataacatgtaatgacaaattggtgatcaaatggcaaagctgcataccggaagaccattgcaagattaccaaattagaaattaatgacagattgaaagaggagaaaagaggcaatggtgcaggcggttctttttccatgaggtctgtaccagtcatagactacattttacatcctacagccaataatttgaaccaaagtgttatctctgagtaccttgaaaatgcagctgaaaggtctatggaaaataaggtcaacgaaactcaaaattccaaagaagatgagaagaagaaaaatgatggcgacggtaaaagaagtaaaaaaaagagattatccagattgattaagggaacattcatattcgaatttaacgaagaaaattctaaaattttggttcataccattgaagatgttgaattgatccattacgagaagaaaattgccactcgcggtgcatttgcatgttga

SEQ ID NO: 4259 - DNA, 1929 bp, Saccharomyces cerevisiae
atgtcatctcagtttttcctgaaaacctctcaggatatagagctcttccaaagctacccaacttttgagcaatccaacacaaactccaaggatttccctgtcatttcctcggttttatcgccatgtggcagatttttggctttatctacgaaggagaacgtcaaagtttttacaggtccatgtttggataacgttctattaacaatgaagttgtccgacgtctatgacctacacttctctccagcaggtaactacttaagcacttgggagagagcgtctatacaagacccaaatcacaagaacgttaaagtttggtatttgaataaaccatttaagaaagattgcgtttcggaggatatagtccctgcttacgaatatcaagccaaatcccaaagcggttggtttttacaattctccaaattagacaattatgggctaagactttttaaacacgacttgaagattgttaaattaagctccgctaatgccgacaatttcgacttccaatctccgtttgctgtcttgtctgatgatgaaacgtcccaacatttcaccacctacctaatctctccagctgaacatccaacaatttgtactttcacaccagaaaagggtggtaaaccggctcaattaatcatatgggccctctctgaaggtaaaatcaccaagaaaattgcctccaaaactttctttaaagctgattcctgccaattgaaatggaatccattaggtaatgctattttatgtttagctattactgattttgattcctcaaacaaatcatattatggtgaaaacacactatacttactgtctttccaaggtgtcaacgggactttgggtggtaactctgtacgtgtttctttaaccactggacctgtccacgatttcacttggtcgccaacttcaaggcaattcggtgtcatcgctggttacatgccagcaaccatttccttttttgacttaagaggtaatgttgtccattcattacctcaacaagccaaaaataccatgcttttctctccctctggtcattacattcttatcgccgggtttggtaatttacagggctccgtggaaatcctagatcgtctcgacaaattcaagtgtgtgagtaaatttgacgctaccaacacttctgtctgcaaatggtcaccgggtggagaatttatcatgacagctaccacttcaccaagattgagagtggataacggcgttaaaatatggcatgtatcaggctctttagtatttgttaaagagttcaaggagcttttgaaggtagactggaggtcaccatgtaattacaaaactttggaaaacaaagacgaagcatttttcgagaaccatatcattaataactgggaaccgctacctgattcgaccacatcttcacttgatcctaaaatatccaataaatcagaattgcaaatacattctagcgttcaagagtacataagtcaacacccaagcagagaagcaagctccaatggaaacggatctaaggccaaagctggaggcgcttataaaccacctcacgcaagaagaacaggcggtggacgtattgtccccggagttcctcctggtgcagcaaagaagaccatcccagggctagttccgggcatgagtgccaacaaggacgccaacaccaagaacaggagaagaagagccaataaaaagtcaagtgaaacgtcacctgattctactccggccccatctgctcctgcctccacaaatgcccccacaaacaataaagaaacttctccagaggagaagaaaataagatctttactaaagaaattaagggctattgaaaccttgaaggaaagacaggccgtcggtgacaaactagaagatacgcaagttctaaaaattcaaactgaagaaaaagtgttgaaagatttggaaaagttgggttggaaggatgaataa

SEQ ID NO: 4260 - DNA, 1929 bp, Artificial Sequence
  Description of Artificial Sequence: Synthetic polynucleotide
atgtcttctcagtttttcttgaaaacctctcaggatatagagctcttccaaagctacccaacttttgagcaatccaacacaaactccaaggatttccctgtcatttcctctgttttatctccatgtggcagatttttggctttatctacgaaggagaacgtcaaagtttttacaggtccatgtttggataacgttttattaacaatgaagttgtccgacgtctatgacttgcacttctctccagcaggtaactacttaagcacttgggagagagcgtctatacaagacccaaatcacaagaacgttaaagtttggtatttgaataaaccatttaagaaagattgcgtttctgaggatatagtccctgcttacgaatatcaagccaaatcccaaagcggttggtttttacaattctccaaattagacaattatgggttgagactttttaaacacgacttgaagattgttaaattaagctccgctaatgccgacaatttcgacttccaatctccgtttgctgtcttgtctgatgatgaaacgtcccaacatttcaccacctacttgatctctccagctgaacatccaacaatttgtactttcacaccagaaaagggtggtaaaccggctcaattaatcatatgggccctctctgaaggtaaaatcaccaagaaaattgcctccaaaactttctttaaagctgattcctgccaattgaaatggaatccattaggtaatgctattttatgtttagctattactgattttgattccagtaacaaaagttattatggtgaaaacacattgtacttattatctttccaaggtgtcaacgggactttgggtggtaactctgtacgtgtttctttaaccactggacctgtccacgatttcacttggtctccaacttctaggcaattcggtgtcatcgctggttacatgccagcaaccatttccttttttgacttaagaggtaatgttgtccattctttacctcaacaagccaaaaataccatgcttttctctccctctggtcattacattcttatcgccgggtttggtaatttacagggctccgtggaaatcttagatcgtctcgacaaattcaagtgtgtgagtaaatttgacgctaccaacacttctgtctgcaaatggtctccgggtggagaatttatcatgacagctaccacttctccaagattgagagtggataacggcgttaaaatatggcatgtaagtggctctttagtatttgttaaagagttcaaggagcttttgaaggtagactggaggtctccatgtaattacaaaactttggaaaacaaagacgaagcatttttcgagaaccatatcattaataactgggaaccgttgcctgattctaccacatcttctcttgatcctaaaatatccaataaaagtgaattgcaaatacattctagcgttcaagagtacataagtcaacacccaagcagagaagcaagctccaatggaaacggatctaaggccaaagctggaggcgcttataaaccacctcacgcaagaagaacaggcggtggacgtattgtccccggagttcctcctggtgcagcaaagaagaccatcccagggttggttccgggcatgagtgccaacaaggacgccaacaccaagaacaggagaagaagagccaataaaaagagtagtgaaacgtctcctgattctactccggccccatctgctcctgcctccacaaatgcccccacaaacaataaagaaacttctccagaggagaagaaaataagatctttattgaagaaattaagggctattgaaaccttgaaggaaagacaggccgtcggtgacaaattagaagatacgcaagttttgaaaattcaaactgaagaaaaagtgttgaaagatttggaaaagttgggttggaaggatgaatga

SEQ ID NO: 4261 - DNA, 1725 bp, Saccharomyces cerevisiae
atgtcggaaggaagaacgtttctgtcacagttgaatgtcttcaacaaggagaactatcaattttcttcttctactacaaaaaaggaagtaagtaactcgacagtggatgctgacaacggtgcctccgattttgaggcaggccagcaatttgctacagaattggaccaaggtgaaaagcagttaggtattttgtcgtgtattgggcttatctgtaatagaatgcttggtaccggtgttttcgccgtttcctcgaccatttacacactatgtgggtctgtggggcttgcattaattatgtgggcagttggcgccattattgccatttctgggttatatgtatacatggaattcggtacggctataccgaaaaatggtggtgaaaaaaactacctggaggctattttcaggaaaccaaaattcttcattacctgtatgtatgctgcgtatattttcttcctaggttgggctgctggtaattccatcaatacagctattatgtttttaactgctgctgatactgaagtgaccaaatggaatcaaagaggtattggtgtggccgtcgttttttttgcattcctaattaattctctgaatgtcaagattggtctatatttgcaaaacattttaggtattttcaagattggtattgtcctcttcatttctattaccggttgggttgcccttggcggtggtctcaaagatggttatcaatctcacaactttcgtaatgcttttgaaggtactgaaaccgccactgcttatggtattgttaacgccttatatagtgttatttggtcgtttgtcggttactccaatgttaactatgcacttggtgaagttaagaaccctgtgagaactttgaagattgctggtcctacatcgatggtcttcttggctataatctacatttttgtgaacattgcttacttcgctgtggttccaaaagataagttaatttcttcaaaattgattttagctgctgacttcttcgatattgtgtttggcggccaagccaagagagcagcagccgcactggtcgggttgagtgccttaggaaatgttctttctgtcattttttctcagggtagaattattcaacaactaggacgtgaaggtgtgttgcccttttctaatttctttgcctcttctaagccattcaactccccaatggttggtttgtttcaacattttattgtttgtacagtaaccattttagccccacctccaggtgatgcatatttgctagtccaaaatttaatttcctacccaatgaatattattaattttgccattagcgcgggtttgctttggatatactggcaacgtagacaaggtaaaattgaatggaacccaccaattaaggccggtgtttttgttacgggatttttcacattatccaatttatacctgattattgctccttacgttccaccttcaaatggcgagtcggtgtattcaagcatgccatactggatccactgtgtaattgcttggggtattttcttctttggtggtgtttactacgttgtttgggcccaattattgccaagatggggccactacaaattggtttccaaggatgtgcttggtgaagatgggttctggagagtcaaaattgccaaagtttatgatgacactattggcgatgtcgatacacaagaagacggcgttattgaaacgaatataatcgaacattacaaaagtgaacaagaaaaatcgctgtaa

SEQ ID NO: 4262 - DNA, 1725 bp, Artificial Sequence
  Description of Artificial Sequence: Synthetic polynucleotide
atgtctgaaggaagaacgtttttatctcagttgaatgtcttcaacaaggagaactatcaattttcttcttctactacaaaaaaggaagtaagtaactccacagtggatgctgacaacggtgcctccgattttgaggcaggccagcaatttgctacagaattggaccaaggtgaaaagcagttaggtattttgagttgtattgggcttatctgtaatagaatgcttggtaccggtgttttcgccgtttcctccaccatttacacattatgtgggtctgtggggcttgcattaattatgtgggcagttggcgccattattgccatttctgggttatatgtatacatggaattcggtacggctataccgaaaaatggtggtgaaaaaaactacttggaggctattttcaggaaaccaaaattcttcattacctgtatgtatgctgcgtatattttcttcttgggttgggctgctggtaattccatcaatacagctattatgtttttaactgctgctgatactgaagtgaccaaatggaatcaaagaggtattggtgtggccgtcgttttttttgcattcttgattaattctttgaatgtcaagattggtttatatttgcaaaacattttaggtattttcaagattggtattgtcctcttcatttctattaccggttgggttgcccttggcggtggtctcaaagatggttatcaatctcacaactttcgtaatgcttttgaaggtactgaaaccgccactgcttatggtattgttaacgccttatatagtgttatttggtcttttgtcggttactccaatgttaactatgcacttggtgaagttaagaaccctgtgagaactttgaagattgctggtcctacatctatggtcttcttggctataatctacatttttgtgaacattgcttacttcgctgtggttccaaaagataagttaatttcttctaaattgattttagctgctgacttcttcgatattgtgtttggcggccaagccaagagagcagcagccgcattggtcgggttgagtgccttaggaaatgttctttctgtcattttttctcagggtagaattattcaacaattaggacgtgaaggtgtgttgcccttttctaatttctttgcctcttctaagccattcaactccccaatggttggtttgtttcaacattttattgtttgtacagtaaccattttagccccacctccaggtgatgcatatttgttggtccaaaatttaatttcctacccaatgaatattattaattttgccattagcgcgggtttgctttggatatactggcaacgtagacaaggtaaaattgaatggaacccaccaattaaggccggtgtttttgttacgggatttttcacattatccaatttatacttgattattgctccttacgttccaccttccaatggcgagtctgtgtattctagcatgccatactggatccactgtgtaattgcttggggtattttcttctttggtggtgtttactacgttgtttgggcccaattattgccaagatggggccactacaaattggtttccaaggatgtgcttggtgaagatgggttctggagagtcaaaattgccaaagtttatgatgacactattggcgatgtcgatacacaagaagacggcgttattgaaacgaatataatcgaacattacaaaagtgaacaagaaaaatctttgtga

SEQ ID NO: 4263 - DNA, 2787 bp, Saccharomyces cerevisiae
atggtggagcaagataatgggtttttacagaagctactcaaaacacaatacgatgctgtcttccatttaaaggatgaaaatggtatagaaatatatccaatattcaatgtactgccacctaaaaaagaatatccagactattacattataataaggaatccgatatctttaaacactttaaagaaacgattgccccattatacatcgccacaagattttgttaacgattttgcgcaaattccttggaatgcaatgacatacaatgcaaaagattcagtaatttacaaatatgccattcttcttgagtcttttattaaaggaaagatcgtgcacaatataagaaaacattatcccgaggtgacatatccatctctaggtcgaattccggaaatattcgcagagagtatgcaaccctccgatttatcctcgaaccccattaatacacaggaaaatgatgaaaaggctggcttaaatccagagatgaaaatggctttcgcaaaactagatagttcgatcactgaaaggaaaccaaccaaccaagattacaggatgcaacaaaaaaactcaccagcgtttccaacccattctgcttctataacaccgcagccgctggcttcacctactccagttgttaactatgcaaatattacctcggcgcatcccaaaacccatgttagacgcggtagaccaccagtaattgatctaccctatgtactgaggattaagaatatcttgaagatgatgagaagagaggtcgaccaaaataataagacgcttaccctctgttttgaaaaactaccagatagaaacgaggagccaacctattactctgtcataacagatcccatttgtctaatggatattaggaaaaaggttaagtccagaaaatatagaaatttccatacttttgaggaagactttcaattaatgctaacaaattttaagctttattattctcaagatcagagcaatataatacgagctcaactattggagaaaaacttcaatagattagtgcgaattgaattatccaaacctgatgaagactatttacctgaaggtgaattaagatatcctctagatgatgtagaaatcaatgatgagaaataccagataggtgattgggttcttttacataatccaaacgacatcaataaacccattgttggccagatttttagattatggtctactacagatggaaacaaatggttgaatgcttgctggtattttaggccagaacaaaccgttcatcgggtggataggttattctacaagaatgaggtcatgaaaactggtcaatatagagatcatcctattcaggatattaagggaaagtgctacgttattcattttaccagattccagcgtggggatcctagcacgaaagtcaatggtcctcaatttgtttgcgaattccgttataatgaaagtgataaggttttcaacaaaatcaggacttggaaagcttgcctgccggaagaactccgtgaccaagatgagcctacgatacctgttaatggaagaaaattttttaaatacccttctccaatagcagatttgttaccagcaaacgcaactctaaatgacaaagttccagaacccacggagggagccccaactgccccacctttggtaggcgctgtatatttaggccccaaattagagagggatgatctgggagagtattcaacttctgatgactgccctcgatacataatcagaccaaatgatccaccagaagaaggtaaaatagattacgaaacaggaacaataattacagataccttaaccacaagcagtatgcccagagtgaacagttcctccacaatacgtttacccactttaaagcagactaaatcaattcccagctccaatttcaggtcctcatcaaatactccactattgcatcagaacttcaatcagacttccaattttttgaaattagaaaacatgaataatagttctcataatttactatcacatccttccgttcctaagtttcaatcgccctctttattagaacagagtagtcgctctaaataccatagtgcaaaaaaacagacacagctatcatcaacagctcccaaaaagcctgcatctaaaagttttacattatcctcaatgattaataccttaactgctcatacctcgaagtacaacttcaaccatattgttattgaagccccgggtgcatttgtggttcctgtaccaatggaaaaaaatataagaaccatccaatcgacagaacgtttcagtagatcaaatctaaaaaacgctcaaaatctcggtaatactgctattaatgacataaatactgcaaatgagcaaataatatggttcaaagggcccggtgtaaaaatcacagagagagttattgattccggaaatgatttagtacgggtacctttgaatagatggttctgtaaaaacaaaaggagaaaactggattacgaagacattgaagaagatgttatggaaccaccaaatgacttcagcgaagatatgattgctaatatttttaatcctccgccgagcttgaatttagatatggatttaaatctaagcccatcctcgaataactcttctaatttcatggatttaagcacaattgcaagcggtgataacgatgggaaagaatgcgatacggcggaggagagtgaagacgaaaacgaagatacagaagacgagcacgaaattgaagatatcccgaccacgtctgcttttggcttaaattcttccgctgaataccttgcattcagattacgagaatttaataaattatga

SEQ ID NO: 4264 - DNA, 2787 bp, Artificial Sequence
  Description of Artificial Sequence: Synthetic polynucleotide
atggtggagcaagataatgggtttttacagaagttactcaaaacacaatacgatgctgtcttccatttaaaggatgaaaatggtatagaaatatatccaatattcaatgtattgccacctaaaaaagaatatccagactattacattataataaggaatccgatatctttaaacactttaaagaaaagattgccccattatacatctccacaagattttgttaacgattttgcgcaaattccttggaatgcaatgacatacaatgcaaaagattctgtaatttacaaatatgccattcttcttgagtcttttattaaaggaaagatcgtgcacaatataagaaaacattatcccgaggtgacatatccatctttgggtagaattccggaaatattcgcagagagtatgcaaccctccgatttatccagtaaccccattaatacacaggaaaatgatgaaaaggctggcttaaatccagagatgaaaatggctttcgcaaaattggatagttctatcactgaaaggaaaccaaccaaccaagattacaggatgcaacaaaaaaactctccagcgtttccaacccattctgcttctataacaccgcagccgttagcttcccctactccagttgttaactatgcaaatattacctctgcgcatcccaaaacccatgttagacgcggtagaccaccagtaattgatttgccctatgtattgaggattaagaatatcttgaagatgatgagaagagaggtcgaccaaaataataagacgcttaccctctgttttgaaaaattaccagatagaaacgaggagccaacctattactctgtcataacagatcccatttgtttgatggatattaggaaaaaggttaagtccagaaaatatagaaatttccatacttttgaggaagactttcaattaatgttaacaaattttaagctttattattctcaagatcagagcaatataataagagctcaattattggagaaaaacttcaatagattagtgagaattgaattatccaaacctgatgaagactatttacctgaaggtgaattaagatatcctttggatgatgtagaaatcaatgatgagaaataccagataggtgattgggttcttttacataatccaaacgacatcaataaacccattgttggccagatttttagattatggtctactacagatggaaacaaatggttgaatgcttgctggtattttaggccagaacaaaccgttcatcgtgtggataggttattctacaagaatgaggtcatgaaaactggtcaatatagagatcatcctattcaggatattaagggaaagtgctacgttattcattttaccagattccagcgtggggatcctagcacgaaagtcaatggtcctcaatttgtttgcgaattccgttataatgaaagtgataaggttttcaacaaaatcaggacttggaaagcttgcttaccggaagaactccgtgaccaagatgagcctacgatacctgttaatggaagaaaattttttaaatacccttctccaatagcagatttgttaccagcaaacgcaactttgaatgacaaagttccagaacccacggagggagccccaactgccccacctttggtaggcgctgtatatttaggccccaaattagagagggatgatttgggagagtattctacttctgatgactgccctcgttacataatcagaccaaatgatccaccagaagaaggtaaaatagattacgaaacaggaacaataattacagataccttaaccacaagcagtatgcccagagtgaacagttcctccacaatacgtttacccactttaaagcagactaaatccattcccagctccaatttcaggtcctcttccaatactccattgttgcatcagaacttcaatcagacttccaattttttgaaattagaaaacatgaataatagttctcataatttattatctcatccttccgttcctaagtttcaatctccctctttattagaacagagtagtcgctctaaataccatagtgcaaaaaaacagacacagttatcttctacagctcccaaaaagcctgcatctaaaagttttacattatcctctatgattaataccttaactgctcatacctccaagtacaacttcaaccatattgttattgaagccccgggtgcatttgtggttcctgtaccaatggaaaaaaatataagaaccatccaaagtacagaacgtttcagtagatctaatttgaaaaacgctcaaaatctcggtaatactgctattaatgacataaatactgcaaatgagcaaataatatggttcaaagggcccggtgtaaaaatcacagagagagttattgattccggaaatgatttagtaagagtacctttgaatagatggttctgtaaaaacaaaaggagaaaattggattacgaagacattgaagaagatgttatggaaccaccaaatgacttcagcgaagatatgattgctaatatttttaatcctccgccgagcttgaatttagatatggatttaaatttgagcccatcctctaataactcttctaatttcatggatttaagcacaattgcaagcggtgataacgatgggaaagaatgcgatacggcggaggagagtgaagacgaaaacgaagatacagaagacgagcacgaaattgaagatatcccgaccacgtctgcttttggcttaaattcttccgctgaataccttgcattcagattaagagaatttaataaattatga

SEQ ID NO: 4265 - DNA, 729 bp, Saccharomyces cerevisiae
atgtcctcgacagtgatttcattggctcatttctgcgacaagcatggcccaaggatcatatcagttacacaatccgcagaaaagggaacgctaggtgaagaattactagtgcctgattatccaactgaatcatattgcgaatcatgtcttttacagtttcctgaagagtcaactagatcgatgcggtgcttcatcgaagatgttccgtttataactacccaatattcttctataagataccaattgctaaattctattattaaaagagccttttctgaagaaacaatgatttatgataatatgccttttatattttttgatgatcttagaggattgaacttagttataggctttaaactgtatgatgaaaatgctagaggcaatgaaagaagatattgttttattttaacagtcgattccagaagccatgacgattctatgaaaatgttgagtgaacactggaactttatcatcggtggatttgataaaatgattgcatatattaaaaacattcataaaagcgaattcttggggaaaaataaaacggtggaaaacaatttggaaacattgaataataacgctttcattggctcatatttacgtgcaaacaaatctaaattcggccgtaatttggtgtctctgacggatgataaatttctcttcgtgcgaatacataaatggaattcatttttactccatacagtaatgaatgaaaataaattaccttga

SEQ ID NO: 4266 - DNA, 729 bp, Artificial Sequence
  Description of Artificial Sequence: Synthetic polynucleotide
atgtcctctacagtgatttctttggctcatttctgcgacaagcatggcccaaggatcatatctgttacacaatccgcagaaaagggaacgttaggtgaagaattattggtgcctgattatccaactgaaagttattgcgaaagttgtcttttacagtttcctgaagagtctactagaagtatgcgttgcttcatcgaagatgttccgtttataactacccaatattcttctataagataccaattgttgaattctattattaaaagagccttttctgaagaaacaatgatttatgataatatgccttttatattttttgatgatcttagaggattgaacttagttataggctttaaactttatgatgaaaatgctagaggcaatgaaagaagatattgttttattttaacagtcgattccagaagccatgacgattctatgaaaatgttgagtgaacactggaactttatcatcggtggatttgataaaatgattgcatatattaaaaacattcataaaagcgaattcttggggaaaaataaaacggtggaaaacaatttggaaacattgaataataacgctttcattggctcctatttacgtgcaaacaaatctaaattcggccgtaatttggtgtctttgacggatgataaatttctcttcgtgagaatacataaatggaattcttttttactccatacagtaatgaatgaaaataaattaccttga

SEQ ID NO: 4267 - DNA, 1008 bp, Saccharomyces cerevisiae
atgtgtgcaaagaagctcaaatacgctgctggcgatgactttgtacgctatgctacacctaaagaggccatggaggaaactagacgtgaattcgagaaagagaaacaacgacagcaacaaataaaggttactcaagcacaaactcccaacactagagtccactcagctccaattcccttacaaactcaatataacaaaaacagagcagaaaacggtcaccactcctatggttctccccaaagttattctccaagacatacgaaaacacctgtggatcctagatataatgttatcgcacagaaaccagcaggcaggcctatacctccagcgccaacccattataacaacttgaacacttccgctcaacggatagcttcctctcctcctcccctaattcacaatcaagcagtgcctgcacaactcttgaagaaagttgcacctgcttcgttcgatagcagagaagatgtacgagacatgcaagtggccacacagctatttcataaccatgatgtaaagggcaaaaaccgactgacagctgaggaactacagaacttactacaaaacgacgacaactcccatttttgtatatcatcagtagatgcgctgataaatttatttggtgcttccaggtttggcactgtcaaccaggcagaattcatcgccctatacaaaagagtgaaaagttggagaaaagtttatgtggacaatgatatcaacggatcgctcaccatttctgtaagcgaatttcataactcacttcaagaactaggatatctaataccttttgaagttagcgagaaaacatttgaccaatatgctgagtttataaacagaaatggaacaggaaaagaactaaagtttgataaattcgttgaggcgttagtttggctaatgagattaacaaaattattcaggaaattcgatactaatcaagaaggcattgcaaccatacagtacaaagattttatcgatgctacattatatttaggtcgtttcctacctcattga

SEQ ID NO: 4268 - DNA, 1008 bp, Artificial Sequence
  Description of Artificial Sequence: Synthetic polynucleotide
atgtgtgcaaagaagctcaaatacgctgctggcgatgactttgtacgctatgctacacctaaagaggccatggaggaaactagacgtgaattcgagaaagagaaacaaagacagcaacaaataaaggttactcaagcacaaactcccaacactagagtccactctgctccaattcccttacaaactcaatataacaaaaacagagcagaaaacggtcaccactcctatggttctccccaaagttattctccaagacatacgaaaacacctgtggatcctagatataatgttatcgcacagaaaccagcaggcaggcctatacctccagcgccaacccattataacaacttgaacacttccgctcaaagaatagcttcctctcctcctcccttaattcacaatcaagcagtgcctgcacaactcttgaagaaagttgcacctgcttctttcgatagcagagaagatgtaagagacatgcaagtggccacacagttatttcataaccatgatgtaaagggcaaaaacagattgacagctgaggaattacagaacttattacaaaacgacgacaactcccatttttgtatatcttctgtagatgcgttaataaatttatttggtgcttccaggtttggcactgtcaaccaggcagaattcatcgccctttacaaaagagtgaaaagttggagaaaagtttatgtggacaatgatatcaacggatctctcaccatttctgtaagcgaatttcataactctcttcaagaattaggatatttgataccttttgaagttagcgagaaaacatttgaccaatatgctgagtttataaacagaaatggaacaggaaaagaattgaagtttgataaattcgttgaggcgttagtttggttaatgagattaacaaaattattcaggaaattcgatactaatcaagaaggcattgcaaccatacagtacaaagattttatcgatgctacattatatttaggtcgtttcttacctcattga

SEQ ID NO: 4269 - DNA, 1539 bp, Saccharomyces cerevisiae
atgaagtcaaaagggagtcggttgtcaacagactgtcctgtcgaatttcccaagatagtctctggattcgctgaggaagtgaaaatacgtagacaaagttcccaaggacagtacgccgtcgattcacatcctccgaaaagccctgaactgaaacacagaagacagaggtcatcctcttttgttaacggtaaatgcaggaacagggaccttccattgttagataacaagaaagcacaagaaataaacaccaattcacacggccaagacatcggtatcaaaaacttaccacgtcaacgtgagttgttgaatgccaaaaatggaattgattttacgctgatggtggcgggtcaaagtggattgggtaaaaccacgtttatcaattccttattttctacttctttaattgatgatgacatcaaagaaaacaaacctattattcgttataaaagcattgtagaaggagatggaacacaccttaatttcaacgtcatcgatacacctggttttggtaacaatatggataatgcatttacgtggaggacaatggttaactatattgatgaagaaataagatcgtacattttccaagaagaacaacctgataggacaaaaatggttgataatagagtccattgttgtttgtactttctgagaccttcaaataagggaattgatactttagacgtcgtaacaatgaaaaaattagcgaagagagtgaatttaatcccggttattgctaaatcagatttgctaacgaaagaggaattgaaaaacttcaaaacacaagttagagaaataataagagtacaagatatccctgtatgtttctttttcggcgatgaagttttgaatgcaacacaagatatttttcaaaaatatccattcagtataattgcatctaatgagtacatttttaatgaaaagggcgaaaaagttaaaggaagacaatacaaatggggcgctgttgacattgaaaatgaaaagtactgtgacttcaaaatcttgcaaaagacgatttttgattggaatttaattgatcttgtagaaagtaccgaggattattatgaaaaatgcagatctgaaatgctaagaactaggctattaaaggccagagattgcttaacaacgaaaagtgttgacataacggaagaacaaaggaaatttttggaggaagaaatgaacttcgatgaaatcgaggaaaacaaactcaaaaattacaagtgctatgaaataattaataaaacggtcatggataaggtggctacagaatgggatcctgaatttataactagacaattagaagctaagaaaaaattcaacgagctgtccaacagagaaatttcaaaatttcgagactggaaaaagagcctattcatggaacaagagaattttaaccaagagattgaacaattgaatcacaagttggaaaacttacaactggaatgtcaggacttggaatacaagctgttaatcggaaaaagttccaacagccattccacagatagtgctactttagtaaacgttcacatcaaaaggtag

SEQ ID NO: 4270 - DNA, 1539 bp, Artificial Sequence
  Description of Artificial Sequence: Synthetic polynucleotide
atgaagagtaaagggagtagattgagtacagactgtcctgtcgaatttcccaagatagtctctggattcgctgaggaagtgaaaatacgtagacaaagttcccaaggacagtacgccgtcgattctcatcctccgaaaagccctgaattgaaacacagaagacagaggtcttcctcttttgttaacggtaaatgcaggaacagggaccttccattgttagataacaagaaagcacaagaaataaacaccaattctcacggccaagacatcggtatcaaaaacttaccacgtcaacgtgagttgttgaatgccaaaaatggaattgattttacgttgatggtggcgggtcaaagtggattgggtaaaaccacgtttatcaattccttattttctacttctttaattgatgatgacatcaaagaaaacaaacctattattcgttataaaagcattgtagaaggagatggaacacaccttaatttcaacgtcatcgatacacctggttttggtaacaatatggataatgcatttacgtggaggacaatggttaactatattgatgaagaaataagatcttacattttccaagaagaacaacctgataggacaaaaatggttgataatagagtccattgttgtttgtactttttaagaccttccaataagggaattgatactttagacgtcgtaacaatgaaaaaattagcgaagagagtgaatttaatcccggttattgctaaatctgatttgttgacgaaagaggaattgaaaaacttcaaaacacaagttagagaaataataagagtacaagatatccctgtatgtttctttttcggcgatgaagttttgaatgcaacacaagatatttttcaaaaatatccattcagtataattgcatctaatgagtacatttttaatgaaaagggcgaaaaagttaaaggaagacaatacaaatggggcgctgttgacattgaaaatgaaaagtactgtgacttcaaaatcttgcaaaagacgatttttgattggaatttaattgatcttgtagaaagtaccgaggattattatgaaaaatgcagatctgaaatgttgagaactaggttattaaaggccagagattgcttaacaacgaaaagtgttgacataacggaagaacaaaggaaatttttggaggaagaaatgaacttcgatgaaatcgaggaaaacaaactcaaaaattacaagtgctatgaaataattaataaaacggtcatggataaggtggctacagaatgggatcctgaatttataactagacaattagaagctaagaaaaaattcaacgagctttccaacagagaaatttccaaatttagagactggaaaaagagcttattcatggaacaagagaattttaaccaagagattgaacaattgaatcacaagttggaaaacttacaattggaatgtcaggacttggaatacaagcttttaatcggaaaaagttccaacagccattccacagatagtgctactttagtaaacgttcacatcaaaaggtga

SEQ ID NO: 4271 - DNA, 930 bp, Saccharomyces cerevisiae
atgtctgccgttttcaacaacgctaccctttcaggtctagtccaagcaagcacctactcacaaactttgcaaaatgtcgcccattaccaacctcaattgaatttcatggagaaatactgggccgcatggtacagttacatgaacaatgatgttttggccaccggtctaatgttctttttattgcatgaatttatgtatttctttagatgtttgccatggttcatcatcgaccaaattccatactttagaagatggaagttacaaccaactaagattccaagtgctaaggaacaactatactgtttgaaatccgttcttctatctcatttcttggtcgaggccatccctatctggaccttccacccaatgtgtgaaaaattaggtattactgtcgaagttccattcccatctttgaaaacaatggctctagaaattggtctattcttcgtcttggaagatacatggcattactgggctcaccgtctattccactacggtgtcttctacaagtacattcacaagcaacatcacagatacgctgctccattcggtctttctgctgaatatgctcatcctgctgaaactttgtctttgggttttggtaccgttggtatgccaattctttacgtcatgtacactggtaaattacacttgttcactctatgtgtatggatcaccctaagattattccaagctgttgactctcattctggttatgacttcccatggtctttgaacaagatcatgccattctgggctggcgctgaacaccacgatttgcatcatcactactttattggtaactacgcttcctctttcagatggtgggattactgtctagacactgaatctggtccagaagctaaggcctccagagaagaaagaatgaagaagagagctgaaaacaatgctcaaaagaagactaactaa

SEQ ID NO: 4272 - DNA, 930 bp, Artificial Sequence
  Description of Artificial Sequence: Synthetic polynucleotide
atgtctgccgttttcaacaacgctaccctttctggtttggtccaagcaagcacctactctcaaactttgcaaaatgtcgcccattaccaacctcaattgaatttcatggagaaatactgggccgcatggtacagttacatgaacaatgatgttttggccaccggtttgatgttctttttattgcatgaatttatgtatttctttagatgtttgccatggttcatcatcgaccaaattccatactttagaagatggaagttacaaccaactaagattccaagtgctaaggaacaattgtactgtttgaaatccgttcttttatctcatttcttggtcgaggccatccctatctggaccttccacccaatgtgtgaaaaattaggtattactgtcgaagttccattcccatctttgaaaacaatggctttggaaattggtcttttcttcgtcttggaagatacatggcattactgggctcaccgtttattccactacggtgtcttctacaagtacattcacaagcaacatcacagatacgctgctccattcggtctttctgctgaatatgctcatcctgctgaaactttgtctttgggttttggtaccgttggtatgccaattctttacgtcatgtacactggtaaattacacttgttcactttgtgtgtatggatcaccttgagattattccaagctgttgactctcattctggttatgacttcccatggtctttgaacaagatcatgccattctgggctggcgctgaacaccacgatttgcatcatcactactttattggtaactacgcttcctctttcagatggtgggattactgtttggacactgaatctggtccagaagctaaggcctccagagaagaaagaatgaagaagagagctgaaaacaatgctcaaaagaagactaactga

SEQ ID NO: 4273 - DNA, 4077 bp, Saccharomyces cerevisiae
atgactgattatattttgccgggtcccaaggccttatctcagttcagagtcgataatctaattaaagatataaactcctatacaaacagtacttctgtcatcaatgaattgcgttcgtgttacattcactatgtcaacggcatcgctcaaaatttgtctgaacaggacactaaattgctagaagttttgttgacttacgattctgctttagatattgctaacgatccattagcaagacaattaaacgatgctgtcgctaataatttacccagttcagctcttggcgaagacacatatttgattagagttgttcctagatcaggcactatctctccttggtcttccaaggctactaatattgctcatgtatgcgggctacaagacaaagttcaacgtattgaaagaggtttagccttactcataaagactgttccaggtttccctcttttggaaaatctaaatgatatttcattgaagtgtgtctacgataggatgacacaacaattatatctgaccgaaccaccaaatacgatgagtattttcacacatgaagagccaaagccattagttcacgttcctttaactcctaaggacactaaacagtctccaaaggatattttatccaaagctaatacggaattgggtttagctctagatagtggagaaatggaatatttgattcatgcattcgtcgaaactatgaaaagagatcctactgatgttgagttatttatgttcgctcaagttaattctgaacattgtcgtcacaagatcttcaatgctgattggaccattgatggaataaaacaacaattcaccttgtttcaaatgattagaaatacccataaattaaacccagaatatactattagcgcctattctgataatgcagccgttttggatagtgaaaatgatgcctttttctttgcaccaaattcaactacaaaggaatggacctctacaaaggaaagaattccattacttatcaaagtcgaaactcacaaccatccaacagccgtgtctcctttcccaggtgctgctacaggttctggtggtgaaatcagagacgagggtgctacaggcagaggttccaagactaagtgtggtttgagtggattctctgtcagcgaccttttgataccaggtaatgaacaaccttgggagttgaatattggtaagccttaccatattgcatctgcattagatattatgattgaggctcctttgggttcagctgcatttaacaatgagtttggtagaccttgtataaacggttacttcagaactttaactacaaaggttttgaatcaccaagggaaggaggaaatcagagggttccacaagccaattatgattgcgggtggtttcggtactgttagacctcaatttgctttgaagaacaccccaataactccaggctcttgtttaattgtacttggtggtcaatctatgctgattggtttaggtggtggtgctgcttcttctgtagcttccggtgaaggttccgccgatttggattttgcttctgtacaaagagggaaccccgaaatggaacgtcgttgccaacaagtgattgacgcttgtgttgccttaggtaacaataatcctatccaatctattcacgatgttggtgctggtgggttatccaacgctttgccagaattggttcatgacaatgacttgggtgctaaattcgatattagaaaggtcctctccttagaacctggtatgtcaccaatggaaatttggtgtaatgaatcacaagaacgttatgttcttggtgtttctcctcaagacttatccattttcgaggaaatctgtaagagagaaagagcaccatttgctgtcgtcggtcacgcaaccgctgaacaaaaattgattgtagaagatcctcttttgaaaacaactccaattgatttagaaatgccaattttatttggtaagcctccaaagatgtcaagagaaaccataactgaagcactaaatctaccagaggcaaatttgagcgaaattccttccctacaagatgctattcaaagagttctaaacttaccatctgttggctcaaagtcatttttgattactattggtgacagatccgtcacaggtctaattgatagggatcaatttgttggtccttggcaagtacctgttgcggatgtcggtgttaccggtacctctttgggtgagacaataatttccacaggtgaagccatggctatgggtgaaaaaccagttaacgccctaatctccgcatctgcttccgctaaattatctgtggcagaatctttattgaacatattcgctgctgatgtgaaatctttaaatcatatcaagctatctgctaactggatgtctccagcctctcatcaaggtgagggttctaagttatatgaagccgttcaagcattaggtctggatttatgtcctgcattaggtgttgctatccctgttggtaaggattccatgtccatgaagatgaaatgggatgataaggaagttactgcaccattgtcattgaatatcacagcatttgcaccagttttcaacactagtaaaacgtggactccattgctaaatagaaacacagatgattctgtccttgtcttggttgatctatcagctaaacaagagactaagtcactaggtgcctctgctttgttgcaagtttacaaccaagttggtaacaagtcgcctactgtgtatgataacgccattttgaagggtttcttggaaagtttaatccaattgcatcaacaaaaggaggatatagtgcttgcctaccatgataggtctgatggtggtctactaatcactttactggaaatggcatttgcttccagatgcggcttagaaatcaacattgacggtggagacctagaaagtcaattaacaaacctattcaatgaagaattaggtgcagtattccagatttctgctaagaacttgagcaagttcgaaaaaatcttgaacgagaacggagttgctaaagaatatatttctattgttggtaagccatccttccaaagccaggaaatcaagattattaactccacaacaaatgatgtaatttacgccaattcgagatctgaattggagcaaacttggagtaagacatcttacgaaatgcagaaattgagagacaatccaaaaacagccgaagaagagtttgccagtatcacggacgatagagatcccggtttgcagtatgccctaacatacaacccagccgatgatatgaagatcggattagaattatccagtcaaaggccaaaggttgctatcttaagagagcaaggtgtgaacggtcaaatggaaatggcatggtgcttccaacaagctggattcaactcagtggatgtcactatgacagatttgctagaaggtaggttccatttggatgacttcatcggtcttgccgcatgtggtggtttctcttatggtgatgtcttaggtgcaggtgcgggttgggctaaatccgtattgtatcacgaaggtgtgcgctcgcaattttctaagttcttcaatgaaagacaagatacatttgcttttggtgcttgtaatggttgtcaattcttgagtagattaaaagatatcatacccgggtgtgaaaactggccaagtttcgaaagaaatgttagtgaacaatatgaagcccgtgtatgtatggtgcaaatatctcaagaaaaggacaattctagcgaggaatctgttttcttgaatggcatggcaggatccaaattgccaattgctgtcgcacatggtgaaggtaaagcaacattttctaaaagcgctgaacaactggaaaagttcgaaaaggatggtttatgttgtataaggtatgtggacaactacggtaacgtcaccgaaaggttccccttcaaccccaatgggtcgaccaatggtattgccggtatcaagtcaccaaatggtagagtgcttgccatgatgccacatcctgaaagagtttgcagattggaggccaattcctggtatccagagggcaaatacgaagagtggggtggatacggtccatggattagattattcagatctgccagaagatgggtcggttga

SEQ ID NO: 4274 - DNA, 4077 bp, Artificial Sequence
  Description of Artificial Sequence: Synthetic polynucleotide
atgactgattatattttgccgggtcccaaggccttatctcagttcagagtcgataatttaattaaagatataaactcctatacaaacagtacttctgtcatcaatgaattgcgttcctgttacattcactatgtcaacggcatcgctcaaaatttgtctgaacaggacactaaattgttggaagttttgttgacttacgattctgctttagatattgctaacgatccattagcaagacaattaaacgatgctgtcgctaataatttacccagttctgctcttggcgaagacacatatttgattagagttgttcctagaagcggcactatctctccttggtcttccaaggctactaatattgctcatgtatgcgggttgcaagacaaagttcaacgtattgaaagaggtttagccttactcataaagactgttccaggtttccctcttttggaaaatttgaatgatatttctttgaagtgtgtctacgataggatgacacaacaattatatttgaccgaaccaccaaatacgatgagtattttcacacatgaagagccaaagccattagttcacgttcctttaactcctaaggacactaaacagtctccaaaggatattttatccaaagctaatacggaattgggtttagctttagatagtggagaaatggaatatttgattcatgcattcgtcgaaactatgaaaagagatcctactgatgttgagttatttatgttcgctcaagttaattctgaacattgtcgtcacaagatcttcaatgctgattggaccattgatggaataaaacaacaattcaccttgtttcaaatgattagaaatacccataaattaaacccagaatatactattagcgcctattctgataatgcagccgttttggatagtgaaaatgatgcctttttctttgcaccaaattctactacaaaggaatggacctctacaaaggaaagaattccattacttatcaaagtcgaaactcacaaccatccaacagccgtgtctcctttcccaggtgctgctacaggttctggtggtgaaatcagagacgagggtgctacaggcagaggttccaagactaagtgtggtttgagtggattctctgtcagcgaccttttgataccaggtaatgaacaaccttgggagttgaatattggtaagccttaccatattgcatctgcattagatattatgattgaggctcctttgggttctgctgcatttaacaatgagtttggtagaccttgtataaacggttacttcagaactttaactacaaaggttttgaatcaccaagggaaggaggaaatcagagggttccacaagccaattatgattgcgggtggtttcggtactgttagacctcaatttgctttgaagaacaccccaataactccaggctcttgtttaattgtacttggtggtcaatctatgttgattggtttaggtggtggtgctgcttcttctgtagcttccggtgaaggttccgccgatttggattttgcttctgtacaaagagggaaccccgaaatggaacgtcgttgccaacaagtgattgacgcttgtgttgccttaggtaacaataatcctatccaatctattcacgatgttggtgctggtgggttatccaacgctttgccagaattggttcatgacaatgacttgggtgctaaattcgatattagaaaggtcctctccttagaacctggtatgtctccaatggaaatttggtgtaatgaatctcaagaacgttatgttcttggtgtttctcctcaagacttatccattttcgaggaaatctgtaagagagaaagagcaccatttgctgtcgtcggtcacgcaaccgctgaacaaaaattgattgtagaagatcctcttttgaaaacaactccaattgatttagaaatgccaattttatttggtaagcctccaaagatgagtagagaaaccataactgaagcattgaatttaccagaggcaaatttgagcgaaattccttccttacaagatgctattcaaagagttttgaacttaccatctgttggctccaagagctttttgattactattggtgacagatccgtcacaggtttgattgatagggatcaatttgttggtccttggcaagtacctgttgcggatgtcggtgttaccggtacctctttgggtgagacaataatttccacaggtgaagccatggctatgggtgaaaaaccagttaacgccttgatctccgcatctgcttccgctaaattatctgtggcagaatctttattgaacatattcgctgctgatgtgaaatctttaaatcatatcaagttatctgctaactggatgtctccagcctctcatcaaggtgagggttctaagttatatgaagccgttcaagcattaggtttggatttatgtcctgcattaggtgttgctatccctgttggtaaggattccatgtccatgaagatgaaatgggatgataaggaagttactgcaccattgtctttgaatatcacagcatttgcaccagttttcaacactagtaaaacgtggactccattgttgaatagaaacacagatgattctgtccttgtcttggttgatttatctgctaaacaagagactaagtctttgggtgcctctgctttgttgcaagtttacaaccaagttggtaacaagtctcctactgtgtatgataacgccattttgaagggtttcttggaaagtttaatccaattgcatcaacaaaaggaggatatagtgcttgcctaccatgataggtctgatggtggtttattgatcactttattggaaatggcatttgcttccagatgcggcttagaaatcaacattgacggtggagacttggaaagtcaattaacaaacttgttcaatgaagaattaggtgcagtattccagatttctgctaagaacttgagcaagttcgaaaaaatcttgaacgagaacggagttgctaaagaatatatttctattgttggtaagccatccttccaaagccaggaaatcaagattattaactccacaacaaatgatgtaatttacgccaattctagatctgaattggagcaaacttggagtaagacatcttacgaaatgcagaaattgagagacaatccaaaaacagccgaagaagagtttgccagtatcacggacgatagagatcccggtttgcagtatgccttaacatacaacccagccgatgatatgaagatcggattagaattatccagtcaaaggccaaaggttgctatcttaagagagcaaggtgtgaacggtcaaatggaaatggcatggtgcttccaacaagctggattcaactctgtggatgtcactatgacagatttgttggaaggtaggttccatttggatgacttcatcggtcttgccgcatgtggtggtttctcttatggtgatgtcttaggtgcaggtgcgggttgggctaaatccgtattgtatcacgaaggtgtgcgctctcaattttctaagttcttcaatgaaagacaagatacatttgcttttggtgcttgtaatggttgtcaattcttgagtagattaaaagatatcatacccgggtgtgaaaactggccaagtttcgaaagaaatgttagtgaacaatatgaagcccgtgtatgtatggtgcaaatatctcaagaaaaggacaattctagcgaggaatctgttttcttgaatggcatggcaggatccaaattgccaattgctgtcgcacatggtgaaggtaaagcaacattttctaaaagcgctgaacaattggaaaagttcgaaaaggatggtttatgttgtataaggtatgtggacaactacggtaacgtcaccgaaaggttccccttcaaccccaatgggtccaccaatggtattgccggtatcaagtctccaaatggtagagtgcttgccatgatgccacatcctgaaagagtttgcagattggaggccaattcctggtatccagagggcaaatacgaagagtggggtggatacggtccatggattagattattcagatctgccagaagatgggtcggttga

SEQ ID NO: 4275 - DNA, 951 bp, Saccharomyces cerevisiae
atgttaaagaggttagccaatcgtcaaaatggttttgcgtcattctcgtgcagctcagtcggtctgcgatatggtaggactaatccaagtacaaagagaagcttttcactttttcaaagtgtagcggacacgtttttaacagtgcatgaagcctcacatataccatggatagtgcttgttcctttgactactatgacccttagaaccctcgtgacgctgccattcagtatatggcagcggaggagaattttgaaacaacaagaactgaggaaattagtacagccaataacgcccattattaaacttcgactggcagccgttactaataaaaagtctagaaatgccgccagaattagctccaacggttctttcatgccgttacaactacagaatgctggcgttttgacaccagaacaaattacactattggcagtgaaagagacaagaaagaggcagaaaaaattattcaagaagtacaatgtacccctatggaaaaatgccttactgccaatggtgcaaattcctctttgggtcacagtctccatgggcatcaggaccctaacagagacacagcttatagaaagtttttatccttcctggttttccgcactgggtttcagttcctttgatctaagctcaccgctagtagcaatgcctctactagcgcccattttggtggggactctggcggtattaaacgtggaactcaatggccgactgatgtttagctcaagtttgtcatcgcaaggtataaagacaatttcaaggaattcgacaagagtccaagaggcaatgactagtatactgaacgtatcgagactcggttgtgtcgttatgctagcaatgtcctcacaggctccattccttctttcgctctattggatatcatcacagctattctccctggtgcaaaatatcatattaaattggatttatccttaccaacgatga

SEQ ID NO: 4276 - DNA, 951 bp, Artificial Sequence
  Description of Artificial Sequence: Synthetic polynucleotide
atgttaaagaggttagccaatcgtcaaaatggttttgcgtctttcagttgcagctctgtcggtttaagatatggtaggactaatccaagtacaaagagaagcttttccctttttcaaagtgtagcggacacgtttttaacagtgcatgaagcctctcatataccatggatagtgcttgttcctttgactactatgacccttagaaccctcgtgacgttaccattcagtatatggcagagaaggagaattttgaaacaacaagaattgaggaaattagtacagccaataacgcccattattaaacttagattagcagccgttactaataaaaagtctagaaatgccgccagaattagctccaacggttctttcatgccgttacaattgcagaatgctggcgttttgacaccagaacaaattacattattggcagtgaaagagacaagaaagaggcagaaaaaattattcaagaagtacaatgtacccctttggaaaaatgccttattaccaatggtgcaaattcctctttgggtcacagtctccatgggcatcaggaccttaacagagacacagcttatagaaagtttttatccttcctggttttccgcattgggtttcagttcctttgatttgagctctccgttagtagcaatgcctttattggcgcccattttggtggggactttggcggtattaaacgtggaactcaatggcagattaatgtttagcagtagtttgtcttctcaaggtataaagacaatttctaggaattctacaagagtccaagaggcaatgactagtatattaaacgtatctagactcggttgtgtcgttatgttagcaatgtcctctcaggctccattccttctttctctctattggatatcttctcagttattctccttagtgcaaaatatcatattaaattggatttatccttaccaaagatga

SEQ ID NO: 4277 - DNA, 309 bp, Saccharomyces cerevisiae
atgtctagtgaaagagcctgtatgctgtgtggcatagtgcagaccacaaatgagtttaatagagatggttgtcccaactgtcagggtatttttgaagaggcaggtgtttctacaatggaatgtacgtcgccttctttcgagggcctcgtaggaatgtgtaagcctactaagtcgtgggtagcaaagtggctgagcgtagatcatagtatagctggtatgtacgccatcaaggtcgatggtagactaccagctgaggttgtggagctgttgcctcactacaaaccgagggatggcagtcaagttgagtaa

SEQ ID NO: 4278 - DNA, 309 bp, Artificial Sequence
  Description of Artificial Sequence: Synthetic polynucleotide
atgtctagtgaaagagcctgtatgctttgtggcatagtgcagaccacaaatgagtttaatagagatggttgtcccaactgtcagggtatttttgaagaggcaggtgtttctacaatggaatgtacgtctccttctttcgagggcctcgtaggaatgtgtaagcctactaagtcttgggtagcaaagtggttaagcgtagatcatagtatagctggtatgtacgccatcaaggtcgatggtagattaccagctgaggttgtggagttattgcctcactacaaaccgagggatggcagtcaagttgagtga

SEQ ID NO: 4279 - DNA, 1782 bp, Saccharomyces cerevisiae
atgacaatttcgaataaatcgtggaggagctacttcccacatttgagaaaactacccgaagatgatcagtacttatactcagacgatactaactccagtatcatagctgaagaggagctacatcatagcgtagataagtcctcgaagacagacgttacggcagaaactacagctgtagaacctcatcctcacaatttaaggcatgacttgccatatgaagtgagagatgaagctgggcgtaaatggtggaaatattttgatgaattcgagtatcgtgttaataaggaatacaagaaatcacgtaagtggtacgagtttttgtatcctaatcatactactcaaaccaaggctgaaagacggcttctttacaagctagacattattattgctttatacttttttatgttatgttggtccaagtcagtggatttgaataactacactaacgcatatgtttccaatatgaaggaagatttaaacatgaaaggtaatgattacgtttacacttctactattgctaatgttggtgccattgtcttccaattaccatttatgtatttgttaccaagatttccctctcatattattttgcctgtaatggacttgggctggacttggttcacatttgcatgttatagggcaaactcactagccgaactaagggcttacagatttattttaagtgcctttggcgctgcttactacccagtgtcccaatatatactaggttgttggtatgccccagatgaaattaattcaagagtctgtttattcttttgtgggcaacaattgggttccgtgacttcaggacttctgcaaagtcgcatattcaaaagtttgaacggcgtccatggtctagcaggctggagatggatgtttctgatcgatgccattgcaatttctcttcccacggctattattggtttttttgttattcccggtgtaccatctaagtgttactctttatttctgactgacgaagaaatacgaattgcaagggccagaaataagaggaaccaaatcaaagatggtgttgataaaagtaagctagccccattatggagcagaaaactttggaagaaagtattttgtactccagcattctgggtacttgttgtttttgatacatgttcgtggaataacatgactgcgtatagtggttcatatactttgtggttaaagtctaatacaaagtactccattgcccaagtgaacaacctgagtgttatacccgcatgtttaggatttgcgtatgtgattttttgtgcctttggtgccgatttatttagatgtaagtggatattcatggtttttgctgctataatgaataccgtttcttgtgccttacttatcaagtgggatattccttcgaaagctaaatggtacgctttcttcaccacgtatttcagtgtggccgcatcgccttgtctatggtcgtttattaatgacttcttaaggtttgatcctcaggtgaaggctattacatggatcgccatttattccttctctcaatccacttacgcctggattcctaccttggcgtggcctaccgtggagtcaccacgttttaagactggttacaccgtgagcttaatttttggtgctatttacggtttatggacgtttgttgtactttttttttacaagagaaacgaaaagaaacatgctctaggtaatggtatcatcttgtatgatagtaataagggtgaagagcttccagaatttgtaaagaaaaatatggaggaaagagatggttactactatttaaagcggtcctcgtag

SEQ ID NO: 4280 - DNA, 1782 bp, Artificial Sequence
  Description of Artificial Sequence: Synthetic polynucleotide
atgacaatttctaataaaagttggaggagctacttcccacatttgagaaaattgcccgaagatgatcagtacttatacagtgacgatactaactccagtatcatagctgaagaggagttacatcatagcgtagataagtcctccaagacagacgttacggcagaaactacagctgtagaacctcatcctcacaatttaaggcatgacttgccatatgaagtgagagatgaagctgggcgtaaatggtggaaatattttgatgaattcgagtatcgtgttaataaggaatacaagaaatctcgtaagtggtacgagtttttgtatcctaatcatactactcaaaccaaggctgaaagaagacttctttacaagttggacattattattgctttatacttttttatgttatgttggtccaagtctgtggatttgaataactacactaacgcatatgtttccaatatgaaggaagatttaaacatgaaaggtaatgattacgtttacacttctactattgctaatgttggtgccattgtcttccaattaccatttatgtatttgttaccaagatttccctctcatattattttgcctgtaatggacttgggctggacttggttcacatttgcatgttatagggcaaactctttggccgaattgagggcttacagatttattttaagtgcctttggcgctgcttactacccagtgtcccaatatatattaggttgttggtatgccccagatgaaattaattctagagtctgtttattcttttgtgggcaacaattgggttccgtgacttctggacttttacaaagtcgcatattcaaaagtttgaacggcgtccatggtttggcaggctggagatggatgtttttgatcgatgccattgcaatttctcttcccacggctattattggtttttttgttattcccggtgtaccatctaagtgttactctttatttttaactgacgaagaaataagaattgcaagggccagaaataagaggaaccaaatcaaagatggtgttgataaaagtaagttggccccattatggagcagaaaactttggaagaaagtattttgtactccagcattctgggtacttgttgtttttgatacatgttcttggaataacatgactgcgtatagtggttcttatactttgtggttaaagtctaatacaaagtactccattgcccaagtgaacaacttgagtgttatacccgcatgtttaggatttgcgtatgtgattttttgtgcctttggtgccgatttatttagatgtaagtggatattcatggtttttgctgctataatgaataccgtttcttgtgccttacttatcaagtgggatattccttccaaagctaaatggtacgctttcttcaccacgtatttcagtgtggccgcatctccttgtttatggtcttttattaatgacttcttaaggtttgatcctcaggtgaaggctattacatggatcgccatttattccttctctcaatccacttacgcctggattcctaccttggcgtggcctaccgtggagtctccacgttttaagactggttacaccgtgagcttaatttttggtgctatttacggtttatggacgtttgttgtactttttttttacaagagaaacgaaaagaaacatgctttgggtaatggtatcatcttgtatgatagtaataagggtgaagagcttccagaatttgtaaagaaaaatatggaggaaagagatggttactactatttaaagaggtcctcttga

SEQ ID NO: 4281 - DNA, 879 bp, Saccharomyces cerevisiae
atgacatcactgaatatcatgggaagaaagtttattctagaaagggccaaaagaaatgacaacattgaagaaatatatacttcggcctatgtctctctaccctcctcaactgatacacgtttgcctcacttcaaagcaaaagaagaggactgtgatgtttacgaggaagggaccaatttagtgggtaagaatgctaaatatacctacagatcccttggtagacatttagattttttgaggccaggattgagatttggcggttcgcaatcgtcaaagtacacgtattatacggtggaagtgaagattgataccgtaaacttgccactttacaaggattcgcgttctttggacccgcatgtcacaggtactttcactattaaaaatttaacaccagtcctagataaagttgttaccctttttgaagggtatgtcatcaattataaccaattcccgttatgttcactgcattggcccgctgaggagacgctcgacccttatatggctcagagagaaagtgattgctctcattggaagaggtttggtcattttggttctgataactggtcgttaacggaaagaaattttggtcagtataatcatgaaagtgcagaatttatgaatcaacgatatatttatcttaaatggaaggaaaggttcctacttgatgatgaggaacaagaaaatctgatgttggacgataatcatcatctggaaggcgcgtcatttgagggattttactatgtgtgtttagaccagctaacaggttcagtggaaggctactactatcatcccgcttgtgaattgtttcaaaaactcgaactcgttccaaccaactgcgacgcattgaacacctactcaagtggatttgaaattgcctaa

SEQ ID NO: 4282 - DNA, 879 bp, Artificial Sequence
  Description of Artificial Sequence: Synthetic polynucleotide
atgacatctttgaatatcatgggaagaaagtttattttggaaagggccaaaagaaatgacaacattgaagaaatatatacttctgcctatgtctctttaccctccagcactgatacacgtttgcctcacttcaaagcaaaagaagaggactgtgatgtttacgaggaagggaccaatttagtgggtaagaatgctaaatatacctacagatcccttggtagacatttagattttttgaggccaggattgagatttggcggttctcaatcttccaagtacacgtattatacggtggaagtgaagattgataccgtaaacttgccactttacaaggattctcgttctttggacccgcatgtcacaggtactttcactattaaaaatttaacaccagtcttggataaagttgttaccctttttgaagggtatgtcatcaattataaccaattcccgttatgttctttgcattggcccgctgaggagacgctcgacccttatatggctcagagagaaagtgattgctctcattggaagaggtttggtcattttggttctgataactggtctttaacggaaagaaattttggtcagtataatcatgaaagtgcagaatttatgaatcaaagatatatttatcttaaatggaaggaaaggttcttgcttgatgatgaggaacaagaaaatttaatgttggacgataatcatcatttggaaggcgcgtcttttgagggattttactatgtgtgtttagaccagttgacaggttctgtggaaggctactactatcatcccgcttgtgaattgtttcaaaaactcgaactcgttccaaccaactgcgacgcattgaacacctactctagtggatttgaaattgcctga

SEQ ID NO: 4283 - DNA, 2415 bp, Saccharomyces cerevisiae
atggctgcgggtcaaaaaaaatatatatgttccttttgtttgaagcctttctcgagatccgagcacaagataaggcatgaaaggtctcatgcgggcgtgaagcctttccagtgccaagtctgtaaacactcttttgttagacgcgatctcttacagcgacacatcaggactgtccacagaaccttcctcttatccagttacgcgtcaatgacaggcgataaggctgatatccctgtatcacttggcgttggtgacgttgattcgacttcacccagagatatcaaaatggaaacactcgttaattcgatgattaaggtcaacagcggccttatcaatattcactatcatagtagtaatgttgaaaaaatggataagcagcaacgttgtgtgattgggaaggagtcctctagtttaaagaaagggaaaagccgctttaagcaggttaaaagccggttggagtcctccatcagtgtaaaaattttgcaagaatattcattagattttattagctcaagagatattctaactttcttcagaatgggtgtaagccacttggtagaaaataagatcttccaaaatttctttccagacctgttctcatcactacaaaatgacgagctggtggaaagtttttggattaacaagccttttggtctcataatagcttgtctgggtatgtccatttcgttaaatcaagattctcaaaaactatggtttatctgttgtacgaatttgtatgctagctcatctaaacatgacaatgactttgacactgaggacattttgtcacagacagagcaacatgatgtttttgccttgattctattttattctcttctagtaatgttggagaataacattcctgtttctaattccattaaaaagttcgatgtgttttcaatgcttcaagatattctgaagccattcaccgtggcatcctccagttaccattatttgaatagtaaggaaaatgcatggttcatattcgatctatgggtcaatatcttgcgcgattcaaacaacttcaacaacgattctttactaatatttggttggttcgtcaatcaagagtttatttcgtctaatccacttaaggacttcatatacaagggaccgtcaatgtccactactgacttaactttaaagcatatcaatattttggcagattccgcgtacgtgtattttataataaagaagacttatccgcaagagctgccatctgattttagagtgcatgatttgctggtttacttgaatgaatgtttcgtaatgcagcagccgatcaaacctgaaactagtgcaaacccctctttatttgcgaacgttatgaacgccaggattacggactgcaaatcgaaaagtaactggttattgtgggaaacgatttggttcgaattcatcaacaacttgactttgagaaatgggaccacaaggaacatatggttcattgataactttccacaggtatcgacctcgtgcttacttcatcattcttcctcatttgttgatgaaaccttgatcaccacgaacttatcaatcatatcaatgcttcttaatttgaagtctttcacgctggcatctttaaacccaaggaatattcagttaattaccgacattgtcagcttccaactaaaattgttttcatcggagttaattgcaagctcggatgtttcaccatcacaagtatctcaattactagtaaaccccaatgttcacctaatgttatatttctggttcgataccatttatgtacaacgtcagagctacctttcatcaacagagaaagaggaatttgagaaggttgaagtgtttgtgaatgactacattataacacaccaaaagaacttggtgacagacttacactccattttgttcgatttttggtcagattccttcattgcttaccatatactactgcatgctattgtatcttcattaagagataatattctttacccatacttaatctactcccctcacctgaatgaccagacgaaagcattgttgactgatatctctaattggtcttgttttgctcttcaacagccgtttcgcaagacttcaagaggttctttatctggtgcttctgatatgaaatcgttttcagtagcatcatgtttgccactctctcctaatttcctaaagagagattcaaactgtaataagattctcctgcccccattagatataaaagccattgaacctatctcaacgagtaattacacctacgtgaactcggcccctaagcaacaagagaaggaacaaccattgttaagggcaacaggaaacaatatcaatttagtccaaacaatagtggtcccaccccaggtaaacatggaatcacaagaattctcagcttcttcaactgacaataaacaaagtaaaaacattgaaatttttagccaaataaaataa

SEQ ID NO: 4284 - DNA, 2415 bp, Artificial Sequence
  Description of Artificial Sequence: Synthetic polynucleotide
atggctgcgggtcaaaaaaaatatatatgttccttttgtttgaagcctttcagtagatccgagcacaagataaggcatgaaaggtctcatgcgggcgtgaagcctttccagtgccaagtctgtaaacactcttttgttagacgcgatctcttacagagacacatcaggactgtccacagaaccttcctcttatccagttacgcgtccatgacaggcgataaggctgatatccctgtatctcttggcgttggtgacgttgattctacttctcccagagatatcaaaatggaaacactcgttaattctatgattaaggtcaacagcggccttatcaatattcactatcatagtagtaatgttgaaaaaatggataagcagcaacgttgtgtgattgggaaggagtcctctagtttaaagaaagggaaaagccgctttaagcaggttaaaagcagattggagtcctccatcagtgtaaaaattttgcaagaatattctttagattttattagcagcagagatattttgactttcttcagaatgggtgtaagccacttggtagaaaataagatcttccaaaatttctttccagaccttttctcttctttacaaaatgacgagttggtggaaagtttttggattaacaagccttttggtctcataatagcttgtttaggtatgtccatttctttaaatcaagattctcaaaaattatggtttatctgttgtacgaatttgtatgctagctcttctaaacatgacaatgactttgacactgaggacattttgtctcagacagagcaacatgatgtttttgccttgattttattttattctcttttggtaatgttggagaataacattcctgtttctaattccattaaaaagttcgatgtgttttccatgcttcaagatattttgaagccattcaccgtggcatcctccagttaccattatttgaatagtaaggaaaatgcatggttcatattcgatttatgggtcaatatcttgcgcgattccaacaacttcaacaacgattctttattgatatttggttggttcgtcaatcaagagtttatttcttctaatccacttaaggacttcatatacaagggaccgtctatgtccactactgacttaactttaaagcatatcaatattttggcagattccgcgtacgtgtattttataataaagaagacttatccgcaagagttaccatctgattttagagtgcatgatttgttggtttacttgaatgaatgtttcgtaatgcagcagccgatcaaacctgaaactagtgcaaacccctctttatttgcgaacgttatgaacgccaggattacggactgcaaatctaaaagtaactggttattgtgggaaacgatttggttcgaattcatcaacaacttgactttgagaaatgggaccacaaggaacatatggttcattgataactttccacaggtatctaccagctgcttacttcatcattcttcctcttttgttgatgaaaccttgatcaccacgaacttatctatcatatccatgcttcttaatttgaagtctttcacgttggcatctttaaacccaaggaatattcagttaattaccgacattgtcagcttccaattgaaattgttttcttctgagttaattgcaagcagtgatgtttctccatctcaagtatctcaattattggtaaaccccaatgttcacttgatgttatatttctggttcgataccatttatgtacaacgtcagagctacctttcttctacagagaaagaggaatttgagaaggttgaagtgtttgtgaatgactacattataacacaccaaaagaacttggtgacagacttacactccattttgttcgatttttggtctgattccttcattgcttaccatatattattacatgctattgtatcttctttaagagataatattctttacccatacttaatctactcccctcacttgaatgaccagacgaaagcattgttgactgatatctctaattggtcttgttttgctcttcaacagccgtttcgcaagacttccagaggttctttatctggtgcttctgatatgaaaagttttagcgtagcatcttgtttgccactctctcctaatttcttgaagagagattccaactgtaataagattctcttgcccccattagatataaaagccattgaacctatctctacgagtaattacacctacgtgaactctgcccctaagcaacaagagaaggaacaaccattgttaagggcaacaggaaacaatatcaatttagtccaaacaatagtggtcccaccccaggtaaacatggaatctcaagaattcagtgcttcttctactgacaataaacaaagtaaaaacattgaaatttttagccaaataaaatga

SEQ ID NO: 4285 - DNA, 1761 bp, Saccharomyces cerevisiae
atgttttcacttagttcgctatctagcagcggtgggcattcagagcagaaggaaagagagagaataagttattttgatattagaataaactccccgtacaaggacataattttgatccaagggtcaccgttggaactgtcgtctatacctttatcaggaaacttagtgatttcagtgaaaaatgagatcgtagtgaagaaaatttcgctgagattggtaggaagattcaaattggagtttttgcaagttggccgatataagaagaatagcagtagtttggcaagtctagttaaggaaaagcgtaagattttcgaatgctattgggacaacttattggtttcttcaaaaggggatgttttagtcggtggggaaaatgcggaaaatcaacataacagtagtagcggtcgcagtacaagcaaccaagatatggacaccagcggcaacgcaatatttctaagcaagagatcactttcgagccctgttttcaacaaaataattcgaagaaagacccattcttcccacagaaaaatactagagctaccagaaaatggtgttacaggaacccctttcgagggtttaagagaaaacgcccgtagtagaagcagtagtagtaacaccctcaataacaatagccatagttatagtaacagagacgggtctggaagttcgtacttattcctaatgaaaagaggcaactacgaactacccttcaatacaatgctccccccagaagtgtgcgaaacaatcgagggactacaaagtggtagcatactgtattcctttgaagccattatagatggacgtcagttatgggatactgatctgagcgttcatacttctcctcacggtccaatcggtagcacaagtacgagcggcaatggtatgagaacgaagaataaaattatcatcaaaaagttcaagtatctcagaatccttcgtacattatcgatggacaatcttgccatgcaagaagaaattagcgtgggtaatacttggcgtgacaagttgcaatacgaaacgtccatcccgagtagggctgttcctattggtagcacaacccccgtgaagattaagattttccccttcgaaaagaacattcgtttggataggatagaaatggcgctaatccaatattacgcaatgaaggacagcagcgcacaaatttatgatgatgaaatagccgtcatgaaaattactcatctagcggacttcggcccgctgacggacaaacttgacgtcgattgtccctttacaattccagataacctcaaacaaataactcaagactgctgtctgcaagacaacctaatccgtgtcatgcacaaattgcaggtacgtattcttttacaacgtcaagtggatggcgaatacaagaacctggagatcaaggcgcaattacctatgttattatttatttcgccgcatctgcctatgaaaggccgtctagtgttgtttgataaacacgatggcaagatccacttccgccctggcgaattagtacccctttttttaaccacttaccccgcgcagggtctgactccaggcgttgaactgaactccactacaacggcgcacctcgcgctgccacaaccgccaccgaattatcacgagagcaccaacgatcatctcatgccggcgctacagccgctcggcgccgattcggtggtactgacagtgccgtcatacgagcaggcgcaggcgcaggcatcggcatcgtcttacgtgacagggtccgtacccgcttactgcgacgatgactga

SEQ ID NO: 4286 - DNA, 1761 bp, Artificial Sequence
  Description of Artificial Sequence: Synthetic polynucleotide
atgttttcccttagttctttatctagcagcggtgggcattctgagcagaaggaaagagagagaataagttattttgatattagaataaactccccgtacaaggacataattttgatccaagggtctccgttggaattatcttctatacctttatctggaaacttagtgatttctgtgaaaaatgagatcgtagtgaagaaaatttctttgagattggtaggaagattcaaattggagtttttgcaagttggcagatataagaagaatagcagtagtttggcaagtttggttaaggaaaagcgtaagattttcgaatgctattgggacaacttattggtttcttctaaaggggatgttttagtcggtggggaaaatgcggaaaatcaacataacagtagtagcggtcgcagtacaagcaaccaagatatggacaccagcggcaacgcaatatttttgagcaagagatctctttctagccctgttttcaacaaaataattagaagaaagacccattcttcccacagaaaaatattggagttaccagaaaatggtgttacaggaacccctttcgagggtttaagagaaaacgcccgtagtagaagcagtagtagtaacaccctcaataacaatagccatagttatagtaacagagacgggtctggaagtagttacttattcttaatgaaaagaggcaactacgaattgcccttcaatacaatgctccccccagaagtgtgcgaaacaatcgagggattacaaagtggtagcatactttattcctttgaagccattatagatggacgtcagttatgggatactgatttgagcgttcatacttctcctcacggtccaatcggtagcacaagtacgagcggcaatggtatgagaacgaagaataaaattatcatcaaaaagttcaagtatctcagaatccttcgtacattatctatggacaatcttgccatgcaagaagaaattagcgtgggtaatacttggcgtgacaagttgcaatacgaaacgtccatcccgagtagggctgttcctattggtagcacaacccccgtgaagattaagattttccccttcgaaaagaacattcgtttggataggatagaaatggcgttgatccaatattacgcaatgaaggacagcagcgcacaaatttatgatgatgaaatagccgtcatgaaaattactcatttagcggacttcggcccgttaacggacaaacttgacgtcgattgtccctttacaattccagataacctcaaacaaataactcaagactgctgtttgcaagacaacttgatccgtgtcatgcacaaattgcaggtacgtattcttttacaacgtcaagtggatggcgaatacaagaacttggagatcaaggcgcaattacctatgttattatttatttctccgcatttacctatgaaaggccgtttagtgttgtttgataaacacgatggcaagatccacttccgccctggcgaattagtacccctttttttaaccacttaccccgcgcagggtttgactccaggcgttgaattgaactccactacaacggcgcacctcgcgttaccacaaccgccaccgaattatcacgagagcaccaacgatcatctcatgccggcgttgcagccgctcggcgccgattctgtggtattaacagtgccgagctacgagcaggcgcaggcgcaggcatctgcatcttcttacgtgacagggtccgtacccgcttactgcgacgatgactga

SEQ ID NO: 4287 - DNA, 3468 bp, Saccharomyces cerevisiae
atgaatagtaatgaactggatctaagaaataaatatttttatgagatattcggtaagaaaagaaaatcagatacttcaacccctactcagttgttctccggctccaaagttcagacaaacatcaatgaaatttctatcactaacgatgaggatgaagatagtactgaagatgaaaataaggcttcattgaaggattatacactagggcacgacaccggtgcacggtataggatagcaccggactgttcttcccaccaattaaaggcatctcctgtcctacatatttcaacaaaccttaattcaagtccacaatccttcacaggcgatcagatttcacctactaataaaaaaatttcaataaatgattcgaccagacaagataaaggtaacagttgcactaccacttcatcaccttctcaaaaaagatcgaatgttttgcttcctcacgtaagaaaacattcatctccttcactattatcattttccaaaaacagtggcagtcatatgggggatccaaaccagctatctacgcctccaactcccaaaagtgcaggtcacacgatggagttacacagttcattcaatggaaaacatagttcttctagcacctcttctttatttgcattagagtcactgaaaacccaaaatagacgctcatcaaactcttccaatcattctagtcaatatcgacgccatactaatcaacaccaacgtcatcattcaaggtccaaatcaagtcctgtctctctgacggaaatatccatgatcaaaggcacgcctttggtttatcctgcacttttatcactaatagcaattaaattcaaacagaccatcaaattgagcacgcataaaaagatggggttactttacagagattcctttacaggaaaacaagcaattgatactttatgcttgatcataggaagcttagatcgtaatttgggcatgttgatcggaaaatcgctggaagctcaaaaattgttccatgacgtactttatgaccatggcgtaagagattctgtactggagatttacgagttatcttcagaatcaatttttatggcacatcagtcgcagagttctacttcaattgccaacacattttcttcatcatcttcttcagttaattcgctccgtactaaaactgaaatatatggtgtttttgtcccattgacacattgttattcctctacatgctctctggaaaaactttgctactctatttcttgccccaatcgtttgcaacaacaggctaatttacatttaaaattaggtggtggtcttaagagaaatatttcgttagcactcgataaggaggatgatgaacgaatttcctggacaaattctgtaccaaagagcgtatgggaatcattatccaaacaacaaatcaaaaggcaggaggcaatatatgagttgtttactacagaaaagaagtttgtaaaatctttggaaatcatccgagatactttcatgaagaaattattagaaacgaatattattccatctgatgtaaggataaattttgtaaagcacgttttcgcacatatcaatgaaatatattctgtcaatagagaatttttgaaggctttagcacaaaggcaatcattaagcccaatttgtcctggaattgcagatatatttttgcagtatcttcctttctttgatccttttctgtcatacatagcatcaagaccatacgcaaagtatctaattgaaacccaaagatcagttaatcccaattttgctcgttttgacgatgaagtgtctaattcttccctgaggcatgggatcgattcattcctatctcagggtgtttcaagacctggtagatattcactgttggtaagagaaataatacacttctcggacccagtaacagacaaagatgatctacaaatgctaatgaaagtccaagatcttttaaaggatctaatgaaaaggattgatagagcaagcggtgcagcacaagatcgttatgacgttaaagtgttaaagcagaaaattctattcaaaaatgaatacgttaatctgggtttgaataacgaaaaaaggaaaatcaagcatgaaggtttactctcaaggaaggacgtgaacaaaacagatgcgtccttttcaggagacattcaattttacctactcgacaatatgctattattcttgaaatcaaaagctgtaaacaagtggcaccaacacactgtatttcagagaccaattccactccctttactgtttatttgtccggctgaggatatgccacccataaaaagatatgtgacagaaaacccaaattgctcagcgggtgtgctcttaccccaatatcaaacgagcaatcccaagaatgctattgtattcgcctattacggtacgaaacaacaatatcaagttactttgtacgcgccgcagccggccggattacagacattaatagaaaaggtgaaacaagagcaaaaaaggctccttgatgaaactaaacatattacttttaagcaaatggtaggtcaattctttcactcatacataaatactaatcgcgtcaacgatgtcctaatctgtcatgctggtaaaattttattggttgcaacaaatatgggactctttgttcttaattatgctacatcgatcaatcaaaaaccagtgcaccttctgcacaaaatatcaatttcacagatctctgtattggaagaatataaagttatgattcttctaattgacaaaaaactgtacggctgtcctttagacgtaatcgacgatgcagaaaatgcagattttcttttcagaaaaaattctaaagtgttatttaaatatgttgcaatgttcaaagacggtttctgtaatggtaaaagaatcattatgattgcacatcattttttgcacgccgtacaattattgattgttaatcctttgatatttgattttaatagcggtaattttaaaaaaaacctaaaggcaggcttggtagattttagcgttgattctgaacctctgtccttttcttttttggagaataagatctgcattggttgtaaaaaaaatatcaaaatattaaacgtaccggaagtgtgtgataaaaatggatttaaaatgagggagcttttaaatctacatgataacaaagttttagcgaacatgtataaagagacgttcaaagtagtttccatgtttccgataaaaaattcaacttttgcatgttttccagaactctgcttttttctcaataagcaagggaagagggaggagacaaagggatgttttcattgggagggggaaccagaacagttcgcgtgttcctacccttatattgtggcaattaatagtaactttattgaaattagacatatagaaaatggagaacttgtccgctgtgtacttggaaacaagatacgtatgttaaaatcatatgccaagaagatcttatattgttatgaggatcctcaaggatttgaaattatcgaactgttaaatttttga

SEQ ID NO: 4288 - DNA, 3468 bp, Artificial Sequence
  Description of Artificial Sequence: Synthetic polynucleotide
atgaatagtaatgaattagatttgagaaataaatatttttatgagatattcggtaagaaaagaaaatctgatacttctacccctactcagttgttctccggctccaaagttcagacaaacatcaatgaaatttctatcactaacgatgaggatgaagatagtactgaagatgaaaataaggcttctttgaaggattatacattagggcacgacaccggtgcaagatataggatagcaccggactgttcttcccaccaattaaaggcatctcctgtcttgcatatttctacaaaccttaatagtagtccacaatccttcacaggcgatcagatttctcctactaataaaaaaatttctataaatgattctaccagacaagataaaggtaacagttgcactaccacttcttctccttctcaaaaaagatctaatgttttgcttcctcacgtaagaaaacattcttctccttctttattatctttttccaaaaacagtggcagtcatatgggggatccaaaccagctttctacgcctccaactcccaaaagtgcaggtcacacgatggagttacacagttctttcaatggaaaacatagttcttctagcacctcttctttatttgcattagagtctttgaaaacccaaaatagacgctcttccaactcttccaatcattctagtcaatatagacgccatactaatcaacaccaacgtcatcattccaggtccaaatctagtcctgtctctttgacggaaatatccatgatcaaaggcacgcctttggtttatcctgcacttttaagtttgatagcaattaaattcaaacagaccatcaaattgagcacgcataaaaagatggggttactttacagagattcctttacaggaaaacaagcaattgatactttatgcttgatcataggaagcttagatcgtaatttgggcatgttgatcggaaaatctttggaagctcaaaaattgttccatgacgtactttatgaccatggcgtaagagattctgtattggagatttacgagttatcttctgaaagtatttttatggcacatcagtctcagagttctacttctattgccaacacattttcttcttcttcttcttctgttaatagtctccgtactaaaactgaaatatatggtgtttttgtcccattgacacattgttattcctctacatgctctttggaaaaactttgctactctatttcttgccccaatcgtttgcaacaacaggctaatttacatttaaaattaggtggtggtcttaagagaaatatttctttagcactcgataaggaggatgatgaaagaatttcctggacaaattctgtaccaaagagcgtatgggaatctttatccaaacaacaaatcaaaaggcaggaggcaatatatgagttgtttactacagaaaagaagtttgtaaaatctttggaaatcatcagagatactttcatgaagaaattattagaaacgaatattattccatctgatgtaaggataaattttgtaaagcacgttttcgcacatatcaatgaaatatattctgtcaatagagaatttttgaaggctttagcacaaaggcaatctttaagcccaatttgtcctggaattgcagatatatttttgcagtatcttcctttctttgatccttttttatcttacatagcatctagaccatacgcaaagtatttgattgaaacccaaagatctgttaatcccaattttgctcgttttgacgatgaagtgtctaattcttccttaaggcatgggatcgattctttcttatctcagggtgtttctagacctggtagatattctttgttggtaagagaaataatacacttcagtgacccagtaacagacaaagatgatttgcaaatgttaatgaaagtccaagatcttttaaaggatttgatgaaaaggattgatagagcaagcggtgcagcacaagatcgttatgacgttaaagtgttaaagcagaaaattcttttcaaaaatgaatacgttaatttgggtttgaataacgaaaaaaggaaaatcaagcatgaaggtttactctccaggaaggacgtgaacaaaacagatgcgtccttttctggagacattcaattttacttgctcgacaatatgcttttattcttgaaatctaaagctgtaaacaagtggcaccaacacactgtatttcagagaccaattccactccctttactttttatttgtccggctgaggatatgccacccataaaaagatatgtgacagaaaacccaaattgctctgcgggtgtgctcttaccccaatatcaaacgagcaatcccaagaatgctattgtattcgcctattacggtacgaaacaacaatatcaagttactttgtacgcgccgcagccggccggattacagacattaatagaaaaggtgaaacaagagcaaaaaaggctccttgatgaaactaaacatattacttttaagcaaatggtaggtcaattctttcactcttacataaatactaatcgcgtcaacgatgtcttgatctgtcatgctggtaaaattttattggttgcaacaaatatgggactctttgttcttaattatgctacatctatcaatcaaaaaccagtgcaccttttacacaaaatatctatttctcagatctctgtattggaagaatataaagttatgattcttttgattgacaaaaaactttacggctgtcctttagacgtaatcgacgatgcagaaaatgcagattttcttttcagaaaaaattctaaagtgttatttaaatatgttgcaatgttcaaagacggtttctgtaatggtaaaagaatcattatgattgcacatcattttttgcacgccgtacaattattgattgttaatcctttgatatttgattttaatagcggtaattttaaaaaaaacttgaaggcaggcttggtagattttagcgttgattctgaacctttatccttttcttttttggagaataagatctgcattggttgtaaaaaaaatatcaaaatattaaacgtaccggaagtgtgtgataaaaatggatttaaaatgagggagcttttaaatttacatgataacaaagttttagcgaacatgtataaagagacgttcaaagtagtttccatgtttccgataaaaaattctacttttgcatgttttccagaactctgcttttttctcaataagcaagggaagagggaggagacaaagggatgttttcattgggagggggaaccagaacagttcgcgtgttcctacccttatattgtggcaattaatagtaactttattgaaattagacatatagaaaatggagaacttgtccgctgtgtacttggaaacaagatacgtatgttaaaaagttatgccaagaagatcttatattgttatgaggatcctcaaggatttgaaattatcgaattattaaatttttga

SEQ ID NO: 4289 - DNA, 2583 bp, Saccharomyces cerevisiae
atgaacactgcattggatgatttacatggggatttggtgactttagaagataacgaaatcatcaataattctgatcattcatcttctcactctactagtcatgaggaggaagacgaggaagaagacgatactgaggatatagaacttatagaaaaagacggcaataaaatcctatcaagtagaattcatccggaagacgaaatcataaatgatgggttaaatatatggattccggttcaaatgctcaagaagaatatagcaaagttctggtcccattttctagcaattgaaaagaaattaacgaaagttaaatgtaaacattgtggagagatactaacaagaagcgatgcaagtttgacaaaaacctttagatctcacttgaaaacaaagcataatataagtgccaataaaaacttctattccatgaatttcacagtaggagactccaatctcaaaaacaatacttccagcacagaaattacacgtagacacggctatgattcgttaaccttcaattccgaccaaagtttcaaatgctttgacataggaaaattacagagcagtaattacctttctatttcccaattagtagccatagtcatagcctcagaaaatttaccgctgaacttctttgagaatgtgtcctttaaatctcttttatcaaaatttcataggatccctcctttaactaccaatataatagaggagtcaattatagggttgtcaaaatcaattgatgagttgatcagaaggtctatatcaaggaatgatacacaattaccctttactatccatttatccgatagtaaggaatcaaatcaacctctttacttgaaatattctagggaaattcgggcacaattgtctaacttggacttatcccatcttatttctgtaaattttacagaactggctggaaaaagatcattattttctttgcaactgttcgataataccaacaaagtttcgaagggtttaccattatctatttttgtacgtaaaacaacggatatagatattagtgtctggcaggaacagctcaacaatttgtattcgaaataccctggcttacaaaaatcggtgatttctataactttgcctcaaagccattatacaatggtactagagaatagaaacagtcataattttactttccatagcgggagtgtgagggagataaagtaccatacttgcatagtatctgaattacttcattgttttttacagccgttgtttaatgttcctactgaatcaatgctgtcttccttttctgtggccaaagaaaatcattcaggaggctctttgttagactcattaatagatttttcccatattgatttatcatctactattctcggcaaaatatgctgtttgatagaagaagttaacttaaacgactccctaaaatcggatttcctattatactgccaaaattatacacaacctaactgcaatgaacttacttcaatcctttcctgtaactgcgatagattttcagctttgaagagtatcttagaaaaatttgcaaacttagttcctttcttcaagtctatcaactctcatttagaaaatgaatcacttagtgaatccgattttcgtctaataaacacggtagaagagacgttaagaactttcgagcaatcaattgagtactttgcttcttccgctccattgaaatttacccataccttggtttttatcattaagtttgagttatatttgacagagattatacgaagcttcaaattcaccaaatctaaaaagccctttgaaaaaatcctagcaaggcttctaaaagttaaagacctttatttacttgatgatgtaaacttgattggtgctttcctgtatccatcaatcttccaaagtaaaagccttctaaatgaaatctttggcacaacatcggtaaataaaatagttcataacatgaccaaaattgttctaaggtatcttaaaaactttatcaatataactaattttcgttcctctaatagtggtggggagagcggtcggaattccggtaataatcttctttctgactacgaggccatttttatgaaagaatcacgggacgtagagcttttatgtaacaccaagttaaccgcaccactaacagaagattcattacttgtccaaatcattcgggatgatctattacgctatgtcaacagaattgcgcatgagctgcctaatgcataccatgactacttaaatgataatgatattagcttcgatggatctcactttacaaaacatgagttatctgaggaaaacgactctaactcgggggaatggtgcctaaatcccatggaagagacatttgatattcatattcctatctcggattcaatttggaataattacataagcagtaaaaacaagattgaagtaatcgatattttacttcagttgctttcagtaaattcgacatcttcaatacggtcagaattatcttctctaacagctaatcaagacttcagtaccaagttgagtgaggaaacaattaaaatcaaacttttgaattcacagtttaatctcgaaaaaattaattttcactctggatcaattttcgatgcttgctag

SEQ ID NO: 4290 - DNA, 2583 bp, Artificial Sequence
  Description of Artificial Sequence: Synthetic polynucleotide
atgaacactgcattggatgatttacatggggatttggtgactttagaagataacgaaatcatcaataattctgatcattcttcttctcactctactagtcatgaggaggaagacgaggaagaagacgatactgaggatatagaacttatagaaaaagacggcaataaaatcttatccagtagaattcatccggaagacgaaatcataaatgatgggttaaatatatggattccggttcaaatgctcaagaagaatatagcaaagttctggtcccattttttggcaattgaaaagaaattaacgaaagttaaatgtaaacattgtggagagatattaacaagaagcgatgcaagtttgacaaaaacctttagatctcacttgaaaacaaagcataatataagtgccaataaaaacttctattccatgaatttcacagtaggagactccaatctcaaaaacaatacttccagcacagaaattacacgtagacacggctatgattctttaaccttcaattccgaccaaagtttcaaatgctttgacataggaaaattacagagcagtaattacctttctatttcccaattagtagccatagtcatagccagtgaaaatttaccgttgaacttctttgagaatgtgtcctttaaatctcttttatccaaatttcataggatccctcctttaactaccaatataatagaggagtctattatagggttgagtaaatccattgatgagttgatcagaaggtctatatctaggaatgatacacaattaccctttactatccatttatccgatagtaaggaaagtaatcaacctctttacttgaaatattctagggaaattagagcacaattgtctaacttggacttatcccatcttatttctgtaaattttacagaattggctggaaaaagatctttattttctttgcaattattcgataataccaacaaagtttccaagggtttaccattatctatttttgtacgtaaaacaacggatatagatattagtgtctggcaggaacagctcaacaatttgtattctaaataccctggcttacaaaaatctgtgatttctataactttgcctcaaagccattatacaatggtattggagaatagaaacagtcataattttactttccatagcgggagtgtgagggagataaagtaccatacttgcatagtatctgaattacttcattgttttttacagccgttgtttaatgttcctactgaaagtatgctttcttccttttctgtggccaaagaaaatcattctggaggctctttgttagactctttaatagatttttcccatattgatttatcttctactattctcggcaaaatatgctgtttgatagaagaagttaacttaaacgactccttgaaatctgatttcttattatactgccaaaattatacacaacctaactgcaatgaacttacttctatcctttcctgtaactgcgatagattttctgctttgaagagtatcttagaaaaatttgcaaacttagttcctttcttcaagtctatcaactctcatttagaaaatgaatctcttagtgaatccgattttcgtttaataaacacggtagaagagacgttaagaactttcgagcaatctattgagtactttgcttcttccgctccattgaaatttacccataccttggtttttatcattaagtttgagttatatttgacagagattataagaagcttcaaattcaccaaatctaaaaagccctttgaaaaaatcttggcaaggcttttgaaagttaaagacctttatttacttgatgatgtaaacttgattggtgctttcctctatccatccatcttccaaagtaaaagccttttgaatgaaatctttggcacaacatctgtaaataaaatagttcataacatgaccaaaattgttttgaggtatcttaaaaactttatcaatataactaattttcgttcctctaatagtggtggggagagcggtagaaattccggtaataatcttctttctgactacgaggccatttttatgaaagaatctagagacgtagagcttttatgtaacaccaagttaaccgcaccattaacagaagattctttacttgtccaaatcattagagatgatttattacgctatgtcaacagaattgcgcatgagcttcctaatgcataccatgactacttaaatgataatgatattagcttcgatggatctcactttacaaaacatgagttatctgaggaaaacgactctaactctggggaatggtgcttgaatcccatggaagagacatttgatattcatattcctatcagtgattctatttggaataattacataagcagtaaaaacaagattgaagtaatcgatattttacttcagttgctttctgtaaattctacatcttctataagaagtgaattatcttctttaacagctaatcaagacttcagtaccaagttgagtgaggaaacaattaaaatcaaacttttgaattctcagtttaatctcgaaaaaattaattttcactctggatctattttcgatgcttgctga

SEQ ID NO: 4291 - DNA, 1164 bp, Saccharomyces cerevisiae
atgagcaatgtggctggggaattgaagaatagtgaggggaaaaagaaaggcaggggaaataggtatcataacaagaacagaggaaaaagtaagaatgagacggtagatcctaaaaagaatgagaataaggttaataatgctactaatgctacccacaacaatagcaaaggcagaaggaataacaagaaaaggaacagagagtattataactataaaagaaaggctagattgggtaaatcaaccgagaatgaaggatttaagcttgttattagattgctacctccaaatttgactgcagatgaattttttgccatcttacgagataataataacgatgatggtgataagcaagatatccagggtaaactcaagtacagtgactggtgtttttttgaaggtcattattctagtaaagtattcaaaaactcgacatattctcggtgcaatttcttgttcgacaacttatcagacttggaaaaatgcgcaaatttcattaaaacttgtaaattcattgataataaggataatattacaattccagatatgaaactgtcgccctacgtaaagaaattcactcaaacatcaaaaaaggatgccgcgctagtaggaacaattgaagaagacgaaatttttaaaacatttatgaattcaatgaaacagctgaatgaaaatgacgagtactcattccaagattttagcgtattgaaatctttagaaaaagaattctcaaaaagcatagagttagaaaataaaatagcagaaagaacagaaagggtgttaacagagctggttggaactggtgataaggtcaagaataagaacaaaaagaagaaaaataaaaacgccaaaaagaaattcaaagaagaggaagcatccgctaagataccaaagaaaaaacggaacagaggcaagaagaagcgtgaaaatcgtgaaaaaagcaccatttctaagaccaagaacagtaatgtggttattattgaggaagcgggtaaagaggttttgaaacaaaggaagaagaaaatgcttttgcaagagaagttaaaaatatcaaactcctctcagcctcagtcatcatccgctcaaacccagccgtcgttccaacctaaagaaaaccttttcgtaccacgggtaaaaattttgcatcgtgatgataccaagaagtag

SEQ ID NO: 4292 - DNA, 1164 bp, Artificial Sequence
  Description of Artificial Sequence: Synthetic polynucleotide
atgagcaatgtggctggggaattgaagaatagtgaggggaaaaagaaaggcaggggaaataggtatcataacaagaacagaggaaaaagtaagaatgagacggtagatcctaaaaagaatgagaataaggttaataatgctactaatgctacccacaacaatagcaaaggcagaaggaataacaagaaaaggaacagagagtattataactataaaagaaaggctagattgggtaaatctaccgagaatgaaggatttaagcttgttattagattgttacctccaaatttgactgcagatgaattttttgccatcttaagagataataataacgatgatggtgataagcaagatatccagggtaaactcaagtacagtgactggtgtttttttgaaggtcattattctagtaaagtattcaaaaactccacatattctaggtgcaatttcttgttcgacaacttaagtgacttggaaaaatgcgcaaatttcattaaaacttgtaaattcattgataataaggataatattacaattccagatatgaaattatctccctacgtaaagaaattcactcaaacaagtaaaaaggatgccgcgttggtaggaacaattgaagaagacgaaatttttaaaacatttatgaattctatgaaacagttgaatgaaaatgacgagtactctttccaagattttagcgtattgaaatctttagaaaaagaattctccaaaagcatagagttagaaaataaaatagcagaaagaacagaaagggtgttaacagagttagttggaactggtgataaggtcaagaataagaacaaaaagaagaaaaataaaaacgccaaaaagaaattcaaagaagaggaagcatccgctaagataccaaagaaaaaaagaaacagaggcaagaagaagcgtgaaaatcgtgaaaaaagcaccatttctaagaccaagaacagtaatgtggttattattgaggaagcgggtaaagaggttttgaaacaaaggaagaagaaaatgcttttgcaagagaagttaaaaataagcaactcctctcagcctcagtcttcttccgctcaaacccagccgtccttccaacctaaagaaaaccttttcgtaccaagagtaaaaattttgcatcgtgatgataccaagaagtga

SEQ ID NO: 4293 - DNA, 441 bp, Saccharomyces cerevisiae
atgaagttggttaactttttaaaaaagctgcgcaatgagcaggttaccatagaactaaaaaacggtaccaccgtttggggtacactgcagtcggtatcaccacaaatgaatgctatcttaactgacgtgaagttgaccctaccacaaccccgactaaataaattgaacagtaatggtattgcgatggctagtctgtacttgactggaggacagcaacctactgcaagtgacaacatagcaagtttgcaatacataaacattagaggcaataccataagacagataatcttacctgattccttgaacctggattcacttttggttgaccaaaagcaacttaattccctaagaagatcgggtcaaattgcaaatgaccccagcaaaaagagaaggcgcgattttggtgcaccagcgaataaaaggccaagaagaggtctatga

SEQ ID NO: 4294 - DNA, 441 bp, Artificial Sequence
  Description of Artificial Sequence: Synthetic polynucleotide
atgaagttggttaactttttaaaaaagttgcgcaatgagcaggttaccatagaattgaaaaacggtaccaccgtttggggtacattacagtctgtatctccacaaatgaatgctatcttaactgacgtgaagttgaccttgccacaacccaggttgaataaattgaacagtaatggtattgcgatggctagtttatacttgactggaggacagcaacctactgcaagtgacaacatagcaagtttgcaatacataaacattagaggcaataccataagacagataatcttacctgattccttgaaccttgattctcttttggttgaccaaaagcaacttaattccttgagaagatctggtcaaattgcaaatgaccccagcaaaaagagaaggcgcgattttggtgcaccagcgaataaaaggccaagaagaggtctttga

SEQ ID NO: 4295 - DNA, 729 bp, Saccharomyces cerevisiae
atggctgtcaatgaatttcaagtggagtctaacatctctccaaaacaactgaataaccagtcagtgtcacttgttattcctcggttgacaagagataaaattcataattcaatgtactataaagtaaatctaagcaacgaatctttgagaggcaatacaatggtagagcttttgaaagttatgattggcgcatttggtaccataaaaggtcaaaatggtcatttacacatgatggttctcggtggcattgagtttaaatgcatcttaatgaagttaatcgaaatcagaccgaatttccagcagttgaacttcttattgaatgtaaaaaatgagaacggttttgactcgaaatatattattgctttgcttctggtttatgcgcggttacagtattattatttgaatggcaataacaaaaacgatgatgatgaaaatgatttgataaagttatttaaagtacaattatacaaatattcacagcattatttcaaactaaaaagtttcccactacaagtagactgctttgctcactcctataacgaagaactttgtataatacacattgatgaattagtcgattggttggccacacaggaccatatctggggtattccattagggaaatgtcaatggaataaaatatacaactctgatgaagagagtagttctagcgaaagcgaaagtaatggtgacagtgaagatgacaacgacaccagcagcgaatcatag

SEQ ID NO: 4296 - DNA, 729 bp, Artificial Sequence
  Description of Artificial Sequence: Synthetic polynucleotide
atggctgtcaatgaatttcaagtggagtctaacatctctccaaaacaattgaataaccagtctgtgtctcttgttattcctagattgacaagagataaaattcataattctatgtactataaagtaaatttgagcaacgaatctttgagaggcaatacaatggtagagcttttgaaagttatgattggcgcatttggtaccataaaaggtcaaaatggtcatttacacatgatggttctcggtggcattgagtttaaatgcatcttaatgaagttaatcgaaatcagaccgaatttccagcagttgaacttcttattgaatgtaaaaaatgagaacggttttgactctaaatatattattgctttgcttttggtttatgcgagattacagtattattatttgaatggcaataacaaaaacgatgatgatgaaaatgatttgataaagttatttaaagtacaattatacaaatattctcagcattatttcaaattgaaaagtttcccattgcaagtagactgctttgctcactcctataacgaagaactttgtataatacacattgatgaattagtcgattggttggccacacaggaccatatctggggtattccattagggaaatgtcaatggaataaaatatacaactctgatgaagagagtagttctagcgaaagcgaaagtaatggtgacagtgaagatgacaacgacaccagcagcgaaagttga

SEQ ID NO: 4297 - DNA, 474 bp, Saccharomyces cerevisiae
atgtcatacaaacagtattttgatagtttgcctttgaaattgaagtcctttttccaaagataccccccttcaatcaagtattctccagtgtctacatctactaaagccattaatgccaatcctttcctgccaaataaacatccggtcacacaacgatttcatgatccgaaatattcacttagaagaatgagtgacgtatataagttggcactgcgttatggagtagaagagtttttaccaccgatcgaaaacactaagaaacttttcttcgaggagaaatacaataaaaagaccctcatgaaaggtgttctcttgcccaagggtcataagcatgaattgaaattaaacgaaaagctaaaaaaacgtgaagaagctttaaagaaggtagatgagttgattgcttccaagaagggttcgaagtatgccaagagagtagaaaaaatgaaaaaaaaccaaagtataggctggttctga

SEQ ID NO: 4298 - DNA, 474 bp, Artificial Sequence
  Description of Artificial Sequence: Synthetic polynucleotide
atgagttacaaacagtattttgatagtttgcctttgaaattgaagtcctttttccaaagataccccccttccatcaagtattctccagtgtctacatctactaaagccattaatgccaatcctttcttaccaaataaacatccggtcacacaaagatttcatgatccgaaatattctcttagaagaatgagtgacgtatataagttggcattgcgttatggagtagaagagtttttaccaccgatcgaaaacactaagaaacttttcttcgaggagaaatacaataaaaagaccctcatgaaaggtgttctcttgcccaagggtcataagcatgaattgaaattaaacgaaaagttgaaaaaacgtgaagaagctttaaagaaggtagatgagttgattgcttccaagaagggttccaagtatgccaagagagtagaaaaaatgaaaaaaaaccaaagtataggctggttctga

SEQ ID NO: 4299 - DNA, 1770 bp, Saccharomyces cerevisiae
atgtttgatcatgacgtcgaatatctgatcactgcactctcttccgaaacgaggatccagtatgatcaacgcctgctagacgaaatcgcggccaatgtggtatactacgtcccaagagtcaaatcccccgacactttgtatcgcttggtcggagcacttttccgatcgcagttcattgtccaattaccaccactacgccttttgcacatcgtcaaagatgttttcctttggaaactggaagtttctgagcccacgctcccaatttcgaagttttacttggtttggaatgctgttttcgaatctcaccgagccacgtggaacctttcacagttgatggttttggatggtgtactagtcacatacccgagcttcaaacaattgaacaacgcctattttattgatgaatccagcaacaaaactgcgctttattacagaaactggaaattacaactgttttcaccaatatgggcgcagctatggaatactgccattgtcagggctaatttatcgattcagcattgccttctgatagcattagctttactttttaatcagtcaaaccgaagcgcccttttgcatggagttgacgtatcatggaatttggtcacagagaaactattggaccttttggaagagtatgtacacggcattgtgcagccgatggaaattttttcgactgattcagtcttatcaaccaacttgaatcatttggccagttgcttgaccagttcaatcacgaggtcaaatgaggcaactttggtaaattcagtacgcaaactagaaaggatatgtcgatacttgtccgatactgtggcttcgttgaaagaacaacaactagatttcaagttccaaaatgtatttatcctgataatcctcgcgttaaaagaattatccgccatgaatatgacaatactgcctaaccataaagacactttttattctatgatctgtttaagccttttccacgtccacgtattgactcaaaaaatcgggacagtcggttttcccagttacgattatgtttacgataatttagtaacgtatttcattgtcatggatgacttgtctaaaatcactacagttttggaactaatgaaaagaaacaacaccaaacaagatccaaataaattagtgttttacatcaattttctaaacaaaattactaattactatgggtgtcgcattcgtttgccgtttattactgagtttatcgaacctttactgcatttcgatgtattttttagcgggaagacgggcaataccttggatattgaaatcaaagaatctatacacacattgacaatcactgtactgtctatagactcctcttattcctcacaggttgcacaatggcaagtatcccgcatactcgtctatttaaagatgtcgatggaccaatttattgcaggtaaattgtccgcaaatcaaattttacttatattcggccatctatccacacaacttccctcactacataattataacaagcatttgcttagggactctttgcacgagacgtatatcagaattgttaatgtaaaaaacccagaaaagaagaatgtattgattgaatgtctgattgtacaaatagcctttatcaacaatcctcatcatttgatcggctggttgaacatctgtctccagctaatcaatacacataacaaaaagctacttcaacaattgtgggaaatggtttcgagtctagaatcctccctagccatcgactggtggtacacaacggtcttatcaagtcaatcttctaaattatag

SEQ ID NO: 4300 - DNA, 1770 bp, Artificial Sequence
  Description of Artificial Sequence: Synthetic polynucleotide
atgtttgatcatgacgtcgaatatttgatcactgcactctcttccgaaacgaggatccagtatgatcaacgccttttggacgaaatcgcggccaatgtggtatactacgtcccaagagtcaaatcccccgacactttgtatcgcttggtcggagcacttttcagaagccagttcattgtccaattaccaccattgcgccttttgcacatcgtcaaagatgttttcctttggaaattagaagtttctgagcccacgctcccaatttccaagttttacttggtttggaatgctgttttcgaatctcacagagccacgtggaacctttctcagttgatggttttggatggtgtattagtcacatacccgagcttcaaacaattgaacaacgcctattttattgatgaatccagcaacaaaactgcgctttattacagaaactggaaattacaattattttctccaatatgggcgcagttatggaatactgccattgtcagggctaatttatccattcagcattgccttttgatagcattagctttactttttaatcagtccaacagaagcgcccttttgcatggagttgacgtaagctggaatttggtcacagagaaacttttggaccttttggaagagtatgtacacggcattgtgcagccgatggaaattttttccactgattctgtcttatctaccaacttgaatcatttggccagttgcttgaccagttctatcacgaggtctaatgaggcaactttggtaaattctgtacgcaaattagaaaggatatgtcgttacttgtccgatactgtggcttctttgaaagaacaacaattggatttcaagttccaaaatgtatttatcttaataatcctcgcgttaaaagaattatccgccatgaatatgacaatattacctaaccataaagacactttttattctatgatctgtttaagccttttccacgtccacgtattgactcaaaaaatcgggacagtcggttttcccagttacgattatgtttacgataatttagtaacgtatttcattgtcatggatgacttgtctaaaatcactacagttttggaattgatgaaaagaaacaacaccaaacaagatccaaataaattagtgttttacatcaattttttgaacaaaattactaattactatgggtgtcgcattcgtttgccgtttattactgagtttatcgaacctttattacatttcgatgtattttttagcgggaagacgggcaataccttggatattgaaatcaaagaatctatacacacattgacaatcactgtattatctatagactcctcttattcctctcaggttgcacaatggcaagtatcccgcatactcgtctatttaaagatgtccatggaccaatttattgcaggtaaattgtccgcaaatcaaattttacttatattcggccatttgtccacacaacttccctctttgcataattataacaagcatttgcttagggactctttgcacgagacgtatatcagaattgttaatgtaaaaaacccagaaaagaagaatgtattgattgaatgtttaattgtacaaatagcctttatcaacaatcctcatcatttgatcggctggttgaacatctgtctccagttaatcaatacacataacaaaaagcttcttcaacaattgtgggaaatggtttctagtttagaatcctccttggccatcgactggtggtacacaacggtcttatccagtcaatcttctaaattatga

SEQ ID NO: 4301 - DNA, 600 bp, Saccharomyces cerevisiae
atggacacactgttcaactccacggaaaagaatgccagaggcataccgcaggctccattcatcgaaaatgtcaacgaaataattaaggacccaagcgacttcgaattgtgcttcaataagttccaagaacggctttctaagtacaaatttatgcaggaatctaaattggctacgataaagcagctgaagactagaatcccggacttggaaaacacattaaaaatatgccaaagtctgcgcaatcacagcgacgagggcgatgagagcgatgaacctatcctgttgcactaccaattgaacgacacgctctacacaaaggctcaggttgatataccggaagatcgggcggatttgaaagttgggttgtggcttggcgcagacgtgatgctggaatatcccatcgacgaggccatagagttgttaaagaagaaactcgcggattccgaacagtctttaacggtgtccaccgaggacgtagagtttttgagggaaaatatcacgacaatggaggtcaattgcgcgcgattgtataactgggacgttcagagaaggcaagacttgaagcaggctcaagaagggactaaaaacctcaagatataa

SEQ ID NO: 4302 - DNA, 600 bp, Artificial Sequence
  Description of Artificial Sequence: Synthetic polynucleotide
atggacacattgttcaactccacggaaaagaatgccagaggcataccgcaggctccattcatcgaaaatgtcaacgaaataattaaggacccaagcgacttcgaattgtgcttcaataagttccaagaaagactttctaagtacaaatttatgcaggaatctaaattggctacgataaagcagttgaagactagaatcccggacttggaaaacacattaaaaatatgccaaagtttacgcaatcacagcgacgagggcgatgagagcgatgaacctatcttgttgcactaccaattgaacgacacgctctacacaaaggctcaggttgatataccggaagatcgtgcggatttgaaagttgggttgtggcttggcgcagacgtgatgttggaatatcccatcgacgaggccatagagttgttaaagaagaaactcgcggattccgaacagtctttaacggtgtccaccgaggacgtagagtttttgagggaaaatatcacgacaatggaggtcaattgcgcgcgtttgtataactgggacgttcagagaaggcaagacttgaagcaggctcaagaagggactaaaaacctcaagatatga

SEQ ID NO: 4303 - DNA, 1113 bp, Saccharomyces cerevisiae
atgagcagtgccgcaaatgagggatgtgtttatttgttcattgtcgttttgcgattatcttcgttttcatgtgttaactcattcattcattcatttactcgttcacgcacacgcagcagttattccctcgacgagcgttcacttgtatcatatagcatagtttacgtagcaatgaataaaagcagcaaggcatttcaggtaccgaataaggtcatcaccaaggaggatattactcccttgtccagatcgcacacaaagaaagcggacactcgcgggacagcagatggtaaaaacaccacagccagtgcagtcgaggccaccccaatcatcatcaccactgctcgttcgatagatactgccggttcactatctgagaacgccaccgaggacgatggcacccaaaacggagatttacacgatgatgacgatgatgacgacctcgaaagtacgctcggctatagttctgagcctgatcctctcttctccccatgccaccagccttccttcaccaacagcacatttagttacagtgcggacaatgaactacccatggaggaaaatcacaacaagaataatttccacgatagcagcgagagcagtatctttctaccacagatacagcaatcattctttttcggcgacaatagcaagagtgacgcaaataatacggacttctggaaggaagtaaatggcactgcagaagaggccatttgcctgcaggagacaagacaaagaaaatgctccctcgtggctctgcatccaggcgacgccaccacgagttcgaacgacacattgggaatagaggacttcatcaaagatgatatcaacagtgctgaagccatggaaccctccccatcttcatcaccatcttcctcccttcttgataatttggactacaatatcaagttattgtgctacagagacaatgagggcaagttcaccttgaaaaaaaggaagtttttgaagaattccctgcgctcatcctctgcaatttctaaaaagtggaaacccttgtctaaaagagataagctgttgaagagggccataagaagaaagagtggtgtttgccagacgttatcagctggttttggtatcggtgaattcatgttgtaa

SEQ ID NO: 4304 - DNA, 1113 bp, Artificial Sequence
  Description of Artificial Sequence: Synthetic polynucleotide
atgagcagtgccgcaaatgagggatgtgtttatttgttcattgtcgttttgagattatcttctttttcttgtgttaactctttcattcattcttttactcgttcccgcacacgcagcagttattccctcgacgagcgttctcttgtatcttatagcatagtttacgtagcaatgaataaaagcagcaaggcatttcaggtaccgaataaggtcatcaccaaggaggatattactcccttgtccagaagtcacacaaagaaagcggacactcgcgggacagcagatggtaaaaacaccacagccagtgcagtcgaggccaccccaatcatcatcaccactgctcgttctatagatactgccggttctttatctgagaacgccaccgaggacgatggcacccaaaacggagatttacacgatgatgacgatgatgacgacctcgaaagtacgctcggctatagttctgagcctgatcctctcttctccccatgccaccagccttccttcaccaacagcacatttagttacagtgcggacaatgaattgcccatggaggaaaatcacaacaagaataatttccacgatagcagcgagagcagtatctttttaccacagatacagcaaagtttctttttcggcgacaatagcaagagtgacgcaaataatacggacttctggaaggaagtaaatggcactgcagaagaggccatttgcttacaggagacaagacaaagaaaatgctccctcgtggctttacatccaggcgacgccaccacgagtagtaacgacacattgggaatagaggacttcatcaaagatgatatcaacagtgctgaagccatggaaccctccccatcttcttctccatcttcctcccttcttgataatttggactacaatatcaagttattgtgctacagagacaatgagggcaagttcaccttgaaaaaaaggaagtttttgaagaattccttacgctcttcctctgcaatttctaaaaagtggaaacccttgtctaaaagagataagttgttgaagagggccataagaagaaagagtggtgtttgccagacgttatctgctggttttggtatcggtgaattcatgttgtga

SEQ ID NO: 4305 - DNA, 999 bp, Saccharomyces cerevisiae
atgtctactcaatccggtatagtcgcagaacaagccttgctgcattctctgaatgaaaatctttcagcagatggcatcgtcatcattatagccaaaatttcccctgattctacctcggtacatcaaacgcaagtcgcacgtagcttcgaggagctggtacagttggcatcacaagaaagagaaccgttgtacatcttctataagccggaagggcttgataagtacttctttgtgtcattcatccccgatggttctccggtaagatcaagaatgctttatgcctcgacgaagaacactctggcaagacaggtaggttcaaactctttatccaccgaacagccattgatcacagatgcacaggacttggtggatttgaaaaattttgatagtgcccgtcctgctggccagaataagcccttgacacatgatgaagaaatgcaaatcgaaatcaataagcaacaggcacttttaaggaaaaacacatccgtcaagttggtttctcaggacagtgcttcgcctttatcgttaactttcagggtcaattctgagaaacctatcaatgaaatactggatagcgagggtaaaaatttaatcatatttcaaatcgatccctcgaacgaaaccatccagatcgtgcaatctgatacatgtccctccgtagatgaactgtacattgacttgcccgggccaagttacacgattttcaggcagggtgattcaagtttctttatctactcttgtccctctggcagcaaagtcaaagatagaatgatatatgcttctaacaagaatggatttatcaactacttgaaaaatgatcaaaaaatcgcatttagtaaagtggtagaaattggcgattttgtggaactagacaagtccttacttatggcaacaaataaagaagatagcctcgatcatggatccaatccagatctcccaaacaaaagcaatttgaaattcaacaaaccaaagggcccattgaggaaaagaagaacatag

SEQ ID NO: 4306 - DNA, 999 bp, Artificial Sequence
  Description of Artificial Sequence: Synthetic polynucleotide
atgtctactcaatccggtatagtcgcagaacaagccttgttgcattctttgaatgaaaatctttctgcagatggcatcgtcatcattatagccaaaatttcccctgattctacctctgtacatcaaacgcaagtcgcacgtagcttcgaggagttggtacagttggcatctcaagaaagagaaccgttgtacatcttctataagccggaagggcttgataagtacttctttgtgtctttcatccccgatggttctccggtaagatctagaatgctttatgcctctacgaagaacactttggcaagacaggtaggttccaactctttatccaccgaacagccattgatcacagatgcacaggacttggtggatttgaaaaattttgatagtgcccgtcctgctggccagaataagcccttgacacatgatgaagaaatgcaaatcgaaatcaataagcaacaggcacttttaaggaaaaacacatccgtcaagttggtttctcaggacagtgcttcccctttatctttaactttcagggtcaattctgagaaacctatcaatgaaatattggatagcgagggtaaaaatttaatcatatttcaaatcgatccctctaacgaaaccatccagatcgtgcaatctgatacatgtccctccgtagatgaattatacattgacttgcccgggccaagttacacgattttcaggcagggtgattctagtttctttatctactcttgtccctctggcagcaaagtcaaagatagaatgatatatgcttctaacaagaatggatttatcaactacttgaaaaatgatcaaaaaatcgcatttagtaaagtggtagaaattggcgattttgtggaattagacaagtccttacttatggcaacaaataaagaagatagcctcgatcatggatccaatccagatctcccaaacaaaagcaatttgaaattcaacaaaccaaagggcccattgaggaaaagaagaacatga

SEQ ID NO: 4307 - DNA, 633 bp, Saccharomyces cerevisiae
atggttgctaagaagagaaacacgcttagaagcaaagtaagtgcaagaaatagtcaaaattttggaccagacgtagcgaacaatggcattctggacgagagttatgacatagaatctgatccaagggcctttctgcaccaacctaaagaaactaaaaaggaaaagctacttaacagacagaatactttcttatctaacttgaaggggaaatccacacttaacgatggcatagctgccaattttgatggtatttctaaatcttccattagacgtaggaaaagaaagctaagagaagaactaaaaccaagaatgcaagatctgctcacttctttggagcaagaaaaggatttacggggcattattgaaaatagtagcaaagacatgaataacgatgatgacatcgacatggattctaaaataaggtttgtggacacaaaggaaatgaacttgaaaaagatagaacctggttctgttaggataaaaaagaatcagccaaatatcaggaaccaaaagggtgcaaaggcattggctgctaacgaaactgcaagattcaatcaggtcctaaccaatcaagatttccaaaaaaatccatttggcgccttaagagaggttatcaagctgcaaaaacaatga

SEQ ID NO: 4308 - DNA, 633 bp, Artificial Sequence
  Description of Artificial Sequence: Synthetic polynucleotide
atggttgctaagaagagaaacacgcttagaagcaaagtaagtgcaagaaatagtcaaaattttggaccagacgtagcgaacaatggcattttggacgagagttatgacatagaatctgatccaagggcctttttgcaccaacctaaagaaactaaaaaggaaaagcttcttaacagacagaatactttcttatctaacttgaaggggaaatccacacttaacgatggcatagctgccaattttgatggtatttctaaatcttccattagacgtaggaaaagaaagttgagagaagaattgaaaccaagaatgcaagatttactcacttctttggagcaagaaaaggatttaagaggcattattgaaaatagtagcaaagacatgaataacgatgatgacatcgacatggattctaaaataaggtttgtggacacaaaggaaatgaacttgaaaaagatagaacctggttctgttaggataaaaaagaatcagccaaatatcaggaaccaaaagggtgcaaaggcattggctgctaacgaaactgcaagattcaatcaggtcttgaccaatcaagatttccaaaaaaatccatttggcgccttaagagaggttatcaagttacaaaaacaatga

SEQ ID NO: 4309 - DNA, 552 bp, Saccharomyces cerevisiae
atgtcccagtcgaaccctatcttacgtggcctcgctattacaacagccatagcagctctatcagccaccggttatgctatctactttgactatcaaagaagaaatagcccgcaattcaggaaagtgttgagacaaagggccaaagagcaggccaagatggaagaacaagctaaaactcatgctaaggaagtgaagctgcaaaaggttaccgaattcttatccatggaattagccaaggaccccatccctagtgatccctccgaaagagaagctacatttaccaccaacgtagaaaatggtgaaagattatccatgcaacaaggtaaggaactggaagcagcctctaagttttataaagcattgactgtataccctcagccagccgatttattgggaatttaccaaagatccattcctgaagccatttacgaatatattatattaatgattgccatcttgcctcctgctaatgtggcttctttcgttaaaggagttgttggaagcaaggccgaatctgatgcggttgctgaagctaacgatatcgatgactga

SEQ ID NO: 4310 - DNA, 552 bp, Artificial Sequence
  Description of Artificial Sequence: Synthetic polynucleotide
atgtcccagtccaaccctatcttacgtggcctcgctattacaacagccatagcagctttatctgccaccggttatgctatctactttgactatcaaagaagaaatagcccgcaattcaggaaagtgttgagacaaagggccaaagagcaggccaagatggaagaacaagctaaaactcatgctaaggaagtgaagttacaaaaggttaccgaattcttatccatggaattagccaaggaccccatccctagtgatccctccgaaagagaagctacatttaccaccaacgtagaaaatggtgaaagattatccatgcaacaaggtaaggaattggaagcagcctctaagttttataaagcattgactgtataccctcagccagccgatttattgggaatttaccaaagatccattcctgaagccatttacgaatatattatattaatgattgccatcttgcctcctgctaatgtggcttctttcgttaaaggagttgttggaagcaaggccgaatctgatgcggttgctgaagctaacgatatcgatgactga

SEQ ID NO: 4311 - DNA, 1956 bp, Saccharomyces cerevisiae
atgagcgaatcggaagccaaatctaggtcggctacaccgccaagtaaagctaaacaagctactccaacaactacagctgcagctaatggagaaaagaaattaacaaacaaggagctaaaagaactaaagaaacaagaaaaagctgcaaagagagctgcaatgaagcaggctaatggtatatccattgaacaacagcaacaacaagcacaaatgaaaaaagagaagaaacaactacaacgtgagcaacaacagaaaagagagcaaaagcaaaaaaatgccaataaaaaaaaacaaaatgaacgaaacgtgaaaaagagcacactttttggtcatctggaaactactgaagaaagaagagcgacaattttagctttaaccagtgcagtatcatctccaaaaacttcgcgaatcaccgctgctgggttgatggtccccgtggtggctagtgcattatcaggatctaacgtattaacggcttcttccttgatgcccgtgggtccaaacgcgtcgtctactgtatctgcatcagctccagcttcaacaacaacgactcttcctgcctcttctgcagcactctctgccggtaccagttctgcgtcaacaaatactccaacagctatacaacaagagattgcttcatcaaacgcttctgatgttgccaagacattggcatctatctcgttagaggctggtgagtttaatgtcattcccggtatatcgtcagtgatccctaccgtgttagaacaatcatttgacaactccagcttgatatcgtctgttaaggaacttttattgaataaagaccttatccatccgtcgatattattattaacttctcatctagcacactataaaatcgtgggatccatcccacgttgcatagccatgctagaggttttccaaattgttatcaaagactatcaaacacctaagggaactaccttgtcacgtaacttaacaagttatttgtcacaccagattgatcttttgaaaaaagctagacctttaagtgttactatgggtaatgctatcagatggttaaagcaagaaatttcattaattgacccatctacccccgacaaagccgccaaaaaagacctttgtgagaaaattgggcagtttgctaaagaaaaaatcgaactggctgatcaactaattatagacaatgcctctacacaaattgaagaatctactactattgtgacatatggttcatcaaaggttctaactgaactgttactgcataatgcaatcagtttaaagaaaaacatcaaagtgattgtcgtcgattcgagaccactatttgaagggcggaaaatggcagaaactttaagaaatgctggtgtcaatgttatgtatgcacttattacaagtttggatacgatattcaatatggatgtggactatgtgtttttaggagcccattctatcctatctaatgggttcctatattcaagagctgggacagcaatgttggctatgagcgctaagagaagaaatatacctgtattagtctgctgcgaaagtttgaagttttcacaaagagtacaattggatagtgtcacatttaatgaactggcagatccaaatgacctggttaatatagattacgaaaatccagtcgagagacgcggtaataaaggtgcgttattaaaccaatttatcaaagaaagaaaatttgaaaagaaaaagctagcaatggagaataagccaaagggtaataaaattggcggtaagaaaggatctgaaggagaaagcaaggacgccagtaatgaagaagacagcaacagcaaaaatattttggatggttggcaagagttaccttcgttaaatattgtcaacatcttatacgatttaacaccaccagaatatattaaaaaagtgatcactgaattcggcgctttgccaccttcatctgtccctgttattttaagagagtacaaaggttccgcataa

SEQ ID NO: 4312 - DNA, 1956 bp, Artificial Sequence
  Description of Artificial Sequence: Synthetic polynucleotide
atgagcgaaagtgaagccaaatctaggtctgctacaccgccaagtaaagctaaacaagctactccaacaactacagctgcagctaatggagaaaagaaattaacaaacaaggagttgaaagaattgaagaaacaagaaaaagctgcaaagagagctgcaatgaagcaggctaatggtatatccattgaacaacagcaacaacaagcacaaatgaaaaaagagaagaaacaattacaacgtgagcaacaacagaaaagagagcaaaagcaaaaaaatgccaataaaaaaaaacaaaatgaaagaaacgtgaaaaagagcacactttttggtcatttggaaactactgaagaaagaagagcgacaattttagctttaaccagtgcagtatcttctccaaaaacttctagaatcaccgctgctgggttgatggtccccgtggtggctagtgcattatctggatctaacgtattaacggcttcttccttgatgcccgtgggtccaaacgcgtcttctactgtatctgcatctgctccagcttctacaacaacgactcttcctgcctcttctgcagcactctctgccggtaccagttctgcgtctacaaatactccaacagctatacaacaagagattgcttcttccaacgcttctgatgttgccaagacattggcatctatctctttagaggctggtgagtttaatgtcattcccggtatatcttctgtgatccctaccgtgttagaacaaagttttgacaactccagcttgatatcttctgttaaggaacttttattgaataaagaccttatccatccgagcatattattattaacttctcatttagcacactataaaatcgtgggatccatcccacgttgcatagccatgttagaggttttccaaattgttatcaaagactatcaaacacctaagggaactaccttgtctcgtaacttaacaagttatttgtctcaccagattgatcttttgaaaaaagctagacctttaagtgttactatgggtaatgctatcagatggttaaagcaagaaatttctttaattgacccatctacccccgacaaagccgccaaaaaagacctttgtgagaaaattgggcagtttgctaaagaaaaaatcgaattggctgatcaattgattatagacaatgcctctacacaaattgaagaatctactactattgtgacatatggttcttccaaggttttaactgaattattattacataatgcaatcagtttaaagaaaaacatcaaagtgattgtcgtcgattccagaccattatttgaagggagaaaaatggcagaaactttaagaaatgctggtgtcaatgttatgtatgcacttattacaagtttggatacgatattcaatatggatgtggactatgtgtttttaggagcccattctatcctttctaatgggttcctctattctagagctgggacagcaatgttggctatgagcgctaagagaagaaatatacctgtattagtctgctgcgaaagtttgaagttttctcaaagagtacaattggatagtgtcacatttaatgaattggcagatccaaatgacttggttaatatagattacgaaaatccagtcgagagacgcggtaataaaggtgcgttattaaaccaatttatcaaagaaagaaaatttgaaaagaaaaagttagcaatggagaataagccaaagggtaataaaattggcggtaagaaaggatctgaaggagaaagcaaggacgccagtaatgaagaagacagcaacagcaaaaatattttggatggttggcaagagttaccttctttaaatattgtcaacatcttatacgatttaacaccaccagaatatattaaaaaagtgatcactgaattcggcgctttgccaccttcttctgtccctgttattttaagagagtacaaaggttccgcatga

SEQ ID NO: 4313 - DNA, 1020 bp, Saccharomyces cerevisiae
atgggaaccataacagtggtgattaatgagggaccaatactgttgataagggcattgcaccgagcaacgaccaacaagaaaatgttcagaagtacagtttggagacgttttgcatctaccggcgaaattgcgaaagcaaagctggatgaattcttgatataccacaagacagatgcgaaactaaaaccattcatttaccgtcccaagaatgctcagatattgttaactaaagatattagggatccaaaaacaagggaaccattacaaccgagacctcccgtaaagccactgtcgaagcaaacgttaaatgattttatttattcggttgaacccaactcgacagaactactagattggttcaaagaatggacagggacctccataagaaagcgcgctatttggacgtacatctcaccaattcatgttcaaaagatgttgactgcgtcatttttcaaaatcggtaaatatgcgcacatggtaggactcttatatggtattgagcacaagtttctcaaagcgcaaaatccatccgtatttgatatcgagcatttttttaatactaatatcatgtgtgctttgcatcgaaataggttgaaagactataaagatgcagaaattgctcagaggaaactgcaggttgcttggaaaaaggtattaaatagaaaaaataatactggactagcaaatattcttgttgcaacattaggtagacagattggatttaccccagagctgacgggcttgcaacctgtagatattagtttaccagatatccccaattcatcaagtggcgcggaactaaaggacttgctaagcaaatacgaggggatataccttattgcaagaacattattggacatcgatcaacacaatgctcaatatctagaattgcaagaatttatacgccaatatcaaaatgcattaagtgaatccagcgatccatacgacacgcatttgaaagcgttgggactgttggaaacaccacctcctcaggaatccaccgaaaaagaggaaaaatag

SEQ ID NO: 4314 - DNA, 1020 bp, Artificial Sequence
  Description of Artificial Sequence: Synthetic polynucleotide
atgggaaccataacagtggtgattaatgagggaccaatattattgataagggcattgcacagagcaacgaccaacaagaaaatgttcagaagtacagtttggagacgttttgcatctaccggcgaaattgcgaaagcaaagttggatgaattcttgatataccacaagacagatgcgaaattgaaaccattcatttaccgtcccaagaatgctcagatattgttaactaaagatattagggatccaaaaacaagggaaccattacaaccgagacctcccgtaaagccattatccaagcaaacgttaaatgattttatttattctgttgaacccaactccacagaattattagattggttcaaagaatggacagggacctccataagaaagcgcgctatttggacgtacatctctccaattcatgttcaaaagatgttgactgcgtcttttttcaaaatcggtaaatatgcgcacatggtaggactcttatatggtattgagcacaagtttctcaaagcgcaaaatccatccgtatttgatatcgagcatttttttaatactaatatcatgtgtgctttgcatagaaataggttgaaagactataaagatgcagaaattgctcagaggaaattacaggttgcttggaaaaaggtattaaatagaaaaaataatactggattagcaaatattcttgttgcaacattaggtagacagattggatttaccccagagcttacgggcttgcaacctgtagatattagtttaccagatatccccaattcttccagtggcgcggaattgaaggacttgttgagcaaatacgaggggatataccttattgcaagaacattattggacatcgatcaacacaatgctcaatatttggaattgcaagaatttatacgccaatatcaaaatgcattaagtgaatccagcgatccatacgacacgcatttgaaagcgttgggattattggaaacaccacctcctcaggaatccaccgaaaaagaggaaaaatga

SEQ ID NO: 4315 - DNA, 525 bp, Saccharomyces cerevisiae
atgtctactaaagcccaaaaccctatgcgtgatttgaagatcgagaaattggtcttgaacatctccgttggtgaatctggtgacagattaaccagagcctccaaggttttagaacaattatctggtcaaactccagttcaatccaaggccagatacactgtcagaactttcggtatcagaagaaacgaaaaaattgctgttcacgttaccgtcagaggtccaaaggctgaagaaattttggaaagaggtttgaaggtcaaggaataccaattgagagacagaaacttctctgctaccggtaacttcggtttcggtattgacgaacacattgacttgggtatcaagtatgacccatccatcggtattttcggtatggatttctatgtcgtcatgaacagaccaggtgctagagtcactagaagaaagagatgtaagggtactgttggtaactcccacaagacaactaaggaagacaccgtctcttggttcaagcaaaagtacgacgctgatgtgctcgataaataa

SEQ ID NO: 4316 - DNA, 525 bp, Artificial Sequence
  Description of Artificial Sequence: Synthetic polynucleotide
atgtctactaaagcccaaaaccctatgcgtgatttgaagatcgagaaattggtcttgaacatctccgttggtgaatctggtgacagattaaccagagcctccaaggttttagaacaattatctggtcaaactccagttcaatccaaggccagatacactgtcagaactttcggtatcagaagaaacgaaaaaattgctgttcacgttaccgtcagaggtccaaaggctgaagaaattttggaaagaggtttgaaggtcaaggaataccaattgagagacagaaacttctctgctaccggtaacttcggtttcggtattgacgaacacattgacttgggtatcaagtatgacccatccatcggtattttcggtatggatttctatgtcgtcatgaacagaccaggtgctagagtcactagaagaaagagatgtaagggtactgttggtaactcccacaagacaactaaggaagacaccgtctcttggttcaagcaaaagtacgacgctgatgtgctcgataaatga

SEQ ID NO: 4317 - DNA, 1020 bp, Saccharomyces cerevisiae
atgcacagaacttactctttaagaaattccagggcacctaccgcctctcaattacagaacccaccgccaccaccatctacaaccaaaggtagattctttgggaagggtggtctagcttacagctttaggagaagtgctgctggagcttttggcccagaattatccagaaagttgtctcaattggttaagattgaaaagaatgttttgaggtccatggaattgacagccaacgaaagacgtgacgctgctaagcaattgtctatttgggggttggaaaacgatgacgatgtttccgacatcactgataaattaggtgtcttgatctatgaagttagtgaattagacgaccaatttatcgatcgttatgaccaatacagattgactctaaagtccatcagagatatcgaaggttctgttcaaccatctagagaccgtaaggacaagatcaccgacaaaatcgcctacttgaaatacaaagatcctcaatcacctaagattgaggtcttggaacaagaattggtgcgtgctgaggctgaatctttggtcgctgaagctcaattatctaatatcacaaggtcaaagttgagagctgctttcaactaccaatttgactccatcatcgaacattcagagaaaattgctttaatcgctggttacggtaaggctctcttggaactattggacgactctcctgtcactccaggtgaaaccaggcctgcttacgatgggtatgaagcctctaaacaaatcattattgatgctgaaagcgcactgaatgaatggacactagactctgcccaagtcaagcctactttaagtttcaagcaggattacgaagacttcgaacctgaagaaggcgaagaagaggaagaggaagacggtcaaggcaggtggtccgaagacgaacaagaagatggacaaattgaagaacctgaacaagaagaagaaggtgctgttgaagaacatgaacaagtcggacaccagcaaagtgagtctcttccccaacaaacaacagcttaa

SEQ ID NO: 4318 - DNA, 1020 bp, Artificial Sequence
  Description of Artificial Sequence: Synthetic polynucleotide
atgcacagaacttactctttaagaaattccagggcacctaccgcctctcaattacagaacccaccgccaccaccatctacaaccaaaggtagattctttgggaagggtggtttagcttacagctttaggagaagtgctgctggagcttttggcccagaattatccagaaagttgtctcaattggttaagattgaaaagaatgttttgaggtccatggaattgacagccaacgaaagacgtgacgctgctaagcaattgtctatttgggggttggaaaacgatgacgatgtttccgacatcactgataaattaggtgtcttgatctatgaagttagtgaattagacgaccaatttatcgatcgttatgaccaatacagattgactttgaagtccatcagagatatcgaaggttctgttcaaccatctagagaccgtaaggacaagatcaccgacaaaatcgcctacttgaaatacaaagatcctcaaagtcctaagattgaggtcttggaacaagaattggtgcgtgctgaggctgaatctttggtcgctgaagctcaattatctaatatcacaaggtctaagttgagagctgctttcaactaccaatttgactccatcatcgaacattctgagaaaattgctttaatcgctggttacggtaaggctctcttggaattattggacgactctcctgtcactccaggtgaaaccaggcctgcttacgatgggtatgaagcctctaaacaaatcattattgatgctgaaagcgcattgaatgaatggacattagactctgcccaagtcaagcctactttaagtttcaagcaggattacgaagacttcgaacctgaagaaggcgaagaagaggaagaggaagacggtcaaggcaggtggtccgaagacgaacaagaagatggacaaattgaagaacctgaacaagaagaagaaggtgctgttgaagaacatgaacaagtcggacaccagcaaagtgagtctcttccccaacaaacaacagcttga

SEQ ID NO: 4319 - DNA, 1692 bp, Saccharomyces cerevisiae
atgtctgaaattactcttggaaaatacttatttgaaagattgaagcaagttaatgttaacaccatttttgggctaccaggcgacttcaacttgtccctattggacaagatttacgaggtagatggattgagatgggctggtaatgcaaatgagctgaacgccgcctatgccgccgatggttacgcacgcatcaagggtttatctgtgctggtaactacttttggcgtaggtgaattatccgccttgaatggtattgcaggatcgtatgcagaacacgtcggtgtactgcatgttgttggtgtcccctctatctccgctcaggctaagcaattgttgttgcatcataccttgggtaacggtgattttaccgtttttcacagaatgtccgccaatatctcagaaactacatcaatgattacagacattgctacagccccttcagaaatcgataggttgatcaggacaacatttataacacaaaggcctagctacttggggttgccagcgaatttggtagatctaaaggttcctggttctcttttggaaaaaccgattgatctatcattaaaacctaacgatcccgaagctgaaaaggaagttattgataccgtactagaattgatccagaattcgaaaaaccctgttatactatcggatgcctgtgcttctaggcacaacgttaaaaaagaaacccagaagttaattgatttgacgcaattcccagcttttgtgacacctctaggtaaagggtcaatagatgaacagcatcccagatatggcggtgtttatgtgggaacgctgtccaaacaagacgtgaaacaggccgttgagtcggctgatttgatcctttcggtcggtgctttgctctctgattttaacacaggttcgttttcctactcctacaagactaaaaatgtagtggagtttcattccgattacgtaaaggtgaagaacgctacgttcctcggtgtacaaatgaaatttgcactacaaaacttactgaaggttattcccgatgttgttaagggctacaagagcgttcccgtaccaaccaaaactcccgcaaacaaaggtgtacctgctagcacgcccttgaaacaagagtggttgtggaacgaattgtccaaattcttgcaagaaggtgatgttatcatttccgagaccggcacgtctgccttcggtatcaatcaaactatctttcctaaggacgcctacggtatctcgcaggtgttgtgggggtccatcggttttacaacaggagcaactttaggtgctgcctttgccgctgaggagattgaccccaacaagagagtcatcttattcataggtgacgggtctttgcagttaaccgtccaagaaatctccaccatgatcagatgggggttaaagccgtatctttttgtccttaacaacgacggctacactatcgaaaagctgattcatgggcctcacgcagagtacaacgaaatccagacctgggatcacctcgccctgttgcccgcatttggtgcgaaaaagtacgaaaatcacaagatcgccactacgggtgagtgggatgccttaaccactgattcagagttccagaaaaactcggtgatcagactaattgaactgaaactgcccgtctttgatgctccggaaagtttgatcaaacaagcgcaattgactgccgctacaaatgccaaacaataa

SEQ ID NO: 4320 - DNA, 1692 bp, Artificial Sequence
  Description of Artificial Sequence: Synthetic polynucleotide
atgtctgaaattactcttggaaaatacttatttgaaagattgaagcaagttaatgttaacaccatttttgggttaccaggcgacttcaacttgtccttattggacaagatttacgaggtagatggattgagatgggctggtaatgcaaatgagttgaacgccgcctatgccgccgatggttacgcacgcatcaagggtttatctgtgttagtaactacttttggcgtaggtgaattatccgccttgaatggtattgcaggatcctatgcagaacacgtcggtgtattacatgttgttggtgtcccctctatctccgctcaggctaagcaattgttgttgcatcataccttgggtaacggtgattttaccgtttttcacagaatgtccgccaatatcagtgaaactacatctatgattacagacattgctacagccccttctgaaatcgataggttgatcaggacaacatttataacacaaaggcctagctacttggggttgccagcgaatttggtagatttgaaggttcctggttctcttttggaaaaaccgattgatttatctttaaaacctaacgatcccgaagctgaaaaggaagttattgataccgtattggaattgatccagaattctaaaaaccctgttatattaagtgatgcctgtgcttctaggcacaacgttaaaaaagaaacccagaagttaattgatttgacgcaattcccagcttttgtgacacctttaggtaaagggtccatagatgaacagcatcccagatatggcggtgtttatgtgggaacgttatccaaacaagacgtgaaacaggccgttgagtctgctgatttgatcctttctgtcggtgctttgctctctgattttaacacaggttctttttcctactcctacaagactaaaaatgtagtggagtttcattccgattacgtaaaggtgaagaacgctacgttcctcggtgtacaaatgaaatttgcattacaaaacttattgaaggttattcccgatgttgttaagggctacaagagcgttcccgtaccaaccaaaactcccgcaaacaaaggtgtacctgctagcacgcccttgaaacaagagtggttgtggaacgaattgtccaaattcttgcaagaaggtgatgttatcatttccgagaccggcacgtctgccttcggtatcaatcaaactatctttcctaaggacgcctacggtatctctcaggtgttgtgggggtccatcggttttacaacaggagcaactttaggtgctgcctttgccgctgaggagattgaccccaacaagagagtcatcttattcataggtgacgggtctttgcagttaaccgtccaagaaatctccaccatgatcagatgggggttaaagccgtatctttttgtccttaacaacgacggctacactatcgaaaagttgattcatgggcctcacgcagagtacaacgaaatccagacctgggatcacctcgccttattgcccgcatttggtgcgaaaaagtacgaaaatcacaagatcgccactacgggtgagtgggatgccttaaccactgattctgagttccagaaaaactctgtgatcagattgattgaattgaaattgcccgtctttgatgctccggaaagtttgatcaaacaagcgcaattgactgccgctacaaatgccaaacaatga

SEQ ID NO: 4321 - DNA, 1689 bp, Saccharomyces cerevisiae
atgaacgtgttcggtaaaaaagaagaaaagcaagaaaaagtttactctctacaaaacggttttccgtactctcatcacccatacgcttctcaatactcaagaccagacggccctatcttactgcaagacttccatctgctggaaaatattgcaagtttcgatagagaaagagttccggagcgtgtagtccatgccaaaggtggtggttgtagactggagttcgaactaacagattctttgagtgatattacatacgccgctccataccagaatgtgggttacaaatgtcctggtcttgttcgtttttccaccgttggtggtgaaagtggtacaccagacactgcaagagacccaagaggtgtttcttttaaattctataccgagtgggggaaccatgactgggtcttcaacaatactcccgtcttcttcctcagagacgctattaagtttcccgtatttattcattcgcaaaagagagaccctcagtctcatctgaatcagtttcaggacactaccatatactgggattatctaacattgaatccggaatcaatccatcaaataacttacatgtttggtgatagaggtactcctgcttcgtgggctagtatgaacgcgtactctggtcattccttcatcatggtcaacaaagaaggtaaggacacatatgtgcaattccacgtcttgtcggatactggttttgaaaccttgactggagataaggctgctgaactgtcaggctcccaccctgattataatcaggcaaagctgttcactcaattgcaaaatggcgaaaagccaaaatttaactgttatgtgcaaacaatgacacccgaacaagcaactaagttcaggtattcggtaaatgacctaacgaaaatatggccacacaaggaattccctttgagaaaatttggtaccatcaccctaacggagaatgttgacaattatttccaagaaattgaacaagttgcattcagtccaacgaacacttgtatcccaggtattaagccttctaatgattccgttctacaagccagacttttctcctatccagacactcaacgtcatagattgggagccaactatcagcaattgcccgtcaacagaccaagaaacttgggatgtccatactccaaaggtgattcccaatacactgccgaacagtgtccatttaaagcagtgaacttccaaagggacggcccaatgagttactacaatttcggtcctgagccaaattatatttccagtttaccaaatcaaactctgaaattcaaaaatgaagacaacgacgaagtatctgataagttcaaagggatagttcttgacgaagtaacagaagtttctgtgagaaaacaggaacaagaccaaatcagaaacgagcatattgttgatgccaaaattaatcaatattactacgtttatggtattagtccactagacttcgaacagccaagagctctatatgaaaaggtatacaacgatgaacagaagaaattattcgttcataacgttgtttgccacgcttgtaagatcaaagatcctaaagtcaaaaagagagttacgcaatactttggtttgctaaacgaagatttgggtaaagtcattgcagaatgcttgggagttccttgggaacctgttgaccttgaaggttatgccaagacttggtccattgcaagtgccaattaa

SEQ ID NO: 4322 - DNA, 1689 bp, Artificial Sequence
  Description of Artificial Sequence: Synthetic polynucleotide
atgaacgtgttcggtaaaaaagaagaaaagcaagaaaaagtttactctttacaaaacggttttccgtactctcatcacccatacgcttctcaatactctagaccagacggccctatcttattacaagacttccatttattggaaaatattgcaagtttcgatagagaaagagttccggagcgtgtagtccatgccaaaggtggtggttgtagattggagttcgaattaacagattctttgagtgatattacatacgccgctccataccagaatgtgggttacaaatgtcctggtcttgttcgtttttccaccgttggtggtgaaagtggtacaccagacactgcaagagacccaagaggtgtttcttttaaattctataccgagtgggggaaccatgactgggtcttcaacaatactcccgtcttcttcctcagagacgctattaagtttcccgtatttattcattctcaaaagagagaccctcagtctcatttgaatcagtttcaggacactaccatatactgggattatttgacattgaatccggaaagtatccatcaaataacttacatgtttggtgatagaggtactcctgcttcttgggctagtatgaacgcgtactctggtcattccttcatcatggtcaacaaagaaggtaaggacacatatgtgcaattccacgtcttgagtgatactggttttgaaaccttgactggagataaggctgctgaattaagtggctcccaccctgattataatcaggcaaagcttttcactcaattgcaaaatggcgaaaagccaaaatttaactgttatgtgcaaacaatgacacccgaacaagcaactaagttcaggtattctgtaaatgacttaacgaaaatatggccacacaaggaattccctttgagaaaatttggtaccatcaccttgacggagaatgttgacaattatttccaagaaattgaacaagttgcattcagtccaacgaacacttgtatcccaggtattaagccttctaatgattccgttttgcaagccagacttttctcctatccagacactcaacgtcatagattgggagccaactatcagcaattgcccgtcaacagaccaagaaacttgggatgtccatactccaaaggtgattcccaatacactgccgaacagtgtccatttaaagcagtgaacttccaaagggacggcccaatgagttactacaatttcggtcctgagccaaattatatttccagtttaccaaatcaaactttgaaattcaaaaatgaagacaacgacgaagtatctgataagttcaaagggatagttcttgacgaagtaacagaagtttctgtgagaaaacaggaacaagaccaaatcagaaacgagcatattgttgatgccaaaattaatcaatattactacgtttatggtattagtccattggacttcgaacagccaagagctttgtatgaaaaggtatacaacgatgaacagaagaaattattcgttcataacgttgtttgccacgcttgtaagatcaaagatcctaaagtcaaaaagagagttacgcaatactttggtttgttgaacgaagatttgggtaaagtcattgcagaatgcttgggagttccttgggaacctgttgaccttgaaggttatgccaagacttggtccattgcaagtgccaattga

SEQ ID NO: 4323 - DNA, 2811 bp, Saccharomyces cerevisiae
atggaggaacaatttactaatcagaagaaagtatcacatctacagtcattaatgaacactaaaaggagtgaacagcccaccgaatttgccaaaaaacataggtttaaagatacgcttgcattgttcctggtttttttgagttttaaccacttcacttccctatgtttattggtttcctttattgttgctaccaaatgcaaagattttctggcaaattgttttattatacttttcctatcgaaaaaaccttcccgccatatcggtgaagtggcgcacatagatataagtacttccaaagtgaccaatggtagttcaaaccgaaaatctaattcacgattttttggcaattcaaaaaatagcttcgtcattccgatccccgtattaatttgtgaaattttatttgcaatgttactaaagatttacggtggcgattattttgttaagccaataaaaaatctggcaatttctattattgcctcatttttgatcaatgatccaagcgattgcttaagctatgcaacttcatgctcagtattgtatgctgtgtcaactaacacttttcaaagagtgtcacacttctttgacattatacagttatttgatatgtctttacgaggaaccggccaatcaattaaattattcacggtttttcgcaagtattcacagtttttcaaaaagcttttctctctatttttgccaatgcctttcaagatgcttggcaaacattcagacagtatgatttattatctatcctttcacatcctttttttctcatttgcttcaagtttattacaccctcatagacaaacagcggaaaacaagccattgaaaaagggtttcaattcaactaaaccagatgtagcccgtgttcaaggtctgcaaaagatgagaatttcttcttcttcttccgtttctgccgattcgaacactttagaggaccaaagtcctatgataccgaacgatccaggtggacttagcagcagcaatcaaactatccatccatcccaacaaaataactcgccagttcccctatcatcacacagtaatattttgaaccctgccgcctcttatcctactgatgctacttctagttttccctatttcacttctatggtcaaggaatataagtcatatcagccatcggtaatctctgctgaaggaagcaattctcaagccgttactactactaccagtacaacaacctctcctacaacgttcaacttttctggtgataacactagtttgtcaaatgaaatctctctatctgattcctcgaatggaaattcgaaaaaggattctgatttcttttccccttccaatgacaagtatactaaccaactgtttgaactgaatgttgattttgggaacatgttttcttctagcaaattatcttcagacatatctgttacatcaaacttggaaaattttatccgtcttctattcagaagaaagaatcaacacttgattgcacctctttggtctatggtagttacattaaaaacaacgaattttgaaaaaaaatacttacaagaaacctctgaaaattcactaacaccaacaaattcgaatacttcatacgtcagtaatcaggaaaaacatgacaaagatttggacacgattaatacacattcagtttcatcaagaattagtttcacccatgccggaaagtttaagaagagcgtgtttaacaatttcgaaccttcaaatactatggccctgattgcaaagacaacatctgatgactacaatcttttaaatttagtttccaccaatgaaaatattttcaatagaaatgataatgactacaaagtttgcattattgatattagcacaaactctattacattccatattgaaaatttacatgatggcgaactcattgttttagtaaacggtgttatctggtcagaagtttcttgcgctttaattttagagcatgtaggcgaagaatacgttgtcgttaacggattagtcccttcttgttcttatgatattcaattcatcaacagactaaatcaccgagatgattatttggtttctgatttaattgtaaggacttgtgggaataacaatgcgattgccggaaaatttgaaaaccttgatttcagcttcccttcatactaccataggaaattcttatctccgttgctaactctgaagcattccgtgctaactacaaacgcaaatttgtccgatgaaaggacaaaattgaaaaagacaaaaaaggaattcagcaagaagttaagtcttttgagacaagaaattgattattttaaaggcaggatttcacagaacgcaacacatgacgaaaagagcactttaaaagtcgaaaatttgaaggttgccctacagcaaagtgagactgcggtaaataagttagagatgcaattgaaaactctcactgaaaaagagcttgaattagaagaggaatacttgaaaaagaaagatctacacttgaaaaatcaattagagttcagtaagttagaagaaagcttatcgaaagacctgaaaaactcagaagggaggttccaaaaggtcaatcaagaattagttcaactaggctctaaactggacaaattgaacgcgagaaacgagaagttacaaaaggaggtcgatcagaacgcagaagagatagaaaagttcagtactcaatttttgagtaaaagagaaaaggatagatttagaagaaaggagtacaggatacgcgaagccaataaatttgaattgactataaaggggttagagcaagatatcaacagattagaaaatgagaatgaaaatatacatagtctaattggtaatagttactga

SEQ ID NO: 4324 - DNA, 2811 bp, Artificial Sequence
  Description of Artificial Sequence: Synthetic polynucleotide
atggaggaacaatttactaatcagaagaaagtatctcatttacagtctttaatgaacactaaaaggagtgaacagcccaccgaatttgccaaaaaacataggtttaaagatacgcttgcattgttcttggtttttttgagttttaaccacttcacttccttatgtttattggtttcctttattgttgctaccaaatgcaaagattttttggcaaattgttttattatacttttcttgagtaaaaaaccttcccgccatatcggtgaagtggcgcacatagatataagtacttccaaagtgaccaatggtagtagtaacagaaaatctaattctagattttttggcaattctaaaaatagcttcgtcattccgatccccgtattaatttgtgaaattttatttgcaatgttattgaagatttacggtggcgattattttgttaagccaataaaaaatttggcaatttctattattgcctcttttttgatcaatgatccaagcgattgcttaagctatgcaacttcttgcagtgtattgtatgctgtgtccactaacacttttcaaagagtgtctcacttctttgacattatacagttatttgatatgtctttaagaggaaccggccaatctattaaattattcacggtttttcgcaagtattctcagtttttcaaaaagcttttctctttatttttgccaatgcctttcaagatgcttggcaaacattctgacagtatgatttattatttatcctttcacatcctttttttctcctttgcttccagtttattacaccctcatagacaaacagcggaaaacaagccattgaaaaagggtttcaattctactaaaccagatgtagcccgtgttcaaggtttacaaaagatgagaatttcttcttcttcttccgtttctgccgattccaacactttagaggaccaaagtcctatgataccgaacgatccaggtggacttagcagcagcaatcaaactatccatccatcccaacaaaataactctccagttcccttatcttctcacagtaatattttgaaccctgccgcctcttatcctactgatgctacttctagttttccctatttcacttctatggtcaaggaatataagagttatcagccatctgtaatctctgctgaaggaagcaattctcaagccgttactactactaccagtacaacaacctctcctacaacgttcaacttttctggtgataacactagtttgagcaatgaaatctctttatctgattcctctaatggaaattctaaaaaggattctgatttcttttccccttccaatgacaagtatactaaccaattatttgaattgaatgttgattttgggaacatgttttcttctagcaaattatcttctgacatatctgttacaagtaacttggaaaattttatccgtcttttattcagaagaaagaatcaacacttgattgcacctctttggtctatggtagttacattaaaaacaacgaattttgaaaaaaaatacttacaagaaacctctgaaaattctttaacaccaacaaatagtaatacttcttacgtcagtaatcaggaaaaacatgacaaagatttggacacgattaatacacattctgtttcttctagaattagtttcacccatgccggaaagtttaagaagagcgtgtttaacaatttcgaaccttccaatactatggccttaattgcaaagacaacatctgatgactacaatcttttaaatttagtttccaccaatgaaaatattttcaatagaaatgataatgactacaaagtttgcattattgatattagcacaaactctattacattccatattgaaaatttacatgatggcgaactcattgttttagtaaacggtgttatctggtctgaagtttcttgcgctttaattttagagcatgtaggcgaagaatacgttgtcgttaacggattagtcccttcttgttcttatgatattcaattcatcaacagattgaatcacagagatgattatttggtttctgatttaattgtaaggacttgtgggaataacaatgcgattgccggaaaatttgaaaaccttgatttcagcttcccttcttactaccataggaaattcttatctccgttgttgactttgaagcattccgtgttgactacaaacgcaaatttgtccgatgaaaggacaaaattgaaaaagacaaaaaaggaattcagcaagaagttaagtcttttgagacaagaaattgattattttaaaggcaggatttctcagaacgcaacacatgacgaaaagagcactttaaaagtcgaaaatttgaaggttgccttgcagcaaagtgagactgcggtaaataagttagagatgcaattgaaaactctcactgaaaaagagcttgaattagaagaggaatacttgaaaaagaaagatttacacttgaaaaatcaattagagttcagtaagttagaagaaagcttatccaaagacttgaaaaactctgaagggaggttccaaaaggtcaatcaagaattagttcaattaggctctaaattagacaaattgaacgcgagaaacgagaagttacaaaaggaggtcgatcagaacgcagaagagatagaaaagttcagtactcaatttttgagtaaaagagaaaaggatagatttagaagaaaggagtacaggatacgcgaagccaataaatttgaattgactataaaggggttagagcaagatatcaacagattagaaaatgagaatgaaaatatacatagtttgattggtaatagttactga

SEQ ID NO: 4325 - DNA, 3714 bp, Saccharomyces cerevisiae
atggctacaagtgttaaaagaaaagcatctgagacttctgaccagaatattgttaaagtgcaaaagaaacattccacacaggacagcacaactgacaacggatccaaagaaaatgatcacagtagtcaagccatcaacgagcgtaccgtgcccgagcaagaaaacgacgaaagcgatacttcacctgaaagtaacgaggtcgctactaacactgctgcgactcgccacaatggaaaggttactgcaacagagtcctatgatattcacatagctagagaaacggctgaattattcaagtctaatattttcaagttacaaattgacgaattactggagcaagtgaagttaaaacaaaaacatgttctgaaagtcgaaaaatttctacacaagttatatgatattctccaggaaattcctgattgggaggaaaagtcattagctgaagtggactccttcttcaaaaacaagattgtttctgttccatttgttgaccccaaacctattcctcaaaatactaattataaattcaattacaagaaaccagacatctccttaattggctcctttgctcttaaagctggaatttatcaacctaacggctcttccattgatactttactaacaatgccaaaggagttgttcgaaaaaaaagatttcttaaatttcaggtgcttacacaagaggagcgtttatttagcatacctaacccaccacctattgatattattgaaaaaagataaattagactcatttttgcaactcgagtattcttattttgataatgatccgcttttaccaattttaagaattagttgttccaaaccaacgggtgattctctttctgattataacttttacaagaccagattctctatcaacttgcttattggtttcccatacaaagtctttgaaccaaaaaaactgttacccaatagaaactgtattagaatagcacaagaaagcaaagagcaatctttaccagccactcctctttacaatttttcagtgttatcttcttcaacacatgaaaactacctgaagtatttatacaagacgaagaaacaaacagaatcttttgttgaagctactgttttaggtagattatggctgcagcaacgtgggttttcatccaatatgtcgcattctggttcattgggtggattcggtacttttgaatttactatcttgatggcagcgttattaaacggtggtggtataaatagtaacaagatattacttcacgggttttcatcataccaattgtttaaaggtgtaataaaatacttagccactatggatttgtgccacgacggccatttacaatttcattctaatccagagaattcctccagttcaccagcttctaaatatattgatgagggtttccaaactccaaccttatttgataagtcaaccaaggtcaatattcttacaaaaatgactgtttcttcttatcaaattttgaaagaatatgccggtgaaacattgagaatgctaaacaacgttgttcaagaccaattctcaaatatttttttgactaatattagccgttttgacaatttgaagtacgatctgtgttacgatgtacagttacctttgggtaagtacaataatttagaaacttctttagctgctacatttgggtcaatggaaagagtaaaatttattactctggagaatttcctcgcccacaagattacaaatgttgcaaggtatgcattgggcgatagaatcaaatatatccaaattgaaatggttggtcaaaagtccgattttccaatcaccaaaagaaaagtgtactctaacacaggaggtaaccatttcaactttgattttgtaagagtaaaattgattgttaacccctctgaatgtgacaaattagtcaccaagggccctgctcattctgaaactatgtctacagaagcagccgtttttaagaatttttggggaattaaatcttccttaagaagattcaaggatggctccatcacccattgttgtgtttggtctacatcctcatcagagcccatcatttcctcaattgttaactttgcattgcagaaacatgtttcaaaaaaggcacaaatatcaaatgagactatcaagaagtttcataatttcctaccgttgccaaacttaccctcaagtgctaaaacatcagttttgaacttgagcagctttttcaacttaaagaaatcctttgacgatttatacaaaataattttccaaatgaagttaccgctttctgtaaaatcaatcttaccggttggctctgcatttagatacacttccttatgccaaccagtaccattcgcatactctgatccagatttctttcaagacgtcattttggaatttgaaacctcacctaaatggccagatgaaattacttccttagaaaaggctaaaacagcttttcttctcaaaattcaagaagaattaagcgctaactcttcaacttataggtcgtttttcagcagagatgaatccatcccatacaatttagaaattgtaaccttgaacatcttgacacctgaaggttatggattcaaattcagagttctaactgaacgtgacgaaatcctttatttaagagctatagcgaatgctaggaatgagttgaaaccagaattggaggccacattcctaaaatttactgcaaaatatctggcttccgtaagacatactcgtactttggagaatatatctcattcgtatcaattctactcccctgtggtaagactattcaaaagatggttggacactcatttattactaggtcatataacggacgaattagcagagttgattgccattaaaccttttgttgatcctgcaccatatttcattccaggttctcttgaaaacggtttcctcaaagtgcttaagtttataagtcaatggaactggaaagatgatccattgattttagatctagtaaaaccagaagatgatataagagatacatttgaaacaagtattggagctggctcagagctagactccaaaacgatgaaaaagctttctgaaagattaaccctagcacaatataagggcattcaaatgaacttcacgaacttgaggaacagtgatcccaacggtacacatttgcaattttttgttgcctctaagaacgatccaagcggtattctttattcatcaggtatcccactacccattgctacaaggcttacagcattagctaaagtagccgtgaatcttttacagacacacggtttaaaccagcaaactatcaatcttttattcacgcctggattaaaagattacgattttgtcgttgatttgaggacaccaataggtttgaaatcatcctgtggtatactttcagccacagagttcaagaatataactaacgatcaagccccatcgaactttccagagaatttgaatgatttaagtgaaaaaatggatccaacataccagttagtgaagtatttgaacttgaagtacaagaatagtttgattttatcaagccgcaagtatataggtgtgaatggtggagagaaaggagataaaaatgtcatcacagggctaataaagccactcttcaagggagcccacaaatttagagtaaacttggattgcaacgttaaaccagtggatgatgagaatgtgattttaaataaagaagccatatttcatgagattgctgcattcgggaatgacatggttataaattttgagacagattag

SEQ ID NO: 4326 - DNA, 3714 bp, Artificial Sequence
  Description of Artificial Sequence: Synthetic polynucleotide
atggctacaagtgttaaaagaaaagcatctgagacttctgaccagaatattgttaaagtgcaaaagaaacattccacacaggacagcacaactgacaacggatccaaagaaaatgatcacagtagtcaagccatcaacgagcgtaccgtgcccgagcaagaaaacgacgaaagcgatacttctcctgaaagtaacgaggtcgctactaacactgctgcgactcgccacaatggaaaggttactgcaacagagtcctatgatattcacatagctagagaaacggctgaattattcaagtctaatattttcaagttacaaattgacgaattattggagcaagtgaagttaaaacaaaaacatgttttgaaagtcgaaaaatttttgcacaagttatatgatattctccaggaaattcctgattgggaggaaaagtctttagctgaagtggactccttcttcaaaaacaagattgtttctgttccatttgttgaccccaaacctattcctcaaaatactaattataaattcaattacaagaaaccagacatctccttaattggctcctttgctcttaaagctggaatttatcaacctaacggctcttccattgatactttattaacaatgccaaaggagttgttcgaaaaaaaagatttcttaaatttcaggtgcttacacaagaggagcgtttatttagcatacttgacccaccacttattgatattattgaaaaaagataaattagactcttttttgcaactcgagtattcttattttgataatgatccgcttttaccaattttaagaattagttgttccaaaccaacgggtgattctctttctgattataacttttacaagaccagattctctatcaacttgcttattggtttcccatacaaagtctttgaaccaaaaaaattattacccaatagaaactgtattagaatagcacaagaaagcaaagagcaatctttaccagccactcctctttacaatttttctgtgttatcttcttctacacatgaaaactacttgaagtatttatacaagacgaagaaacaaacagaatcttttgttgaagctactgttttaggtagattatggttacagcaacgtgggttttcttccaatatgtcccattctggttctttgggtggattcggtacttttgaatttactatcttgatggcagcgttattaaacggtggtggtataaatagtaacaagatattacttcacgggttttcttcctaccaattgtttaaaggtgtaataaaatacttagccactatggatttgtgccacgacggccatttacaatttcattctaatccagagaattcctccagttctccagcttctaaatatattgatgagggtttccaaactccaaccttatttgataagtctaccaaggtcaatattcttacaaaaatgactgtttcttcttatcaaattttgaaagaatatgccggtgaaacattgagaatgttgaacaacgttgttcaagaccaattcagtaatatttttttgactaatattagccgttttgacaatttgaagtacgatttatgttacgatgtacagttacctttgggtaagtacaataatttagaaacttctttagctgctacatttgggtccatggaaagagtaaaatttattactttagagaatttcctcgcccacaagattacaaatgttgcaaggtatgcattgggcgatagaatcaaatatatccaaattgaaatggttggtcaaaagtccgattttccaatcaccaaaagaaaagtgtactctaacacaggaggtaaccatttcaactttgattttgtaagagtaaaattgattgttaacccctctgaatgtgacaaattagtcaccaagggccctgctcattctgaaactatgtctacagaagcagccgtttttaagaatttttggggaattaaatcttccttaagaagattcaaggatggctccatcacccattgttgtgtttggtctacatcctcttctgagcccatcatttccagtattgttaactttgcattgcagaaacatgtttccaaaaaggcacaaatatccaatgagactatcaagaagtttcataatttcttgccgttgccaaacttacccagtagtgctaaaacatctgttttgaacttgagcagctttttcaacttaaagaaatcctttgacgatttatacaaaataattttccaaatgaagttaccgctttctgtaaaatctatcttaccggttggctctgcatttagatacacttccttatgccaaccagtaccattcgcatactctgatccagatttctttcaagacgtcattttggaatttgaaacctctcctaaatggccagatgaaattacttccttagaaaaggctaaaacagcttttcttctcaaaattcaagaagaattaagcgctaactcttctacttataggtcttttttcagcagagatgaatccatcccatacaatttagaaattgtaaccttgaacatcttgacacctgaaggttatggattcaaattcagagttttaactgaacgtgacgaaatcctttatttaagagctatagcgaatgctaggaatgagttgaaaccagaattggaggccacattcttgaaatttactgcaaaatatttggcttccgtaagacatactcgtactttggagaatatatctcattcttatcaattctactcccctgtggtaagattattcaaaagatggttggacactcatttattattgggtcatataacggacgaattagcagagttgattgccattaaaccttttgttgatcctgcaccatatttcattccaggttctcttgaaaacggtttcctcaaagtgcttaagtttataagtcaatggaactggaaagatgatccattgattttagatttagtaaaaccagaagatgatataagagatacatttgaaacaagtattggagctggcagtgagttggactccaaaacgatgaaaaagctttctgaaagattaaccttggcacaatataagggcattcaaatgaacttcacgaacttgaggaacagtgatcccaacggtacacatttgcaattttttgttgcctctaagaacgatccaagcggtattctttattcttctggtatcccattgcccattgctacaaggcttacagcattagctaaagtagccgtgaatcttttacagacacacggtttaaaccagcaaactatcaatcttttattcacgcctggattaaaagattacgattttgtcgttgatttgaggacaccaataggtttgaaatcttcctgtggtatactttctgccacagagttcaagaatataactaacgatcaagccccatctaactttccagagaatttgaatgatttaagtgaaaaaatggatccaacataccagttagtgaagtatttgaacttgaagtacaagaatagtttgattttatccagccgcaagtatataggtgtgaatggtggagagaaaggagataaaaatgtcatcacagggttgataaagccactcttcaagggagcccacaaatttagagtaaacttggattgcaacgttaaaccagtggatgatgagaatgtgattttaaataaagaagccatatttcatgagattgctgcattcgggaatgacatggttataaattttgagacagattga

SEQ ID NO: 4327 - DNA, 1485 bp, Saccharomyces cerevisiae
atgagctctgaagaggactatttcgatgagctcgaatatgaccttgccgatgaagttaatgaggaaaaagaagacatacaaactaaaaagctcactacggtaaattgtcaaacagaaaaattcaatccattcgaaattcttccggaaagtatagaattattcaggacgttggcactcatcagtcctgataggttatctctatcagagacagcacagattttaccaaaaattgtcgatttaaaaagaatccttcaacaacaagaaatagatttcattaaactgttaccgttttttaacgaaatcatccccctcatcaagagcaatataaaattaatgcacaattttctaatctcactgtacagtagacgttttccagaactatcttcattgataccatcaccattacaatactcaaaagtgataagcatactggaaaatgaaaattattcaaaaaacgaaagtgatgaactatttttccacttggaaaataaagcaaaattgaccagagagcagatcctcgttttaacaatgtccatgaagacgtctttcaaaaacaaagagccattggacatcaaaacgaggacgcaaattttagaagcaaatagcatattggaaaatttatggaaactacaagaagatataggtcaatacatagcctcaaagatatcaataattgcccctaacgtgtgtttcttggtaggcccggagatagcagcccaattaatagcacatgctggaggggttttggagttcagtcgcattcccagttgcaacattgcgtccattgggaagaataagcacctctcacatgagttacatacattagagagtggagtacgacaagaaggatatctatttgcttctgacatgattcagaaatttcccgtttctgtccataaacaaatgcttaggatgctttgtgcaaaagtatcactagccgcaagagttgatgctggccagaaaaacggtgatagaaatacagttttagctcataaatggaaagccgaactatcgaagaaagctagaaagctatcagaagccccgagcatttctgaaacgaaggctctacctattccggaggaccaacccaaaaagaaaagagctgggagaaaatttaggaagtacaaggaaaaattcagactatcgcatgtcagacaattacaaaataggatggaatttggcaagcaagaacaaactgttcttgattcctatggtgaagaagttggtttgggtatgtctaatacttctttacaacaagcagtaggagctacatcaggttccagaagatctgctggtaatcaagccaagctaacaaaggtaatgaagcacaggatttctgaggctaatcagcaagctgacgaattcctaatctccttgggtcataatacagagcaaccgaatctgtcgccagagatggttcaaatgcacaagaaacagcatactaacccagaagaagagaccaattggttttccggtcatggttag

SEQ ID NO: 4328 - DNA, 1485 bp, Artificial Sequence
  Description of Artificial Sequence: Synthetic polynucleotide
atgagctctgaagaggactatttcgatgagctcgaatatgaccttgccgatgaagttaatgaggaaaaagaagacatacaaactaaaaagctcactacggtaaattgtcaaacagaaaaattcaatccattcgaaattcttccggaaagtatagaattattcaggacgttggcactcatcagtcctgataggttatctttatctgagacagcacagattttaccaaaaattgtcgatttaaaaagaatccttcaacaacaagaaatagatttcattaaattattaccgttttttaacgaaatcatccccctcatcaagagcaatataaaattaatgcacaattttttgatctctttgtacagtagacgttttccagaattatcttctttgataccatctccattacaatactctaaagtgataagcatattggaaaatgaaaattattctaaaaacgaaagtgatgaattatttttccacttggaaaataaagcaaaattgaccagagagcagatcctcgttttaacaatgtccatgaagacgtctttcaaaaacaaagagccattggacatcaaaacgaggacgcaaattttagaagcaaatagcatattggaaaatttatggaaattacaagaagatataggtcaatacatagcctccaagatatccataattgcccctaacgtgtgtttcttggtaggcccggagatagcagcccaattaatagcacatgctggaggggttttggagttcagtcgcattcccagttgcaacattgcgtccattgggaagaataagcacctctctcatgagttacatacattagagagtggagtaaggcaagaaggatatttatttgcttctgacatgattcagaaatttcccgtttctgtccataaacaaatgcttaggatgctttgtgcaaaagtatctttggccgcaagagttgatgctggccagaaaaacggtgatagaaatacagttttagctcataaatggaaagccgaattatccaagaaagctagaaagttatctgaagccccgagcatttctgaaacgaaggctttacctattccggaggaccaacccaaaaagaaaagagctgggagaaaatttaggaagtacaaggaaaaattcagattatctcatgtcagacaattacaaaataggatggaatttggcaagcaagaacaaactgttcttgattcctatggtgaagaagttggtttgggtatgtctaatacttctttacaacaagcagtaggagctacatctggttccagaagatctgctggtaatcaagccaagttaacaaaggtaatgaagcacaggatttctgaggctaatcagcaagctgacgaattcttgatctccttgggtcataatacagagcaaccgaatttatctccagagatggttcaaatgcacaagaaacagcatactaacccagaagaagagaccaattggttttccggtcatggttga

SEQ ID NO: 4329 - DNA, 1719 bp, Saccharomyces cerevisiae
atgctatcaaaatcagaaaaaaatgtcgacctcttggcaggcaatatgagcaatttgagtttcgatgggcatgggactcctgggggcactggactatttcctaaccaaaatataacaaagaggaggacaaggcctgcgggtatcaatgattcaccttcgccggtaaaaccatccttttttccttacgaagatacttccaacatggacatagacgaagtatctcaacctgatatggatgtctcgaactctcccaagaagcttccaccaaagttttacgaaagagcaacttcaaataaaacacagagagttgttagtgtttgcaaaatgtactttctagaacattactgtgatatgtttgactatgtaattagtagaagacaacgcacgaagcaagttctagaatacctgcaacagcaaagccaacttccgaattctgaccagattaaactcaacgaagagtggtcctcttacttacaaagggaacatcaggttttgagaaaaagaaggttgaaaccaaaaaatagggattttgaaatgatcacacaagtaggtcaaggtggttatgggcaagtttatttagccagaaagaaagacacaaaagaggtgtgtgctttgaaaattttgaacaaaaaactattgtttaagctcaacgagacaaaacacgttttaactgaaagagatatcctaaccacgacaaggtctgaatggttagtaaaacttctgtatgcattccaagacctacaaagtttatacctggctatggaatttgtaccaggcggtgattttcgtacattattaataaatactagatgcttgaaaagtggccatgcgagattttacatcagtgaaatgttttgcgctgttaatgcgttacatgatttaggctatacacatagagatttaaagccggaaaacttcttaatcgatgccaagggacatataaaattaacagattttggtttggctgctggtacgatttctaatgaaagaattgaaagtatgaagataaggttagaaaaaatcaaggacctggaatttccagcgtttacagagaaatctatagaagatagaagaaaaatgtacaaccagttgagggagaaggaaattaattatgcgaactccatggttgggtctccggattatatggctttggaggttttagaaggaaagaaatatgactttactgtggattactggtcgttgggttgtatgctgttcgaaagtttagttggttatacaccatttagtggatcatcgactaatgagacctatgacaacttaaggcgctggaaacaaactttaagaagaccgagacaatctgatgggagggcagcattctccgatagaacttgggatttaataacaagattgattgccgatccaatcaatcgattaagatccttcgaacatgttaaacgcatgtcttattttgcagatataaactttagtactttgaggtcaatgatcccgccttttacaccccaactagacagcgaaactgatgccggttattttgatgacttcaccagtgaggctgacatggccaaatatgctgatgttttcaaaagacaagacaaattaacggctatggtagatgactcggcagtatcatcaaaacttgttgggttcactttccgacatagaaatggtaaacagggttccagtggcatcttattcaacggactggaacactcagaccccttttcaaccttttactag

SEQ ID NO: 4330 - DNA, 1719 bp, Artificial Sequence
  Description of Artificial Sequence: Synthetic polynucleotide
atgctttctaaaagtgaaaaaaatgtcgacctcttggcaggcaatatgagcaatttgagtttcgatgggcatgggactcctgggggcactggattatttcctaaccaaaatataacaaagaggaggacaaggcctgcgggtatcaatgattctccttctccggtaaaaccatccttttttccttacgaagatacttccaacatggacatagacgaagtatctcaacctgatatggatgtctccaactctcccaagaagcttccaccaaagttttacgaaagagcaacttccaataaaacacagagagttgttagtgtttgcaaaatgtactttttggaacattactgtgatatgtttgactatgtaattagtagaagacaacgcacgaagcaagttttggaatacttacaacagcaaagccaacttccgaattctgaccagattaaactcaacgaagagtggtcctcttacttacaaagggaacatcaggttttgagaaaaagaaggttgaaaccaaaaaatagggattttgaaatgatcacacaagtaggtcaaggtggttatgggcaagtttatttagccagaaagaaagacacaaaagaggtgtgtgctttgaaaattttgaacaaaaaacttttgtttaagctcaacgagacaaaacacgttttaactgaaagagatatcttgaccacgacaaggtctgaatggttagtaaaacttttatatgcattccaagacttgcaaagtttatacttggctatggaatttgtaccaggcggtgattttcgtacattattaataaatactagatgcttgaaaagtggccatgcgagattttacatcagtgaaatgttttgcgctgttaatgcgttacatgatttaggctatacacatagagatttaaagccggaaaacttcttaatcgatgccaagggacatataaaattaacagattttggtttggctgctggtacgatttctaatgaaagaattgaaagtatgaagataaggttagaaaaaatcaaggacttggaatttccagcgtttacagagaaatctatagaagatagaagaaaaatgtacaaccagttgagggagaaggaaattaattatgcgaactccatggttgggtctccggattatatggctttggaggttttagaaggaaagaaatatgactttactgtggattactggtctttgggttgtatgcttttcgaaagtttagttggttatacaccatttagtggatcttctactaatgagacctatgacaacttaaggcgctggaaacaaactttaagaagaccgagacaatctgatgggagggcagcattctccgatagaacttgggatttaataacaagattgattgccgatccaatcaatagattaagatccttcgaacatgttaaacgcatgtcttattttgcagatataaactttagtactttgaggtctatgatcccgccttttacaccccaattggacagcgaaactgatgccggttattttgatgacttcaccagtgaggctgacatggccaaatatgctgatgttttcaaaagacaagacaaattaacggctatggtagatgactctgcagtatcttctaaacttgttgggttcactttcagacatagaaatggtaaacagggttccagtggcatcttattcaacggattagaacactctgaccccttttccaccttttactga

SEQ ID NO: 4331 - DNA, 1524 bp, Saccharomyces cerevisiae
atgacaaatgcaaagattttagtagctcatataagtgaaagcgatgccgatgaggctatcagaaagatcaagaaagtgaatgaaaaatcagggccctttgatctaataattatattcagtaactcgtatgatgaaaattttgagctgaatactgatgggttacctcaactaatactactatcgtgtgataaggctaacaattcgaaatccaaaaagataaatgaaaatgtaacattgctgcataatatgggtacttataaattagcaaatggaatcactctttcatattttatttatccggatgatactcttcaaggggagaaaaaaagcatactggacgaatttggcaaaagtgaggatcaggtagacattctccttacaaaagaatggggcctttcgatctctgagagatgtggaaggttgtctggaagtgaagttgttgatgaattggcgaaaaagttacaagcaaggtaccattttgccttttcagatgaaataaacttttacgaattagagcctttccagtgggaaagagagcgcttatcgaggttcctcaatattccaaaatatggatctggaaagaaatgggcctatgcattcaatatgccaataggggacaacgaactaaaggatgaacctgaaccgcccaacttgatagctaacccgtataatagcgtggttacaaacagcaataaaaggccactagaaacagaaacagagaattcgttcgatggagacaaacaggtacttgctaatagagaaaagaatgaaaataaaaaaattcgaacgattttgccgtcaagttgtcatttctgcttttcaaatccaaacctcgaggatcatatgataatatcaatcggcaaactagtgtatttaaccacagcgaagggacctttaagtgttcctaagggtgatatggatatctcaggccattgcctcattattcccattgaacatattccgaaattagatccaagcaagaacgcagagttgacacagagtattttggcttatgaagctagtcttgtgaagatgaactacataaaatttgatatgtgcacgattgtcttcgaaatacagtctgaacgttctattcatttccacaaacaagttattcccgttccaaaatacctcgttctaaagttctgcagtgccttagatagacaggttcatttcaataacgaaaaattcacaagaaatgctaagctagagttccaatgttacgattcacactcttccaaacaatatgtggatgtaattaacaaccaatccaataattatttacaatttaccgtctacgagactcctgaagcggacccaaagatatatttggccacatttaatgccagtgagacaatagatctgcagtttggacgacgtgtactagcctttttacttaacttgccacgcagggtgaaatggaattcttcaacctgtttacaaactaagcaacaagagactatagaggctgaaaagtttcaaaaggcctacaggacctatgacatttctctcacagaaaactaa

SEQ ID NO: 4332 - DNA, 1524 bp, Artificial Sequence
  Description of Artificial Sequence: Synthetic polynucleotide
atgacaaatgcaaagattttagtagctcatataagtgaaagcgatgccgatgaggctatcagaaagatcaagaaagtgaatgaaaaaagtgggccctttgatttgataattatattcagtaacagttatgatgaaaattttgagttgaatactgatgggttacctcaattgatattattaagttgtgataaggctaacaattctaaatccaaaaagataaatgaaaatgtaacattgttgcataatatgggtacttataaattagcaaatggaatcactctttcctattttatttatccggatgatactcttcaaggggagaaaaaaagcatattggacgaatttggcaaaagtgaggatcaggtagacattctccttacaaaagaatggggcctttctatctctgagagatgtggaaggttgtctggaagtgaagttgttgatgaattggcgaaaaagttacaagcaaggtaccattttgccttttctgatgaaataaacttttacgaattagagcctttccagtgggaaagagagcgcttatctaggttcctcaatattccaaaatatggatctggaaagaaatgggcctatgcattcaatatgccaataggggacaacgaattgaaggatgaacctgaaccgcccaacttgatagctaacccgtataatagcgtggttacaaacagcaataaaaggccattggaaacagaaacagagaattctttcgatggagacaaacaggtacttgctaatagagaaaagaatgaaaataaaaaaattagaacgattttgccgtccagttgtcatttctgcttttctaatccaaacctcgaggatcatatgataatatccatcggcaaattagtgtatttaaccacagcgaagggacctttaagtgttcctaagggtgatatggatatcagtggccattgcctcattattcccattgaacatattccgaaattagatccaagcaagaacgcagagttgacacagagtattttggcttatgaagctagtcttgtgaagatgaactacataaaatttgatatgtgcacgattgtcttcgaaatacagtctgaacgttctattcatttccacaaacaagttattcccgttccaaaatacctcgttttgaagttctgcagtgccttagatagacaggttcatttcaataacgaaaaattcacaagaaatgctaagttggagttccaatgttacgattctcactcttccaaacaatatgtggatgtaattaacaaccaatccaataattatttacaatttaccgtctacgagactcctgaagcggacccaaagatatatttggccacatttaatgccagtgagacaatagatttacagtttggacgccgtgtattggcctttttacttaacttgccacgcagggtgaaatggaattcttccacctgtttacaaactaagcaacaagagactatagaggctgaaaagtttcaaaaggcctacaggacctatgacatttctctcacagaaaactga

SEQ ID NO: 4333 - DNA, 3315 bp, Saccharomyces cerevisiae
atgaataagtggttaaacacattatctaagacattcacttttcggcttttgaactgtcattataggcgatcattaccactttgtcaaaacttttctctgaagaagtcgttaactcataatcaagtcaggttctttaaaatgagcgatcttgataatttgcctccagttgacccaaagactggtgaggtcatcattaatccgttaaaggaagatggctctccaaagactcctaaggaaattgaaaaagagaagaaaaaggctgaaaaactgttaaagttcgctgccaaacaagctaaaaaaaatgctgctgccaccacaggtgcatctcaaaagaaacctaagaaaaagaaggaagttgagccaatccctgaatttattgacaaaactgttccaggtgagaaaaaaatcttagtatccttggatgatccggctttaaaagcttataaccctgctaacgttgaaagttcttggtatgactggtggatcaagactggtgtttttgaacctgagtttaccgctgatggtaaggttaaaccagaaggtgtattttgcattccagcacctccaccaaacgtcactggtgccttacatattggtcatgctttgactattgctatccaagattctttgatcagatataacagaatgaaaggtaaaactgtcttattcttgccaggtttcgaccatgctggtattgctactcagtccgttgtggagaagcaaatctgggctaaggacagaaagactagacatgactatggaagagaagcttttgttggtaaggtctgggaatggaaagaggaataccatagcagaattaagaaccaaattcaaaaattgggggcttcttatgattggagccgcgaagctttcactttgagtccagaattgaccaagtctgttgaagaagcttttgttagactacatgatgaaggtgttatttatcgtgcgtccagattagttaattggtctgttaaattgaataccgctatctctaatttggaagtcgaaaataaggacgttaaaagtagaacgcttttatcagtcccaggctatgatgaaaaggttgaatttggtgttttaacatcatttgcttatccagttatcggtagcgatgaaaaactgatcattgctacaactagacctgaaactatatttggtgatactgccgttgcagttcatcctgatgatgaccgttacaaacacttgcatggtaagttcatccaacatcctttcttaccaagaaaaattccaattatcaccgacaaggaagctgttgacatggaattcggtactggtgccgttaagatcactccagcccatgaccaaaacgattacaataccggtaagcgtcacaatttggaattcatcaatattttgactgacgatggtttattaaacgaggagtgtggtccagagtggcaaggcatgaagaggtttgatgccagaaagaaggtcattgagcagctgaaggaaaagaacctatacgttggccaagaagataatgaaatgaccattccaacttgttccagatctggtgacattattgaacctttattgaaacctcaatggtgggtttctcaaagtgaaatggccaaagatgctattaaggttgttagggatggtcaaattaccatcacccccaaatcttctgaggctgaatatttccattggttgggtaacatccaagattggtgtatttccagacaattatggtggggtcatcgttgtccagtttactttattaatatcgaaggcgaagaacacgatagaattgatggtgactattgggttgctggtaggagcatggaggaagctgaaaagaaggctgctgccaaataccctaattccaaatttactctggaacaagatgaagatgttttagacacctggttctcgtccggtttgtggcctttctccactttgggttggccagagaagactaaagacatggaaactttttaccccttttctatgttggaaactggttgggatattcttttcttctgggttactagaatgattctattgggcttaaaattgaccggttcagttccattcaaggaagttttctgccactctttagtccgtgacgctcaaggtcgtaagatgtctaaatctttaggtaatgttattgacccactagacgttattactggtattaagttggatgatttgcatgcaaaattattacaaggtaacttagatccaagagaagttgaaaaagctaagatcggtcaaaaggaatcctaccctaacggtattcctcaatgtggtaccgatgctatgaggtttgcattatgtgcttataccactggtggtcgtgatattaacttagatatcttacgtgtcgaaggttacagaaagttctgtaacaaaatctaccaagctaccaagtttgcattgatgagactcggtgacgattatcaaccacctgccactgaaggtctatcaggtaacgaatccttggttgaaaaatggatcttgcacaagctgactgaaacctcgaaaattgtcaatgaagctctagataaacgtgacttcttgacgtccactagcagtatttacgaattctggtatttgatttgtgatgtttacatcgagaactctaaatacttgattcaagaaggctctgctattgaaaagaagtccgcaaaggatacattgtatatcttgctggacaacgctttgaaattaatccatccattcatgccattcatttctgaagaaatgtggcaaagacttccaaagcgttccactgagaaggctgcctcaattgtaaaagcttcttatccagtttacgtatctgagtacgatgatgtcaaatcggccaatgcttacgacttggtcttgaacattaccaaagaagctcgttccttgttatctgagtacaatattttgaagaatggtaaggttttcgttgaatctaaccacgaggaatacttcaaaactgctgaagatcagaaagattctattgtctcgttgatcaaggccatcgacgaagtcactgttgttcgtgatgcttccgaaattccagaaggttgcgtattgcaatctgttaacccagaagtcaatgtacatcttctcgtcaagggacacgttgatattgatgctgaaattgcgaaagttcaaaagaaacttgaaaaggctaaaaaatccaagaacggtattgaacaaaccattaacagtaaggattacgaaacaaaggctaatacacaggccaaggaagccaataaaagcaagctggataacactgttgccgaaatcgaaggtttggaagctactattgaaaacttgaagcgtttgaaattgtag

SEQ ID NO: 4334 - DNA, 3315 bp, Artificial Sequence
  Description of Artificial Sequence: Synthetic polynucleotide
atgaataagtggttaaacacattatctaagacattcacttttagacttttgaactgtcattataggagatctttaccactttgtcaaaacttttctttgaagaagtctttaactcataatcaagtcaggttctttaaaatgagcgatcttgataatttgcctccagttgacccaaagactggtgaggtcatcattaatccgttaaaggaagatggctctccaaagactcctaaggaaattgaaaaagagaagaaaaaggctgaaaaattattaaagttcgctgccaaacaagctaaaaaaaatgctgctgccaccacaggtgcatctcaaaagaaacctaagaaaaagaaggaagttgagccaatccctgaatttattgacaaaactgttccaggtgagaaaaaaatcttagtatccttggatgatccggctttaaaagcttataaccctgctaacgttgaaagttcttggtatgactggtggatcaagactggtgtttttgaacctgagtttaccgctgatggtaaggttaaaccagaaggtgtattttgcattccagcacctccaccaaacgtcactggtgccttacatattggtcatgctttgactattgctatccaagattctttgatcagatataacagaatgaaaggtaaaactgtcttattcttgccaggtttcgaccatgctggtattgctactcagtccgttgtggagaagcaaatctgggctaaggacagaaagactagacatgactatggaagagaagcttttgttggtaaggtctgggaatggaaagaggaataccatagcagaattaagaaccaaattcaaaaattgggggcttcttatgattggagccgcgaagctttcactttgagtccagaattgaccaagtctgttgaagaagcttttgttagattacatgatgaaggtgttatttatcgtgcgtccagattagttaattggtctgttaaattgaataccgctatctctaatttggaagtcgaaaataaggacgttaaaagtagaacgcttttaagtgtcccaggctatgatgaaaaggttgaatttggtgttttaacatcttttgcttatccagttatcggtagcgatgaaaaattaatcattgctacaactagacctgaaactatatttggtgatactgccgttgcagttcatcctgatgatgaccgttacaaacacttgcatggtaagttcatccaacatcctttcttaccaagaaaaattccaattatcaccgacaaggaagctgttgacatggaattcggtactggtgccgttaagatcactccagcccatgaccaaaacgattacaataccggtaagcgtcacaatttggaattcatcaatattttgactgacgatggtttattaaacgaggagtgtggtccagagtggcaaggcatgaagaggtttgatgccagaaagaaggtcattgagcagttgaaggaaaagaacctttacgttggccaagaagataatgaaatgaccattccaacttgttccagatctggtgacattattgaacctttattgaaacctcaatggtgggtttctcaaagtgaaatggccaaagatgctattaaggttgttagggatggtcaaattaccatcacccccaaatcttctgaggctgaatatttccattggttgggtaacatccaagattggtgtatttccagacaattatggtggggtcatcgttgtccagtttactttattaatatcgaaggcgaagaacacgatagaattgatggtgactattgggttgctggtaggagcatggaggaagctgaaaagaaggctgctgccaaataccctaattccaaatttactttggaacaagatgaagatgttttagacacctggttctcttccggtttgtggcctttctccactttgggttggccagagaagactaaagacatggaaactttttaccccttttctatgttggaaactggttgggatattcttttcttctgggttactagaatgattttattgggcttaaaattgaccggttctgttccattcaaggaagttttctgccactctttagtccgtgacgctcaaggtcgtaagatgtctaaatctttaggtaatgttattgacccattggacgttattactggtattaagttggatgatttgcatgcaaaattattacaaggtaacttagatccaagagaagttgaaaaagctaagatcggtcaaaaggaatcctaccctaacggtattcctcaatgtggtaccgatgctatgaggtttgcattatgtgcttataccactggtggtcgtgatattaacttagatatcttacgtgtcgaaggttacagaaagttctgtaacaaaatctaccaagctaccaagtttgcattgatgagactcggtgacgattatcaaccacctgccactgaaggtttatctggtaacgaatccttggttgaaaaatggatcttgcacaagttgactgaaacctccaaaattgtcaatgaagctttagataaacgtgacttcttgacgtccactagcagtatttacgaattctggtatttgatttgtgatgtttacatcgagaactctaaatacttgattcaagaaggctctgctattgaaaagaagtccgcaaaggatacattgtatatcttgttggacaacgctttgaaattaatccatccattcatgccattcatttctgaagaaatgtggcaaagacttccaaagcgttccactgagaaggctgcctctattgtaaaagcttcttatccagtttacgtatctgagtacgatgatgtcaaaagtgccaatgcttacgacttggtcttgaacattaccaaagaagctcgttccttgttatctgagtacaatattttgaagaatggtaaggttttcgttgaatctaaccacgaggaatacttcaaaactgctgaagatcagaaagattctattgtctctttgatcaaggccatcgacgaagtcactgttgttcgtgatgcttccgaaattccagaaggttgcgtattgcaatctgttaacccagaagtcaatgtacatcttctcgtcaagggacacgttgatattgatgctgaaattgcgaaagttcaaaagaaacttgaaaaggctaaaaaatccaagaacggtattgaacaaaccattaacagtaaggattacgaaacaaaggctaatacacaggccaaggaagccaataaaagcaagttggataacactgttgccgaaatcgaaggtttggaagctactattgaaaacttgaagcgtttgaaattgtga

SEQ ID NO: 4335 - DNA, 672 bp, Saccharomyces cerevisiae
atgagcgtccaagcagaaatagggatattagatcatgtagatggttcatctgaattcgtatcacaagacaccaaggttatttgttctgtaacaggccctattgaaccaaaagcaagacaagaactgcctacacaattagcattagaaattattgtacgtcccgcgaaaggggtggccacaacaagagagaaggtactcgaagataaattacgggcagttctgaccccactcatcactcgtcattgttacccaagacagctctgccagataacttgtcaaattctggaatctggtgaagatgaagccgaattctccctgagagagctaagttgttgtataaatgcggcatttttggctttagttgatgcaggaattgccttaaatagtatgtgcgcaagcatccctattgcaataatcaaagacactagtgatatcattgtcgatcccactgccgagcaattgaagatttcgctctctgtccacactttagctctggagttcgtcaatggcggtaaagtcgtgaaaaacgttttattgttagacagcaatggtgattttaatgaagatcaattgttcagtttactggagctgggtgagcaaaagtgtcaagaacttgtcacaaatataagaagaataatacaggacaatatatcacctcgtctagttgtatag

SEQ ID NO: 4336 - DNA, 672 bp, Artificial Sequence
  Description of Artificial Sequence: Synthetic polynucleotide
atgagcgtccaagcagaaatagggatattagatcatgtagatggttcttctgaattcgtatctcaagacaccaaggttatttgttctgtaacaggccctattgaaccaaaagcaagacaagaattacctacacaattagcattagaaattattgtacgtcccgcgaaaggggtggccacaacaagagagaaggtactcgaagataaattaagagcagttttaaccccactcatcactcgtcattgttacccaagacagctctgccagataacttgtcaaattttggaatctggtgaagatgaagccgaattctccttgagagagttgagttgttgtataaatgcggcatttttggctttagttgatgcaggaattgccttaaatagtatgtgcgcaagcatccctattgcaataatcaaagacactagtgatatcattgtcgatcccactgccgagcaattgaagatttctctctctgtccacactttagctttggagttcgtcaatggcggtaaagtcgtgaaaaacgttttattgttagacagcaatggtgattttaatgaagatcaattgttcagtttattggagttaggtgagcaaaagtgtcaagaacttgtcacaaatataagaagaataatacaggacaatatatctcctcgtttagttgtatga

SEQ ID NO: 4337 - DNA, 945 bp, Saccharomyces cerevisiae
atgttcaaagaggaggactcgttaagaaaagggcaaaatgtggccgcgtggaaaactttgttggctggcgccgtatccgggctgcttgcccgtagcataactgctcccatggataccattaagatcagattgcaattgacccctgcaaatgggctgaagcccttcggaagtcaggtcatggaggtggccagaagcatgataaagaacgaaggcatccggtccttttggaagggtaacatacccggttctttgctgtacgttacctatggctcagcgcagtttagttcatactccctttttaatagatatttaactccatttggactagaggcgcgcttacatagtcttgttgtcggagcctttgctggcataaccagttccatcgtttcctacccgttcgatgttttacggacccgactagttgccaacaaccagatgcactcaatgagcatcacgagagaagtgcgtgatatctggaaactagaaggtctccccggatttttcaagggctccatcgcgtcaatgacaaccataactctaaccgcatctataatgttcggaacatacgaaacaatcaggatatactgtgacgaaaacgaaaaaacgaccgccgcgcataaaaaatgggaactggctactttaaatcacagcgctggtaccattggcggcgtcattgctaagatcattactttccccctcgaaacgatccgtaggcgaatgcagttcatgaattcgaagcatctggaaaagttctcccgtcattcgtctgtatacggttcttataaagggtacggattcgcaagaatcggtttacagattttgaaacaagaaggtgtgagttcgctttacagaggtattctggtggccctttccaagacaatacccaccacttttgtgagtttctgggggtatgaaactgccatccattatttgcggatgtactaa

SEQ ID NO: 4338 - DNA, 945 bp, Artificial Sequence
  Description of Artificial Sequence: Synthetic polynucleotide
atgttcaaagaggaggactctttaagaaaagggcaaaatgtggccgcgtggaaaactttgttggctggcgccgtatccgggttacttgcccgtagcataactgctcccatggataccattaagatcagattgcaattgacccctgcaaatgggttgaagcccttcggaagtcaggtcatggaggtggccagaagcatgataaagaacgaaggcatcagatccttttggaagggtaacatacccggttctttgttgtacgttacctatggcagtgcgcagtttagtagttactccctttttaatagatatttaactccatttggattggaggcgcgcttacatagtcttgttgtcggagcctttgctggcataaccagttccatcgtttcctacccgttcgatgttttaagaaccagattggttgccaacaaccagatgcactccatgagcatcacgagagaagtgcgtgatatctggaaattagaaggtctccccggatttttcaagggctccatcgcgtccatgacaaccataactttgaccgcatctataatgttcggaacatacgaaacaatcaggatatactgtgacgaaaacgaaaaaacgaccgccgcgcataaaaaatgggaattggctactttaaatcacagcgctggtaccattggcggcgtcattgctaagatcattactttccccctcgaaacgatccgtaggagaatgcagttcatgaattctaagcatttggaaaagttctcccgtcattcttctgtatacggttcttataaagggtacggattcgcaagaatcggtttacagattttgaaacaagaaggtgtgagttctctttacagaggtattttggtggccctttccaagacaatacccaccacttttgtgagtttctgggggtatgaaactgccatccattatttgagaatgtactga

SEQ ID NO: 4339 - DNA, 3441 bp, Saccharomyces cerevisiae
atgtctgattactttagttccagaccttcgcaaacgctcacgccgatgggcaataagccatctggcggtggtggcggcgatgacgcctcctccatccactcgaagagctcgcagtacttgatggacatcttacctgattcgatgaccttgaacgaaagtgtttcctccatagtggcaaacaatcaggcaaaggagtttattttgcctgaaacagatgagagatctccctacttcataaacgtccctataccaaaggctcagccaacctctactacggaaacgaagaagccccttgcaggtgatgaagctatcgatgggcagtttgttaaggagtatcccaccgacatccttgtagacaggttttataaatggaaaaaaattctgaaagggttagtgatttacttgagggaagtcgcgtatgcgcaagaacagttcgcacggatcaattaccaactgaaaggatctgtgaaatttccatttttgactgatattgatgaaaccacaaataccattacggatccattcacaacggctcctagaggccctaagaaagcgcagcctgcgcagaagaaagttggcctgactgacagcgaacaatttcagatgcaaatgcaacaggaacagcaggaaaatgcagtgcaggctcccacagatgaaagtaaaatgagtttggcgcctcatgaatacaagcctgtccagaccacagagtcggacaatacatctgccgcatccggttttgttaagttcggttcaggctcgattcaagacatccaggtcattttgaagaagtaccatctttcgttggctaaccagcaatttaagatctctaaagagattacgtccaccgtcattcctaaattggaggaattgagaaaagatttaagatataaaattacggaaattaaggaccttcatggtgatttcaaaacaaacatcggagcacatattcagctaacaagtcaactattgaaaaaatacatcgcagctgtaaaattcatgaacgcgcatggtattggcaacgatagagcatctcctactaataagaagccacataaattggatccaaaacatgatccatatcttttgaaactgcaactagacttacaactcaaacgtcaagttgccgaagaaacttacttgcaagaagcgttcatcaatttacagagttcaggtttgcaattagaaaaaattatatacaccaaaatccagcatgctttgttgcgttattctgctttaattgactccgaagctcgtctaatgatcaaaaatatgtgccaagaactacaacatggtataatatcaaagcctcctgcatttgaatgggataattttgtcacacagcatccgtcctgtctactcaattggaaatccaacgatcctataccaccaccaagaaaagtttccgacgttatttatccccacatgaaatccccactggccaagtgtattaaggcaggttattttttgaagaaatcggaattgttgcccacttaccaccaaggatattttgttctaacatcaaactatattcatgaattccagagtagcgatttttataacctatcttcttctacccctaactccacgaagtcttcagcttattcttcttccgtttccattgcagacacttatgccaatgctaataatgccaaagctaacaatcatcatcgccaggctagtgatgtacataacagcagtacgacaactggtggtacagctggtgcaaatggtattcgcggtattcgcaaaaagagctatttggcaccgattatgagtattccgctaaatgattgtaccttaaaggatgcatcttccaccaaatttgttcttgtaggtaaacccactcttaatgaaaacgctgatgttagaaaatctagctctagcacttatttatctggctcttcacaagcgtctttaccaaaatatggccacgagactgcaaaaatattttcaaaagccccattccacaagtttttgaagggaagtaagcccaaaaataagaatacgaaatcaagtgaactggaccaattttacgctgcagctcaaaaggaatcgaacaattatgtgacttggacctttaaaatagtatctccagagccttctgaagaggaattgaaacattttaaacgttgggtccaagatttgaaaaatttaacgagcttcaatgacactaaagatagaattaagtttatcgaagaccgtgtgatgaaatcacaccgattcaaggcgggacatatgtcaagaaacagcgtgaacataggttcccatacaccttgtttaacagatagcacattcacattacaagacggtactacgacgtccgtcaacctaaagggcagggcggagaaacctcagtatattcatattcagaacaattcactagcagattttgatggaaatggttttagatccaaggttaatacacctgctattgacgattatggcaatttgattacggtggaaagaagacctgcacaatctccgcaccaatactctgactacatggccacttcaggtaacacaactccttcttattcatcgggctcaagacctcaaagcatgtataatgggtataacccggctgtatcaataacgagtaatgggatgatgctccaacaatcaacagcaaataataatactaatccaacaactaatttgcgccaccaaagaaatatttcacaaacaagttccctacctggattttcatacacatccctatccctaccagtgaattctccaggtagctctaattcagaatccagctcaggcggttattttgccattccgcttcatgggaacaacaacaataataattacacccagagaaactctgaaggctctagcccatgttataatgacgaccaaatacgacaacaacagcaacctttacaaatgcaacctttatcaagaacttcaagttcaagtgttaatgtcacagcgatgagaagtacatctgcaggtaattcaattacagcgaacgctcccgttgtacctaaggtgatggtcaataaccaaaatgttaaaactgttgctgccgatcagtctgctacagcaccttcttcacctaccatgaattcgtccgtcacaacgatcaaccgcgaatcaccataccaaaccttaaagaaaacgaacagcacaggcaatgttccttgtttgactgctgaaaagactcatgcgcaccctgctttctataaacggggcaataatagcgcccaaaatttgactacctctagttcaacagcttctagggtgcatcctatccgaaagcacaagaaaaacgtatcatttagttctttgaatagtttaatgttttcaaaaaagggtgcaaatcacggtggtaatctaatgactaaccaatttatgagtggtggaattcaagaagatgatggtgattcaactaataatgatactataaagctaaaccagtcgatttattcttaa

SEQ ID NO: 4340 - DNA, 3441 bp, Artificial Sequence
  Description of Artificial Sequence: Synthetic polynucleotide
atgtctgattactttagttccagaccttctcaaacgctcacgccgatgggcaataagccatctggcggtggtggcggcgatgacgcctcctccatccactccaagagctctcagtacttgatggacatcttacctgattctatgaccttgaacgaaagtgtttcctccatagtggcaaacaatcaggcaaaggagtttattttgcctgaaacagatgagagatctccctacttcataaacgtccctataccaaaggctcagccaacctctactacggaaacgaagaagccccttgcaggtgatgaagctatcgatgggcagtttgttaaggagtatcccaccgacatccttgtagacaggttttataaatggaaaaaaattttgaaagggttagtgatttacttgagggaagtcgcgtatgcgcaagaacagttcgcaagaatcaattaccaattgaaaggatctgtgaaatttccatttttgactgatattgatgaaaccacaaataccattacggatccattcacaacggctcctagaggccctaagaaagcgcagcctgcgcagaagaaagttggcttaactgacagcgaacaatttcagatgcaaatgcaacaggaacagcaggaaaatgcagtgcaggctcccacagatgaaagtaaaatgagtttggcgcctcatgaatacaagcctgtccagaccacagagagtgacaatacatctgccgcatccggttttgttaagttcggttctggctccattcaagacatccaggtcattttgaagaagtaccatctttctttggctaaccagcaatttaagatctctaaagagattacgtccaccgtcattcctaaattggaggaattgagaaaagatttaagatataaaattacggaaattaaggaccttcatggtgatttcaaaacaaacatcggagcacatattcagttgacaagtcaattattgaaaaaatacatcgcagctgtaaaattcatgaacgcgcatggtattggcaacgatagagcatctcctactaataagaagccacataaattggatccaaaacatgatccatatcttttgaaattacaattggacttacaactcaaacgtcaagttgccgaagaaacttacttgcaagaagcgttcatcaatttacagagttctggtttgcaattagaaaaaattatatacaccaaaatccagcatgctttgttgcgttattctgctttaattgactccgaagctcgtttaatgatcaaaaatatgtgccaagaattacaacatggtataatatccaagcctcctgcatttgaatgggataattttgtcacacagcatccgtcctgtttactcaattggaaatccaacgatcctataccaccaccaagaaaagtttccgacgttatttatccccacatgaaatccccattggccaagtgtattaaggcaggttattttttgaagaaaagtgaattgttgcccacttaccaccaaggatattttgttttgacaagtaactatattcatgaattccagagtagcgatttttataacttatcttcttctacccctaactccacgaagtcttctgcttattcttcttccgtttccattgcagacacttatgccaatgctaataatgccaaagctaacaatcatcatcgccaggctagtgatgtacataacagcagtacgacaactggtggtacagctggtgcaaatggtattcgcggtattcgcaaaaagagctatttggcaccgattatgagtattccgttaaatgattgtaccttaaaggatgcatcttccaccaaatttgttcttgtaggtaaacccactcttaatgaaaacgctgatgttagaaaatctagctctagcacttatttatctggctcttctcaagcgtctttaccaaaatatggccacgagactgcaaaaatattttccaaagccccattccacaagtttttgaagggaagtaagcccaaaaataagaatacgaaatctagtgaattagaccaattttacgctgcagctcaaaaggaatctaacaattatgtgacttggacctttaaaatagtatctccagagccttctgaagaggaattgaaacattttaaacgttgggtccaagatttgaaaaatttaacgagcttcaatgacactaaagatagaattaagtttatcgaagaccgtgtgatgaaatctcacagattcaaggcgggacatatgagtagaaacagcgtgaacataggttcccatacaccttgtttaacagatagcacattcacattacaagacggtactacgacgtccgtcaacttgaagggcagggcggagaaacctcagtatattcatattcagaacaattctttggcagattttgatggaaatggttttagatccaaggttaatacacctgctattgacgattatggcaatttgattacggtggaaagaagacctgcacaatctccgcaccaatactctgactacatggccacttctggtaacacaactccttcttattcttctggctccagacctcaaagcatgtataatgggtataacccggctgtatctataacgagtaatgggatgatgctccaacaaagtacagcaaataataatactaatccaacaactaatttgcgccaccaaagaaatatttctcaaacaagttccttacctggattttcttacacatccttgtccttgccagtgaattctccaggtagctctaattctgaatccagcagtggcggttattttgccattccgcttcatgggaacaacaacaataataattacacccagagaaactctgaaggctctagcccatgttataatgacgaccaaataagacaacaacagcaacctttacaaatgcaacctttatctagaacttctagtagtagtgttaatgtcacagcgatgagaagtacatctgcaggtaattctattacagcgaacgctcccgttgtacctaaggtgatggtcaataaccaaaatgttaaaactgttgctgccgatcagtctgctacagcaccttcttctcctaccatgaattcttccgtcacaacgatcaaccgcgaatctccataccaaaccttaaagaaaacgaacagcacaggcaatgttccttgtttgactgctgaaaagactcatgcgcaccctgctttctataaaagaggcaataatagcgcccaaaatttgactacctctagttctacagcttctagggtgcatcctatcagaaagcacaagaaaaacgtatcctttagttctttgaatagtttaatgttttccaaaaagggtgcaaatcacggtggtaatttaatgactaaccaatttatgagtggtggaattcaagaagatgatggtgattctactaataatgatactataaagttgaaccagagtatttattcttga

SEQ ID NO: 4341 - DNA, 4893 bp, Saccharomyces cerevisiae
atgatggtaaaacaggaggaaccgctgaatgagattagtccgaatactccgatgactagcaagtcctaccttttaaacgacacgctttcgaaagtacatcatagtggccaaactagaccactgacctcggtgttgtctggagacgcctcatccaattctattggcatactagcaatgcataataacataatacgtgactttacaaaaattgcaagcaataacatagacttagccattgaggatattaccactgttgaccattcattaaattcaatatatagcctattgaagagccatcacatgtggggccatataaactccactgttaaacaacatttgatgataattgttaaactaataaataataacgcattaggattggcctcctctgaaattatttttcttttcaatgaaacgaatttatttcaagctcatagtctgaaaaacattcttctagcagacttcagtacgtggaacgactactatctttcaaatctgaaaatattagcgctgcagattatactgaaaagaaagctagtagacgaatacttaccgcatatattagaactattttcccatgataaaagatatcttttgaaagaccctaacctcaaagctcacgctctcacaaaaatcgtgctgagctttttttctgtcacgacgagttgcaaagttctattcgggctaaaatttctacaatatatcaaacagttcaaattaccttttaaaaagttcattagcaacattaccgtcgagtgttttagcaaaaaccttcttcataaaaattatttggagatgggacctaataaaatatatttaaattcattttacttatcctattccatgctgtacgatggattggataaaataatgcttctagacattttaagttacgaagaaactactgaggtacaaagagcgataaaaagtaaaaaagaattcaatgaatactgcaacatgagtgaaaaccgtcttctctggtcctgtatatctgtcgatgatttgaacgtaatactcgaaaatgcaacgaattttctacaaaataaagggaaacatatatccgcaacattaaaatgtttagtctgtctttggtctactattcgcctagagggattacctaaaaataaggatatattgaggcagtttgattgtactgttatttatatcaactcaaatattaaatccattaatgacgaatctgcggcggcattattatccgaacttctgggagttttatcagaaatttgtatcgattataaagagcctaaacgactgtcaaatattatcagtgtccttttcaatgcttctgttttatttaagagtcattcgtttttgttaaagactgctaatttggaaatctcaaatgttttaatcagtaatgattcaaaaacatctcatcgtactatactgaaatttgaaaaatttatatctagtgctcagagtgcccagaaaaaaattgaaatcttttcctgtttgttcaatgtatattgcatgctacgaaatgatacgctatcatttgtttttgacttttgccaaaatgcattcattcattgctttacacgcctaaaaatcacaaaattcatcgagttttcaaacagttcagaaattatgctttcagtactgtatggaaattcatctatcgaaaacattccttccgaaaattggtcacaactaagcagaatgatattttgctcactgaggggtatctttgatttggatcctttagagctaaataatacgtttgataaattacacttgctcaacaaatatgagctattaatacgaatagtgtacctattgaacctggacatgagtaaacacctgacaacgaatctatcgaaaataactaagctgtacataaacaaatggctacaaaaatcagatgaaaaggccgagagaatatcgtcatttgaaatggacttcgttaaaatgctattgtgctacttgaactttaataattttgataagttatccattgaactttcactctgtattaaatcaaaagaaaagtattactccagtattgtgccttatgccgacaattatttgctagaggcttatctgagcttatatatgattgatgatgccctcatgatgaagaatcaactacaaaaaacaatgaatttatcaacggcgaaaatagagcaggcgttattacatgcaagttctttaataaatgtccacttgtgggactctgacttgacagcgtttcaaatatattttggaaaaacactgcctgctatgaagcctgaattatttgatatcaataacgaccacaacctacccatgtcactttacatcaaagtcatacttttgaacataaaaatttttaatgaaagcgcgaaattaaatattaaagctggtaatgttatatccgcagtaattgattgtagaaaagcacaaaatttagcattatcgttgctcaaaaagaagaacaaattgtcacaaggatccaggctagcattactaaaaagtctatcgtttagttttttccaactcattaaaatacatatacgcattggttctgccagagactgtgagttctacagtaaagaactgtctagaattatttctgacttagaggaacctattatcgtctacagatgtctgcattttcttcacagatactatatgattacagagcaaacctgtcttcaaaatataactttgggaaaagccaataaggcatttgattatcttgatgctgaggcagacattacaagtttgacaatgtttctgtatgataataaggaatttgtaaagttagagcagtcgttggtcctatatttcggtgaccagctagaaaaaacattcctacctaatttgtggaagcttcacttgggtaaggatattgacgacagcatttgtctgtccgaatatatgcccaaaaatgtaatcaatagagtacacaatatgtggcaaaaagtaatgagccaattggaggaagatcctttcttcaaaggtatgtttgaatctacccttgggattccctcttctctgcctgttattcctagcacgatgcccaacaacattttaaaaactccttccaagcatagtacaggattgaagctttgcgattcaccaagatcgtcgagcatgacgcctagaggtaagaatataagacagaaatttgatagaattgctgctattagtaaattaaaacagatgaaagaacttttggagagtttgaaactagacacattagataatcacgaactgtccaaaatttcctccctttcttcattaactctgactatcctttcaaacataactagtatccataatgctgagagtagtttgataactaatttttcgctaactgacttgccaaggcatatgcctttgttattcgataaggtattgaataatattgataataaaaattaccgagaatttcgcgtttcatcactaatagctccgaacaatatatccacaattacagagagtattagagtatctgccgcccagaaggacttaatggagagcaaccttaatattaatgttataactattgacttctgtcccataactggaaatttacttctatccaaattagaaccgcgacgtaagagaaggacgcatttaaggctaccgctaatacgatctaattcaagagacctcgacgaagttcatctctcatttccggaggctacaaaaaaactactttctattatcaatgaaagcaaccaaacgacgtcagtggaagttaccaacaagattaaaacaagagaagaaagaaaatcttggtggaccacaagatatgatttggataaaagaatgcaacaattgttgaataacattgaaaatagttggttcaatggcgttcaagggttttttagccctgaagtagtcgacaactcgttatttgaaaaatttaaagataaattttacgaaattctgcatcaaaatcttccttccagaaaactctatggcaatccggcaatgtttataaaagttgaagattgggtaatcgaattgttcttgaaacttaatccgcaagaaatcgattttctttcgaagatggaagacctgatatactttgttcttgatattcttctcttccatggtgaagaaaatgcttacgacgaaattgatttcagcatgcttcacgtgcagttagaagagcaaataaagaaatatagggcaactatgacaactaatagtatatttcatacatttttagtcgttagcagttcatgccatttattcccttgggagtgtctttcatttttgaaagatttgtctatcacacgtgttccgtcctatgtttgtctgaataaacttttatcgcgtttccattaccaactaccccttcaagtaactattgaggacaacattagtatgatattaaatccgaacggagatttgtccaggactgaatctaaattcaagggtatgttccaaaaaataatcgatgcaaaaccttcctctcaattagtgatgaacgagaagccggaagaggaaacacttttgaaaatgctgcaaaattctaacttattcgtttatatagggcatggcggaggtgaacaatatgtaaggagtaaggagattaagaaatgcaccaaaattgcccccagctttttactgggctgctcttcagcagcgatgaaatattacggcaagttagaacctactggaacaatctatacttatttgctgggaggatgccctatggtactaggtaatctgtgggatgtaactgacaaagatattgataaatttagcgaggaactttttgaaaagatgggatttcgctgtaatactgacgatttgaatggtaatagcctatctgtttcatatgccgtctctaaatctagaggtgtatgccatctacgttacttgaacggcgcagctcctgttatttatgggttaccgatcaagttcgtatcataa

SEQ ID NO: 4342 - DNA, 4893 bp, Artificial Sequence
  Description of Artificial Sequence: Synthetic polynucleotide
atgatggtaaaacaggaggaaccgttaaatgagattagtccgaatactccgatgactagcaagtcctaccttttaaacgacacgctttctaaagtacatcatagtggccaaactagaccattgacctctgtgttgtctggagacgcctcttccaattctattggcatattggcaatgcataataacataatacgtgactttacaaaaattgcaagcaataacatagacttagccattgaggatattaccactgttgaccattctttaaattctatatatagccttttgaagagccatcacatgtggggccatataaactccactgttaaacaacatttgatgataattgttaaattgataaataataacgcattaggattggcctcctctgaaattatttttcttttcaatgaaacgaatttatttcaagctcatagtttgaaaaacattcttttagcagacttcagtacgtggaacgactactatctttctaatttgaaaatattagcgttgcagattatattgaaaagaaagttggtagacgaatacttaccgcatatattagaattattttcccatgataaaagatatcttttgaaagaccctaacctcaaagctcacgctctcacaaaaatcgtgttgagctttttttctgtcacgacgagttgcaaagttttgttcgggttgaaatttttgcaatatatcaaacagttcaaattaccttttaaaaagttcattagcaacattaccgtcgagtgttttagcaaaaaccttcttcataaaaattatttggagatgggacctaataaaatatatttaaattctttttacttatcctattccatgctttacgatggattggataaaataatgcttttggacattttaagttacgaagaaactactgaggtacaaagagcgataaaaagtaaaaaagaattcaatgaatactgcaacatgagtgaaaaccgtcttctctggtcctgtatatctgtcgatgatttgaacgtaatactcgaaaatgcaacgaattttttgcaaaataaagggaaacatatatccgcaacattaaaatgtttagtctgtctttggtctactattcgcttggagggattacctaaaaataaggatatattgaggcagtttgattgtactgttatttatatcaacagtaatattaaatccattaatgacgaatctgcggcggcattattatccgaacttttgggagttttatctgaaatttgtatcgattataaagagcctaaaagattatccaatattatcagtgtccttttcaatgcttctgttttatttaagagtcattcttttttgttaaagactgctaatttggaaatctctaatgttttaatcagtaatgattctaaaacatctcatcgtactatattgaaatttgaaaaatttatatctagtgctcagagtgcccagaaaaaaattgaaatcttttcctgtttgttcaatgtatattgcatgttaagaaatgatacgttatcttttgtttttgacttttgccaaaatgcattcattcattgctttacacgcttaaaaatcacaaaattcatcgagttttccaacagttctgaaattatgctttctgtattatatggaaattcttctatcgaaaacattccttccgaaaattggtctcaattgagcagaatgatattttgctctttgaggggtatctttgatttggatcctttagagttgaataatacgtttgataaattacacttgctcaacaaatatgagttattaataagaatagtgtacttgttgaacttggacatgagtaaacacttgacaacgaatttatccaaaataactaagttgtacataaacaaatggttacaaaaatctgatgaaaaggccgagagaatatcttcttttgaaatggacttcgttaaaatgcttttgtgctacttgaactttaataattttgataagttatccattgaactttctctctgtattaaatctaaagaaaagtattactccagtattgtgccttatgccgacaattatttgttggaggcttatttgagcttatatatgattgatgatgccctcatgatgaagaatcaattacaaaaaacaatgaatttatctacggcgaaaatagagcaggcgttattacatgcaagttctttaataaatgtccacttgtgggactctgacttgacagcgtttcaaatatattttggaaaaacattgcctgctatgaagcctgaattatttgatatcaataacgaccacaacttgcccatgtctctttacatcaaagtcatacttttgaacataaaaatttttaatgaaagcgcgaaattaaatattaaagctggtaatgttatatccgcagtaattgattgtagaaaagcacaaaatttagcattatctttgctcaaaaagaagaacaaattgtctcaaggatccaggttagcattattgaaaagtttatcttttagttttttccaactcattaaaatacatatacgcattggttctgccagagactgtgagttctacagtaaagaattatctagaattatttctgacttagaggaacctattatcgtctacagatgtttgcattttcttcacagatactatatgattacagagcaaacctgtcttcaaaatataactttgggaaaagccaataaggcatttgattatcttgatgctgaggcagacattacaagtttgacaatgtttttatatgataataaggaatttgtaaagttagagcagtctttggtcctttatttcggtgaccagttagaaaaaacattcttacctaatttgtggaagcttcacttgggtaaggatattgacgacagcatttgtttatccgaatatatgcccaaaaatgtaatcaatagagtacacaatatgtggcaaaaagtaatgagccaattggaggaagatcctttcttcaaaggtatgtttgaatctacccttgggattccctcttctttgcctgttattcctagcacgatgcccaacaacattttaaaaactccttccaagcatagtacaggattgaagctttgcgattctccaagatcttctagcatgacgcctagaggtaagaatataagacagaaatttgatagaattgctgctattagtaaattaaaacagatgaaagaacttttggagagtttgaaattagacacattagataatcacgaattatccaaaatttcctccctttcttctttaactttaactatcctttccaacataactagtatccataatgctgagagtagtttgataactaatttttctttgactgacttgccaaggcatatgcctttgttattcgataaggtattgaataatattgataataaaaattacagagaatttcgcgtttcttctttgatagctccgaacaatatatccacaattacagagagtattagagtatctgccgcccagaaggacttaatggagagcaaccttaatattaatgttataactattgacttctgtcccataactggaaatttacttctttccaaattagaaccgcgccgtaagagaaggacgcatttaaggttaccgttgataagatctaattctagagacctcgacgaagttcatctcagttttccggaggctacaaaaaaattactttctattatcaatgaaagcaaccaaacgacgtctgtggaagttaccaacaagattaaaacaagagaagaaagaaaatcttggtggaccacaagatatgatttggataaaagaatgcaacaattgttgaataacattgaaaatagttggttcaatggcgttcaagggttttttagccctgaagtagtcgacaactctttatttgaaaaatttaaagataaattttacgaaattttgcatcaaaatcttccttccagaaaactctatggcaatccggcaatgtttataaaagttgaagattgggtaatcgaattgttcttgaaacttaatccgcaagaaatcgattttctttccaagatggaagacttgatatactttgttcttgatattcttctcttccatggtgaagaaaatgcttacgacgaaattgatttcagcatgcttcacgtgcagttagaagagcaaataaagaaatatagggcaactatgacaactaatagtatatttcatacatttttagtcgttagcagttcctgccatttattcccttgggagtgtctttcttttttgaaagatttgtctatcacacgtgttccgtcctatgtttgtttgaataaacttttatctcgtttccattaccaattgccccttcaagtaactattgaggacaacattagtatgatattaaatccgaacggagatttgtccaggactgaatctaaattcaagggtatgttccaaaaaataatcgatgcaaaaccttcctctcaattagtgatgaacgagaagccggaagaggaaacacttttgaaaatgttacaaaattctaacttattcgtttatatagggcatggcggaggtgaacaatatgtaaggagtaaggagattaagaaatgcaccaaaattgcccccagctttttattaggctgctcttctgcagcgatgaaatattacggcaagttagaacctactggaacaatctatacttatttgttgggaggatgccctatggtattgggtaatttatgggatgtaactgacaaagatattgataaatttagcgaggaactttttgaaaagatgggatttcgctgtaatactgacgatttgaatggtaatagcttgtctgtttcttatgccgtctctaaatctagaggtgtatgccatttacgttacttgaacggcgcagctcctgttatttatgggttaccgatcaagttcgtatcttga

SEQ ID NO: 4343 - DNA, 2067 bp, Saccharomyces cerevisiae
atggttttagaaacgctgaaacaagggcttgacagcagtcaaatacatgaagctttaatacaactagattcctatcctcgcgaaccggtggatctagatgcctcgatggttctcataaaattcgtaattccagtttatccatcactaccagaaagatcgaaggtgatattgagacggctagcttctaaatcgtttacatttttatgccaaattgtcaccttctcaaggacaataagtggccgcgatggactgcaagagatacgcatataccaagaaattttagaagacatcatcagttttgaaccgggatgtttgactttttatttaaaggcaagcactactagcaaagcagaccgtgatagcattaaggcccttttctttgggagcaagttatttaatgtgttggccaaccgaattgatatggcgaaatatttgggataccttcggcttcagtggaaatttctacttgagagtaatgaaacagatccacctgggtttttaggggaatggttagtttcatcatttttgcttaacccagtgctagcggcagatatgttattaggcgaattatttttattgaaagagtcgtatttcttttcttttcagaaaatcatatctgctagtagtctgatagatcaaaagaggctgattgctaagtttttattaccatatattcaagttatcgtgactttagaaaatttgaacgatgttaggaaaattctgcggcggtttgatctcgataaaatcataagtctgtccgtattatttgaaatacagtcgctgccattgaaggaagtgatagtacgtctgatgagcaaccactcttccacgaagtttgttagcgctttggtaagtaaatttgctgattttacagatgaggaagtagacacaaagacatgtgaattgcttgtactctttgcagtgcacaatctcaatcattcccagagagaggaaatagcacacgatgagcggtttttgaatggcgtgaccaaacatttaggtagcaatgaacgtgaggcaagggagcgtgcgatgtttattgccaagcttttatcaggcggtcatctgaagtacgaaagtgattttaaaatcaatataccgaatgtcaaattcgaaagcaatagcgatgataaaatcattgatttccaatctttaaaaaatccatccatatgcaatacccaaactgatgtgggtaaggataagattactgaggtctcgggtcatgttcaaagccttacattggactgcagtgatagcgatgatgaagatgagaacgatgagcgggagattgttaaacgaattgtatttttaaaagatttaatgaaagaatacgaaaaaactggggaatctcgaaaagctccattgataccacttctgaagcaaacagtgaaattgatacggcaaaaggcggattttcagttagaggttggctattatgcacaaggtattctgtcaagcattgtgtgcttgaataatgaatttgatgaaccgcttttcgagcagtggagaataaacgctctaacaagcatactggtcgtccttccagagaaggtgaatggcgctataaatattctattcaattcagaactgtcgttacagcaaaggatgtcactattgtcggctctgggtctttctgcaagagagttgagagggcttgatgatcctactattgtcaagcccaagtttgattttccaacaaatcgtttaccgtgggatgatcaaagccatcataatagtaggcttgttgaagttcaagagtcaacaagtatgataaagaagacgaaaacagtatggaaatctagaaaactaggcaaggatcgagaaaaaggaacgcaaaaccgctttagaaaatatgctggtctattcttctatccgctagcacacggttggcttaatggaattgacgtaggcacatacaatcagctttttaagtcgcattatttaacaacactgcgtatcatatactcttgcgctaacccggtccacgattttgaatccatgacggagttgatgaatcatataattagttcagccatagaggaaggaatttctctcaataaaggttag

SEQ ID NO: 4344 - DNA, 2067 bp, Artificial Sequence
  Description of Artificial Sequence: Synthetic polynucleotide
atggttttagaaacgttgaaacaagggcttgacagcagtcaaatacatgaagctttaatacaattggattcctatcctcgcgaaccggtggatttggatgcctctatggttctcataaaattcgtaattccagtttatccatctttaccagaaagatccaaggtgatattgagaagattggcttctaaaagttttacatttttatgccaaattgtcaccttctctaggacaataagtggccgcgatggattacaagagatacgcatataccaagaaattttagaagacatcatcagttttgaaccgggatgtttgactttttatttaaaggcaagcactactagcaaagcagaccgtgatagcattaaggcccttttctttgggagcaagttatttaatgtgttggccaacagaattgatatggcgaaatatttgggataccttagacttcagtggaaatttttacttgagagtaatgaaacagatccacctgggtttttaggggaatggttagtttcttcttttttgcttaacccagtgttggcggcagatatgttattaggcgaattatttttattgaaagagtcttatttcttttcttttcagaaaatcatatctgctagtagtttgatagatcaaaagaggttgattgctaagtttttattaccatatattcaagttatcgtgactttagaaaatttgaacgatgttaggaaaattttaaggaggtttgatctcgataaaatcataagtttatccgtattatttgaaatacagtctttaccattgaaggaagtgatagtacgtttaatgagcaaccactcttccacgaagtttgttagcgctttggtaagtaaatttgctgattttacagatgaggaagtagacacaaagacatgtgaattgcttgtactctttgcagtgcacaatctcaatcattcccagagagaggaaatagcacacgatgagagatttttgaatggcgtgaccaaacatttaggtagcaatgaacgtgaggcaagggagcgtgcgatgtttattgccaagcttttaagtggcggtcatttgaagtacgaaagtgattttaaaatcaatataccgaatgtcaaattcgaaagcaatagcgatgataaaatcattgatttccaatctttaaaaaatccatccatatgcaatacccaaactgatgtgggtaaggataagattactgaggtctctggtcatgttcaaagccttacattggactgcagtgatagcgatgatgaagatgagaacgatgagagagagattgttaaaagaattgtatttttaaaagatttaatgaaagaatacgaaaaaactggggaatctagaaaagctccattgataccacttttgaagcaaacagtgaaattgataagacaaaaggcggattttcagttagaggttggctattatgcacaaggtattttatccagcattgtgtgcttgaataatgaatttgatgaaccgcttttcgagcagtggagaataaacgctttaacaagcatattggtcgtccttccagagaaggtgaatggcgctataaatattcttttcaattctgaattatctttacagcaaaggatgtctttgttgtctgctttgggtctttctgcaagagagttgagagggcttgatgatcctactattgtcaagcccaagtttgattttccaacaaatcgtttaccgtgggatgatcaaagccatcataatagtaggcttgttgaagttcaagagtctacaagtatgataaagaagacgaaaacagtatggaaatctagaaaattgggcaaggatagagaaaaaggaacgcaaaaccgctttagaaaatatgctggtcttttcttctatccgttggcacacggttggcttaatggaattgacgtaggcacatacaatcagctttttaagagtcattatttaacaacattacgtatcatatactcttgcgctaacccggtccacgattttgaatccatgacggagttgatgaatcatataattagttctgccatagaggaaggaatttctctcaataaaggttga

SEQ ID NO: 4345 - DNA, 2853 bp, Saccharomyces cerevisiae
atgtcattttttgattctttacgtcaaaaggcaccctttttggataaactggcagacagtttcactccaacattaaccagagatgagaaattcagattaaaatataaacttccagctaatgaaaacattttggaagatacgaatgcagaagtttcatttgcaacttccattaaagatggaaaagggcattctgatagagtgaacaataaagggagaaaaactgcttatgtgtattccgggagattgtttttaacacctcattttctggtatttcgagatgcatttgatcattcatcgtgcgtactaatactgaatatttctaccattaaacgtgtagagaggtcgccatccgaatcatatgaatttgctcttctagtaactttgtacacaggagcaaaggttctgattcaatttatcggtatacgttatagatcggagcagttttgtgacaaattgaaactaaatttgaaagaaaatattcctaatgccaaaactttacctgcttttctagaaacctcatattcggagttcttaattgctaaaaatattctaggtaaaaaggacataactgtacccagggcaggtctaggacaacatttcaagtatcccggtaatcctactatggtaaaagaaaaggctaaattgaggctatggttcgattatttcagagagaatggaaggaatttggcagttgtgcaaactcctatgttccgaaagttaatcagaatcggtgttccaaatcgaatgagaggtgaaatttgggaactatgttcaggtgcaatgtatatgcgttatgcaaattctggggagtacgaaaggatattaaacgagaatgctggtaaaacatcgcaagctatcgacgaaattgagaaggatttgaagagatcgctgcccgaatactcagcataccagactgaagaaggtattcaaaggttgagaaatgttctgacagcttattcgtggaagaaccctgatgttggatattgccaggccatgaatatagttgttgcaggatttttaatctttatgtctgaagagcaggctttttggtgcttgtgtaatctatgtgacatctatgttccaggttattactcaaagacgatgtacggtacattgttagaccaacgagtgttcgagtcttttgtagaggacagaatgccggttctttgggaatacattttacagcatgatattcaactatctgtggtgtctttaccttggtttttgtctttgtttttcacttcaatgcctctagaatatgctgttagaataatggatattttttttatgaacggttctattactctatttcaggtggcattagcagttctgaagataaatgcagatgatatcttacaagccgatgatgatggaatgttcattgccataattaagcactatttccaaactctgggacaaagtgctcacccagattcaagcgatataaaatatagacaaatcacgaaatttcaagagctgttagttacggctttcaaagagtttagtgtcatcagcgaggaaatggcaatgcatgcaagacacaaatatgagaaaggtatttttcaaaacattgagactttcatgaaaagaacgcaactgcgccatatgccaaaaactttcaacctgtccagtgatgacttgtccaatatctatgacatgttttaccaaagtatagaaacctacaaaattagtatgggaacgggatcatctaatatgggtttcgaagtattcattcagttcttgagtaaattctgtgactcctgtagaccgtgtgaaaaggacaaagatccagctttccggaaacaaaaaaggaattttctgcaaaggttatttgataactgggattctgctcatatcggcgagttgacattgaacgatgtggtaacaggcttggataaactggtaactgttgatcttttacaagctataaactattttttctctttatatgatacagatggcgatggtgaattgcatagagaagaagtgctacagttgtcggaagggctgctactgctaacggaaccttggaagagcggtagatatgtagatctgttaactaaaaagcgcattgaagatgatattgctgaaaacatcatcaaggaaagcggtggagagatagccactatgaaccaaatcgagttaccaactggggttactattgatgaggaaaaatataaagttgaacaagcagaaagatacctaaaagctgcaagcaatttcctacaaagatcttttgaatatgctaaagcagttgatctcgcggaggaggtaaacttgattgacttgtctgatgatgaaggcgaagaaaagcgaacggtaaaacaaaaacaactggaaagcataaaggcaaatgcagccctagatcccacccatccaaaagtaatagatttgccaacatttagaatgatcatcctcgcagatgaaacttacgagcttttcttttctaatactttacgatcatctgttcacgtcgacgaacatgtcaacattgataacaaaaataaagtcctcagaagtatgtttgacggtatattggcagacggcaaaagagttgctgagcaagttcgtcgtcgtgtcgattcggtggcaactaggagcagcattgcttctgtagagagtacgccaacagccgctgcaagttcaataactaccaaagaagaaaagtacgatgatctagatgatttcacgtcagagcatcaacccgagaatgaagagttattacaaagttcctggtttgagatcgacgatgccaatgaaactagcactaaagccatacaagaaaggtcttttgagcctttgtcggcaaattcctcggaagagaagtccaaccttattgaatttgaagcatga

SEQ ID NO: 4346 - DNA, 2853 bp, Artificial Sequence
  Description of Artificial Sequence: Synthetic polynucleotide
atgagtttttttgattctttacgtcaaaaggcaccctttttggataaattggcagacagtttcactccaacattaaccagagatgagaaattcagattaaaatataaacttccagctaatgaaaacattttggaagatacgaatgcagaagtttcttttgcaacttccattaaagatggaaaagggcattctgatagagtgaacaataaagggagaaaaactgcttatgtgtattccgggagattgtttttaacacctcattttttggtatttagagatgcatttgatcattctagttgcgtattaatattgaatatttctaccattaaacgtgtagagaggtctccatccgaaagttatgaatttgctcttttggtaactttgtacacaggagcaaaggttttgattcaatttatcggtatacgttatagaagtgagcagttttgtgacaaattgaaattgaatttgaaagaaaatattcctaatgccaaaactttacctgcttttttggaaacctcttattctgagttcttaattgctaaaaatattttgggtaaaaaggacataactgtacccagggcaggtttgggacaacatttcaagtatcccggtaatcctactatggtaaaagaaaaggctaaattgaggctttggttcgattatttcagagagaatggaaggaatttggcagttgtgcaaactcctatgttcagaaagttaatcagaatcggtgttccaaatagaatgagaggtgaaatttgggaattatgttctggtgcaatgtatatgcgttatgcaaattctggggagtacgaaaggatattaaacgagaatgctggtaaaacatctcaagctatcgacgaaattgagaaggatttgaagagatctttacccgaatacagtgcataccagactgaagaaggtattcaaaggttgagaaatgttttgacagcttattcttggaagaaccctgatgttggatattgccaggccatgaatatagttgttgcaggatttttaatctttatgtctgaagagcaggctttttggtgcttgtgtaatttatgtgacatctatgttccaggttattactccaagacgatgtacggtacattgttagaccaaagagtgttcgagtcttttgtagaggacagaatgccggttctttgggaatacattttacagcatgatattcaattatctgtggtgtctttaccttggtttttgtctttgtttttcacttctatgcctttggaatatgctgttagaataatggatattttttttatgaacggttctattactttatttcaggtggcattagcagttttgaagataaatgcagatgatatcttacaagccgatgatgatggaatgttcattgccataattaagcactatttccaaactttgggacaaagtgctcacccagattctagcgatataaaatatagacaaatcacgaaatttcaagagttattagttacggctttcaaagagtttagtgtcatcagcgaggaaatggcaatgcatgcaagacacaaatatgagaaaggtatttttcaaaacattgagactttcatgaaaagaacgcaattgcgccatatgccaaaaactttcaacctttccagtgatgacttgtccaatatctatgacatgttttaccaaagtatagaaacctacaaaattagtatgggaacgggatcttctaatatgggtttcgaagtattcattcagttcttgagtaaattctgtgactcctgtagaccgtgtgaaaaggacaaagatccagctttcagaaaacaaaaaaggaattttttgcaaaggttatttgataactgggattctgctcatatcggcgagttgacattgaacgatgtggtaacaggcttggataaattagtaactgttgatcttttacaagctataaactattttttctctttatatgatacagatggcgatggtgaattgcatagagaagaagtgttacagttgagtgaagggttgttgttattgacggaaccttggaagagcggtagatatgtagatttattaactaaaaagcgcattgaagatgatattgctgaaaacatcatcaaggaaagcggtggagagatagccactatgaaccaaatcgagttaccaactggggttactattgatgaggaaaaatataaagttgaacaagcagaaagatacttgaaagctgcaagcaatttcttacaaagatcttttgaatatgctaaagcagttgatctcgcggaggaggtaaacttgattgacttgtctgatgatgaaggcgaagaaaagagaacggtaaaacaaaaacaattggaaagcataaaggcaaatgcagccttggatcccacccatccaaaagtaatagatttgccaacatttagaatgatcatcctcgcagatgaaacttacgagcttttcttttctaatactttaagatcttctgttcacgtcgacgaacatgtcaacattgataacaaaaataaagtcctcagaagtatgtttgacggtatattggcagacggcaaaagagttgctgagcaagttcgtcgtcgtgtcgattctgtggcaactaggagcagcattgcttctgtagagagtacgccaacagccgctgcaagtagtataactaccaaagaagaaaagtacgatgatttggatgatttcacgagtgagcatcaacccgagaatgaagagttattacaaagttcctggtttgagatcgacgatgccaatgaaactagcactaaagccatacaagaaaggtcttttgagcctttgagtgcaaattccagtgaagagaagtccaaccttattgaatttgaagcatga

SEQ ID NO: 4347 - DNA, 1041 bp, Saccharomyces cerevisiae
atgtcaggtgtaagctctgttatgctcggtcttcgacctgctacaagaatttttttccgcagtaatatttcggtttcaccttcgaggacttttgtatcatatattggaagatcccagagcacgtcgatactcaaaaatgctcccaacttagaggacaatgtcacaaatcttcagaaaattataccgaaacggttcttttctcaaacatcaattttgaaatcaaggtggaagcctatattcaatgaagaaactactaatcgatacgtacgtttgaacaggtttcagcagtaccagcagcagagaagcggcggcaatcctctgggctctatgactattttggggctctctttaatggcaggaatatattttggctccccttatttgttcgagcacgttccaccctttacgtattttaagacgcatccaaagaatctggtatacgcgttattaggcatcaatgttgccgtatttggactatggcagctacccaaatgctggaggtttctacagaagtacatgttgctgcaaaaggattacgtaactagcaaaatttcgataatcggaagtgcgttttcacatcaagaattctggcacttaggtatgaacatgctagcgttgtggtcctttggtacttcactcgcaacaatgttgggagcatccaattttttctccttatatatgaatagtgccattgcaggttctttgttttcgttatggtatccaaaactggcacgcctagccattgtcggacctagcttgggtgccagtggagcgctatttggggttttaggatgtttttcatatctattcccacacgctaaaattttgctgtttgttttcccagtcccaggtggggcttgggtagcattcttggcttcagtggcatggaatgcagctggttgtgctttaagatgggggtcatttgattacgctgcgcatttaggtggctctatgatgggggtcttgtacggatggtatataagtaaagctgtagagaaacaaaggcagcgtcgccttcaggctgctggtaggtggttttaa

SEQ ID NO: 4348 - DNA, 1041 bp, Artificial Sequence
  Description of Artificial Sequence: Synthetic polynucleotide
atgagtggtgtaagctctgttatgctcggtcttagacctgctacaagaatttttttccgcagtaatatttctgtttctccttctaggacttttgtatcttatattggaagatcccagagcacgtctatactcaaaaatgctcccaacttagaggacaatgtcacaaatcttcagaaaattataccgaaaagattcttttctcaaacatccattttgaaatctaggtggaagcctatattcaatgaagaaactactaatagatacgtacgtttgaacaggtttcagcagtaccagcagcagagaagcggcggcaatcctttgggctctatgactattttggggctctctttaatggcaggaatatattttggctccccttatttgttcgagcacgttccaccctttacgtattttaagacgcatccaaagaatttggtatacgcgttattaggcatcaatgttgccgtatttggattatggcagttgcccaaatgctggaggtttttgcagaagtacatgttgttgcaaaaggattacgtaactagcaaaatttctataatcggaagtgcgttttctcatcaagaattctggcacttaggtatgaacatgttggcgttgtggtcctttggtacttctctcgcaacaatgttgggagcatccaattttttctccttatatatgaatagtgccattgcaggttctttgttttctttatggtatccaaaattggcacgcttggccattgtcggacctagcttgggtgccagtggagcgttatttggggttttaggatgtttttcttatcttttcccacacgctaaaattttgttatttgttttcccagtcccaggtggggcttgggtagcattcttggcttctgtggcatggaatgcagctggttgtgctttaagatgggggtcttttgattacgctgcgcatttaggtggctctatgatgggggtcttgtacggatggtatataagtaaagctgtagagaaacaaaggcagcgtcgccttcaggctgctggtaggtggttttga

SEQ ID NO: 4349 - DNA, 552 bp, Saccharomyces cerevisiae
atgtacaaaacatggcgtctatgcagaacacatacagtgggtgggttatgccatgatggaagtcatcggttcgtatctacgggaggggcaaagattggtaaaaaatttgaaaatatgaatcaaataagggattatttatcaagacctgtatggtccgtccacgaatatttaggcataaacactaaagaggaaaaactagagccaccgtctgctgaagctgtaaaaaaattgttgcggttatcaggtcttcccttggaaggagcagatattaaagaaattcaaatgcgacttgccaagcaattatcattcatcaacaaactccataacatacctgtcgaaggtgaaaagcacaccaaggaatatgatgctcggttggtgcaaagaaatacgaaacagctgaactacacaaagctacttgaaggcatcagccaccaaaagcaggatgctgagctaggagaagttagcggatcttggaaagcaactggacttgccgcggaatccaaaaatgcatattttgttgtcaaagagggactactcaaaaacaggaagtaa

SEQ ID NO: 4350 - DNA, 552 bp, Artificial Sequence
  Description of Artificial Sequence: Synthetic polynucleotide
atgtacaaaacatggcgtttatgcagaacacatacagtgggtgggttatgccatgatggaagtcatagattcgtatctacgggaggggcaaagattggtaaaaaatttgaaaatatgaatcaaataagggattatttatctagacctgtatggtccgtccacgaatatttaggcataaacactaaagaggaaaaattagagccaccgtctgctgaagctgtaaaaaaattgttgagattatctggtcttcccttggaaggagcagatattaaagaaattcaaatgagacttgccaagcaattatctttcatcaacaaactccataacatacctgtcgaaggtgaaaagcacaccaaggaatatgatgctagattggtgcaaagaaatacgaaacagttgaactacacaaagcttcttgaaggcatcagccaccaaaagcaggatgctgagttaggagaagttagcggatcttggaaagcaactggacttgccgcggaatccaaaaatgcatattttgttgtcaaagagggattactcaaaaacaggaagtga

SEQ ID NO: 4351 - DNA, 1818 bp, Saccharomyces cerevisiae
atgagaatcaagaagaaaaacaccagaggtaacgcaagaaactttattaccagatctcaagctgtgagaaaattacaggtttctcttgctgatttcagaagattatgtatattcaaaggtatctatcctagagagccaagaaataaaaagaaggcaaacaagggctctactgcaccaactactttttactatgctaaggatattcaatatctaatgcatgagcccgttttggctaaatttagagaacacaagacttttgctaggaaactaacaagggctttgggtaggggagaagtctcttctgctaaaaggttagaggaaaacagagatagttatactttagaccatattatcaaggagcgttatccaagtttcccagatgctataagggatattgatgatgctttgaatatgttatttcttttctctaatttgccctctaccaaccaggtttcctcgaaaattatcaatgatgctcagaaaatctgtaatcaatggttagcctatgttgccaaggaacgcttggttcgtaaagtgtttgtatccattaaaggtgtttattatcaagccaatattaagggtgaagaagttagatggttagttccattcaagtttccagaaaacatccccagtgacgttgatttcagaattatgttgaccttcttagaattctactcgactctattgcatttcgtcctatataagttatacaccgatagtgggttgatttatccgccaaaattggatcttaaaaaggataaaatcataagtggtttgtcatcatatattctagaatccagacaagaagacagcctactaaaacttgacccaactgagattgaggaagacgtaaaagttgaaagtttggacgcatcgacattaaagtctgccttgaatgccgatgaggcaaatactgatgaaacagaaaaggaggaagaacaagaaaagaaacaagaaaaggaacaagaaaaggaacaaaatgaggaaacggaactagatactttcgaggataacaataagaacaagggtgacatcttaatacagccaagtaagtacgattctcctgttgcttctttgttttctgcatttgttttttacgttagcagagaagttccgatcgatattcttgagttcttgatcttatcttgtggtggtaatgtcatcagtgaagctgctatggaccaaattgaaaataagaaggatattgacatgtccaaggtcactcatcaaattgttgacaggccagttttgaaaaacaaggtagctggcagaacgtatattcagccacagtggatatttgattgtatcaataaaggcgaattggtacctgccaacaaatatcttccaggggaggctcttccacctcacttaagcccatggggtgatgctattggttacgatccaactgctcctgtcgaagaaggcgaagaagaagaaagtgaaagtgaaagtgaaagtgaagatcaagttgaggaggaagatcaagaagttgttgctggagaagaagatgatgacgatgacgaagagctacaagctcaaaaagagcttgaattggaagcacaaggtatcaaatattctgaaacttcagaagctgataaggatgtcaataagtcaaagaacaaaaagagaaaggtggatgaagaagaagaagaaaagaaattgaaaatgataatgatgagtaacaaacaaaagaaactttacaaaaaaatgaagtattctaatgctaaaaaggaggaacaagctgagaacttaaaaaagaaaaagaagcaaattgccaaacaaaaagctaaactgaataaactagattccaagaaatag

SEQ ID NO: 4352 - DNA, 1818 bp, Artificial Sequence
  Description of Artificial Sequence: Synthetic polynucleotide
atgagaatcaagaagaaaaacaccagaggtaacgcaagaaactttattaccagatctcaagctgtgagaaaattacaggtttctcttgctgatttcagaagattatgtatattcaaaggtatctatcctagagagccaagaaataaaaagaaggcaaacaagggctctactgcaccaactactttttactatgctaaggatattcaatatttaatgcatgagcccgttttggctaaatttagagaacacaagacttttgctaggaaattaacaagggctttgggtaggggagaagtctcttctgctaaaaggttagaggaaaacagagatagttatactttagaccatattatcaaggagcgttatccaagtttcccagatgctataagggatattgatgatgctttgaatatgttatttcttttctctaatttgccctctaccaaccaggtttcctctaaaattatcaatgatgctcagaaaatctgtaatcaatggttagcctatgttgccaaggaacgcttggttcgtaaagtgtttgtatccattaaaggtgtttattatcaagccaatattaagggtgaagaagttagatggttagttccattcaagtttccagaaaacatccccagtgacgttgatttcagaattatgttgaccttcttagaattctactccactttattgcatttcgtcctttataagttatacaccgatagtgggttgatttatccgccaaaattggatcttaaaaaggataaaatcataagtggtttgagttcttatattttggaatccagacaagaagacagcttgttgaaacttgacccaactgagattgaggaagacgtaaaagttgaaagtttggacgcaagcacattaaagtctgccttgaatgccgatgaggcaaatactgatgaaacagaaaaggaggaagaacaagaaaagaaacaagaaaaggaacaagaaaaggaacaaaatgaggaaacggaattagatactttcgaggataacaataagaacaagggtgacatcttaatacagccaagtaagtacgattctcctgttgcttctttgttttctgcatttgttttttacgttagcagagaagttccgatcgatattcttgagttcttgatcttatcttgtggtggtaatgtcatcagtgaagctgctatggaccaaattgaaaataagaaggatattgacatgtccaaggtcactcatcaaattgttgacaggccagttttgaaaaacaaggtagctggcagaacgtatattcagccacagtggatatttgattgtatcaataaaggcgaattggtacctgccaacaaatatcttccaggggaggctcttccacctcacttaagcccatggggtgatgctattggttacgatccaactgctcctgtcgaagaaggcgaagaagaagaaagtgaaagtgaaagtgaaagtgaagatcaagttgaggaggaagatcaagaagttgttgctggagaagaagatgatgacgatgacgaagagttacaagctcaaaaagagcttgaattggaagcacaaggtatcaaatattctgaaacttctgaagctgataaggatgtcaataagtccaagaacaaaaagagaaaggtggatgaagaagaagaagaaaagaaattgaaaatgataatgatgagtaacaaacaaaagaaactttacaaaaaaatgaagtattctaatgctaaaaaggaggaacaagctgagaacttaaaaaagaaaaagaagcaaattgccaaacaaaaagctaaattgaataaattggattccaagaaatga

SEQ ID NO: 4353 - DNA, 924 bp, Saccharomyces cerevisiae
atggttcagcaactaagcctttttggatctattggtgatgacggctacgatttactaatttcaactttgaccacaatatcaggtaatcctccgctactgtataacagtttatgcactgtctggaaaccaaatccatcttacgacgtcgagaacgtgaactctagaaaccaattggttgaaccaaatagaataaaactttccaaagaggtgccattttcttacctgatcgatgaaacaatgatggataagccattaaactttagaatcttgaaatcttttacaaacgataaaatcccgcttaactatgctatgacacggaatatcttgcacaacacagttccgcaagtcaccaacttcaacagcacaaacgaagatcaaaacaacagtaagcatacagaagatactgtaaatgaaagtcgaaacagcgatgacatcatagatgtcgacatggatgcaagtcccgccccttcaaacgagtcatgttccccttggtcattgcaaatttcagatattcctgctgcaggaaacaatagaagtgtttcaatgcaaacgatagctgagactatcatattatcttcagctggcaaaaactcttcagtatcctcgctcatgaacggattgggttatgtattcgaatttcagtatcttacaattggtgtgaaattttttatgaagcatggtttaatacttgagttacaaaaaatttggcaaatagaagaagcaggcaattcacaaataacaagcggagggttccttttaaaagcatacatcaatgttagtagggggaccgatatcgatcgtataaactatacagagactgccttgatgaacttaaaaaaggaactacaaggctatatagagttaagtgtacccgatagacagtcaatggactcgagggtagcacatggaaatattctaatataa

SEQ ID NO: 4354 - DNA, 924 bp, Artificial Sequence
  Description of Artificial Sequence: Synthetic polynucleotide
atggttcagcaattgagcctttttggatctattggtgatgacggctacgatttattgatttctactttgaccacaatatctggtaatcctccgttattatataacagtttatgcactgtctggaaaccaaatccatcttacgacgtcgagaacgtgaactctagaaaccaattggttgaaccaaatagaataaaactttccaaagaggtgccattttcttacttgatcgatgaaacaatgatggataagccattaaactttagaatcttgaaatcttttacaaacgataaaatcccgcttaactatgctatgacaagaaatatcttgcacaacacagttccgcaagtcaccaacttcaacagcacaaacgaagatcaaaacaacagtaagcatacagaagatactgtaaatgaaagtagaaacagcgatgacatcatagatgtcgacatggatgcaagtcccgccccttccaacgagagttgttccccttggtctttgcaaatttctgatattcctgctgcaggaaacaatagaagtgtttctatgcaaacgatagctgagactatcatattatcttctgctggcaaaaactcttctgtatcctctctcatgaacggattgggttatgtattcgaatttcagtatcttacaattggtgtgaaattttttatgaagcatggtttaatacttgagttacaaaaaatttggcaaatagaagaagcaggcaattctcaaataacaagcggagggttccttttaaaagcatacatcaatgttagtagggggaccgatatcgatcgtataaactatacagagactgccttgatgaacttaaaaaaggaattacaaggctatatagagttaagtgtacccgatagacagtccatggacagcagggtagcacatggaaatattttaatatga

SEQ ID NO: 4355 - DNA, 234 bp, Saccharomyces cerevisiae
atggctgtagatgttcctcgtgcggtgattaataaacttatgctgtttactgcagcgatggtggtactgcccgtactcacttttttcattattcagcaatttacgccaaataccttaattagtggaggtttagctgctgcaatggccaatgttgttctaatcgtttacattgttgtagcgttccgcgaggatactgaagatcacaaagttgatggtaataaaaaggaagactga

SEQ ID NO: 4356 - DNA, 234 bp, Artificial Sequence
  Description of Artificial Sequence: Synthetic polynucleotide
atggctgtagatgttcctcgtgcggtgattaataaacttatgttatttactgcagcgatggtggtattgcccgtactcacttttttcattattcagcaatttacgccaaataccttaattagtggaggtttagctgctgcaatggccaatgttgttttgatcgtttacattgttgtagcgttccgcgaggatactgaagatcacaaagttgatggtaataaaaaggaagactga

SEQ ID NO: 4357 - DNA, 798 bp, Saccharomyces cerevisiae
atggtgttcggtcagctgtatgcccttttcatcttcacgttatcatgttgtatttccaaaactgtgcaagcagattcatccaaggaaagctcttcctttatttcgttcgacaaagagagtaactgggataccatcagcactatatcttcaacggcagatgttatatcatccgttgacagtgctatcgctgtttttgaatttgacaatttctcattattggacaacttgatgattgacgaagaatacccattcttcaatagattctttgccaatgatgtcagtttaactgttcatgacgattcgcctttgaacatctctcaatcattatctcccattatggaacaatttactgtggatgaattacctgaaagtgcctctgacttactatatgaatactccttagatgataaaagcatcgttttgttcaagtttacctcggatgcctacgatttgaaaaaattagatgaatttattgattcttgcttatcgtttttggaagataaatctggcgacaatttgactgtggttattaactctcttggttgggcttttgaagatgaagatggtgacgatgaatatgcaacagaagagactttgagccatcatgataacaacaagggtaaagaaggcgacgatgatattttaagctccatctggactgaaggactactaatgtgtttaatagtttctgcgttgctattgttcattttgattgttgcactttcttggatatctaatttggatatcacatatggtgcgttggaaaaatcaacaaacccaataaaaaaaaacaattaa

SEQ ID NO: 4358 - DNA, 798 bp, Artificial Sequence
  Description of Artificial Sequence: Synthetic polynucleotide
atggtgttcggtcagttatatgcccttttcatcttcacgttaagttgttgtatttccaaaactgtgcaagcagattcttccaaggaaagctcttcctttatttctttcgacaaagagagtaactgggataccatcagcactatatcttctacggcagatgttatatcttccgttgacagtgctatcgctgtttttgaatttgacaatttctctttattggacaacttgatgattgacgaagaatacccattcttcaatagattctttgccaatgatgtcagtttaactgttcatgacgattctcctttgaacatctctcaatctttatctcccattatggaacaatttactgtggatgaattacctgaaagtgcctctgacttattatatgaatactccttagatgataaaagcatcgttttgttcaagtttacctctgatgcctacgatttgaaaaaattagatgaatttattgattcttgcttatcttttttggaagataaatctggcgacaatttgactgtggttattaactctcttggttgggcttttgaagatgaagatggtgacgatgaatatgcaacagaagagactttgagccatcatgataacaacaagggtaaagaaggcgacgatgatattttaagctccatctggactgaaggattattgatgtgtttaatagtttctgcgttgttgttgttcattttgattgttgcactttcttggatatctaatttggatatcacatatggtgcgttggaaaaatctacaaacccaataaaaaaaaacaattga

SEQ ID NO: 4359 - DNA, 1416 bp, Saccharomyces cerevisiae
atgtcacgatcccttttggtagagaatagtagaaccattaatagtaatgaagagaagggggtaaacgaaagtcaatatatcttacaaaagagaaacgtcccaaggaccattctcggtaatgtcacaaataatgcaaatatcctgcaagagatttctatgaacagaaaaattgggatgaagaacttctcaaaattgaacaacttctttcctttaaaggatgatgtttcgagagccgatgacttcacctcctcttttaatgacagtagacagggggtgaaacaagaagtactaaacaataaggaaaatattcctgaatatggatattccgagcaagaaaagcagcagtgctcaaatgatgactcttttcatacgaattcgactgccttgagctgtaatcggttgatatactctgagaacaagtctatttccactcaaatggaatggcagaaaaaaataatgagagaagattccaaaaaaaaaaggccaatatcaactcttgtagagcaggatgaccagaaaaagttcaaactccatgaattgactacagaagaagaggttctggaggagtacgaatgggatgacctagatgaagaagattgtgatgatcccttaatggtgagcgaagaggttaatgatatcttcgattatttgcatcacttggaaataatcacattgccaaataaggcgaatctctataagcataaaaatattaagcaaaacagagacattttggtgaactggataatcaagattcataataagtttggccttctgccggaaactctatatttggccataaacataatggatagatttctttgtgaagaggtggttcagttaaatagattgcaactggttggtacatcatgcctgttcatcgcatctaagtatgaggaaatatactcccctagcataaaacattttgcgtacgagacagacggtgcatgctctgtggaagatattaaagagggtgaaagatttatattggaaaaactcgattttcaaattagtttcgctaacccaatgaatttcttaaggagaatatcaaaagcggatgactatgatatccagtctaggacgttagcgaagttcctaatggaaatatctatagtggacttcaagttcatcgggatattaccgtcattatgtgcctcagcggcaatgttcctttcgagaaaaatgctgggcaagggcacctgggatggcaacttaatccattatagtggtggttacacaaaggcaaaactatatcccgtttgccaattactgatggattatcttgttggatctactattcacgacgagttcttgaaaaaatatcaatcgagaagatttttaaaggcttccataatttctatcgaatgggcattgaaggtaaggaaaaatggatatgatattatgacattgcatgagtga

SEQ ID NO: 4360 - DNA, 1416 bp, Artificial Sequence
  Description of Artificial Sequence: Synthetic polynucleotide
atgtctagatcccttttggtagagaatagtagaaccattaatagtaatgaagagaagggggtaaacgaaagtcaatatatcttacaaaagagaaacgtcccaaggaccattctcggtaatgtcacaaataatgcaaatatcttgcaagagatttctatgaacagaaaaattgggatgaagaacttctccaaattgaacaacttctttcctttaaaggatgatgtttctagagccgatgacttcacctcctcttttaatgacagtagacagggggtgaaacaagaagtattgaacaataaggaaaatattcctgaatatggatattccgagcaagaaaagcagcagtgctccaatgatgactcttttcatacgaattctactgccttgagctgtaatagattgatatactctgagaacaagtctatttccactcaaatggaatggcagaaaaaaataatgagagaagattccaaaaaaaaaaggccaatatctactcttgtagagcaggatgaccagaaaaagttcaaactccatgaattgactacagaagaagaggttttggaggagtacgaatgggatgacttggatgaagaagattgtgatgatcccttaatggtgagcgaagaggttaatgatatcttcgattatttgcatcacttggaaataatcacattgccaaataaggcgaatctctataagcataaaaatattaagcaaaacagagacattttggtgaactggataatcaagattcataataagtttggccttttgccggaaactttatatttggccataaacataatggatagatttctttgtgaagaggtggttcagttaaatagattgcaattggttggtacatcctgccttttcatcgcatctaagtatgaggaaatatactcccctagcataaaacattttgcgtacgagacagacggtgcatgctctgtggaagatattaaagagggtgaaagatttatattggaaaaactcgattttcaaattagtttcgctaacccaatgaatttcttaaggagaatatccaaagcggatgactatgatatccagtctaggacgttagcgaagttcttaatggaaatatctatagtggacttcaagttcatcgggatattaccgtctttatgtgcctctgcggcaatgttcctttctagaaaaatgcttggcaagggcacctgggatggcaacttaatccattatagtggtggttacacaaaggcaaaactttatcccgtttgccaattattgatggattatcttgttggatctactattcacgacgagttcttgaaaaaatatcaatctagaagatttttaaaggcttccataatttctatcgaatgggcattgaaggtaaggaaaaatggatatgatattatgacattgcatgagtga

SEQ ID NO: 4361 - DNA, 1143 bp, Saccharomyces cerevisiae
atgaattgtatccctagtccaattagtgaaaggaaaatccaaattaataatgaagattgtataggcaaggaaaatgctttccataccattccaagagaaagttcaattaacttgacacctcactctacgaatgaaaaaaaagttctatccgaggtaaacagtaacaaaatcgattctttacaactccctcgaggtaaattgcaaagagattccacccatttggaaaaaacaagaaagagacaattatcaaatgattcaaccgatcctatagagccaaaaactgtgaaaaaaataaaatgtcatcaatggaaaaatttggattcgatagagatggatgatccattcatggtagcagaatatacagattctatattttctcatctttacgagaaggaaatccaaatgctaccgacacataactatttaatggacacgcaatctccctatcatttgaaaagctccatgagggcgctgttaattgactggttggttgaagttcatgagaaatttcactgcttacctgaaacattatttttagcgatcaacctgctagatcgatttttatcacaaaatgttgttaaattgaataaattacaactactatgcatcacttgcctgttcattgcctgtaaatttgaagaagttaaattaccaaaaataacaaattttgcgtacgtgactgacggtgctgccactgtcgaaggaattaggaaggctgagctattcgttctaagttctttaggttataacatatctctaccaaaccccctaaatttcattaggagaatttcaaaagctgacaattactgcattgaaacaaggaacatggccaaattcatcatggaatattcgatttgttgtaataaattcatccacctgaagccatcatatttagctgcaatgtccatgtatatcgccagaaaaattaaaaatgaaaattccaaatgggatgaaacttttattcattatagtggcggcattgatattgaatcagatccagcgtttaaggattttatcagtgaactagttgaagatattgctgtacctgatacgaatctagattccttgagacttaaatacaaaaagcctaaacatggcatggtttatttcaaggtttttgactggtgtaaacaaaaacgttga

SEQ ID NO: 4362 - DNA, 1143 bp, Artificial Sequence
  Description of Artificial Sequence: Synthetic polynucleotide
atgaattgtatccctagtccaattagtgaaaggaaaatccaaattaataatgaagattgtataggcaaggaaaatgctttccataccattccaagagaaagttctattaacttgacacctcactctacgaatgaaaaaaaagttttatccgaggtaaacagtaacaaaatcgattctttacaactccctcgtggtaaattgcaaagagattccacccatttggaaaaaacaagaaagagacaattatccaatgattctaccgatcctatagagccaaaaactgtgaaaaaaataaaatgtcatcaatggaaaaatttggattctatagagatggatgatccattcatggtagcagaatatacagattctatattttctcatctttacgagaaggaaatccaaatgttaccgacacataactatttaatggacacgcaatctccctatcatttgaaaagctccatgagggcgttattaattgactggttggttgaagttcatgagaaatttcactgcttacctgaaacattatttttagcgatcaacttattagatagatttttatctcaaaatgttgttaaattgaataaattacaattattatgcatcacttgccttttcattgcctgtaaatttgaagaagttaaattaccaaaaataacaaattttgcgtacgtgactgacggtgctgccactgtcgaaggaattaggaaggctgagcttttcgttttgagttctttaggttataacatatctttaccaaaccccttgaatttcattaggagaatttccaaagctgacaattactgcattgaaacaaggaacatggccaaattcatcatggaatattctatttgttgtaataaattcatccacttgaagccatcttatttagctgcaatgtccatgtatatcgccagaaaaattaaaaatgaaaattccaaatgggatgaaacttttattcattatagtggcggcattgatattgaaagtgatccagcgtttaaggattttatcagtgaattggttgaagatattgctgtacctgatacgaatttggattccttgagacttaaatacaaaaagcctaaacatggcatggtttatttcaaggtttttgactggtgtaaacaaaaacgttga

SEQ ID NO: 4363 - DNA, 1338 bp, Saccharomyces cerevisiae
atgttcaagtcaactttaaactccataataagaagacccttgaaaggttttcaacttcttagaggggctgactcatcgaatacacggccacagtcccctagagcctccgcaagagatgttacagagaaacagatattaagaactccgtcagcaccaactgcaataccattaagggagattatctatagagtcccaagcttgtttcctcgccctttagaagattctgttaaggacttccgagattttatcaagaacgaggatgcattccagactgaacttttgaaaacgctgccattctaccccactccttcggaatcaaaaacagcaagacttataagaactgttgttgatgatgagggcaattacatcaatgaattttgcatacgccctcgaaaaacctcagtgcctgaggctgacttaaaacatctggttttcattcatgggtatggcgccggattgggttttttcatcaagaattttgaggatattccactattggataacgagtggtgcatacatgccatcgatttgcctgggtatggtttttcttcaagacctaagtttccgttcgagtatccgagagataatattcacagcgttcaagattggtttcacgaaagaatacacacatggtttagtaaaagaaatcttttgaaccgacctgagaaaaacattgttatggcacattctttagggtcttacttgatggctttatatttgcaaaaatataaggaatctccatcttttaaaaagctgatcctttgttccccagcaggcgtgtcttatagagatttcaacaatactgcttcagaggttgaaaaatggaaaccgcctccttggtggtatgtcaagctttgggacagaaatatctcgccttttacactagtaagaaattttcgccagttaggttcgaagattacaagtggatggtcatatcggcgctttaagcacattttgaatggtgatccagaacagtcaaaacggtttgaagccttgcatagatacgcatatgctattttcaataaacgtggttcaggtgaatacttattaagctttgctttgaaatgtggtggtgaaccaagactatcattggagcagcagctattcgatggcaaaaagtctgatattttaaagaatagtaattgtgactggctttggctttatggcgatgacgattggatggatgtgaatggtggacttagagtatcaagattcttgaaagagaagttgaaacaaaaaagtaacgtcatcattgttcctcattcagggcatcacttgtacctggataactataagtttttcaataatattcttacgaaagaaatgcaaaaaatataa

SEQ ID NO: 4364 - DNA, 1338 bp, Artificial Sequence
  Description of Artificial Sequence: Synthetic polynucleotide
atgttcaagtctactttaaactccataataagaagacccttgaaaggttttcaacttcttagaggggctgactcctctaatacaagaccacagtcccctagagcctccgcaagagatgttacagagaaacagatattaagaactccgagtgcaccaactgcaataccattaagggagattatctatagagtcccaagcttgtttcctcgccctttagaagattctgttaaggacttcagagattttatcaagaacgaggatgcattccagactgaacttttgaaaacgttaccattctaccccactccttctgaaagtaaaacagcaagacttataagaactgttgttgatgatgagggcaattacatcaatgaattttgcatacgccctagaaaaacctctgtgcctgaggctgacttaaaacatttggttttcattcatgggtatggcgccggattgggttttttcatcaagaattttgaggatattccattgttggataacgagtggtgcatacatgccatcgatttgcctgggtatggtttttcttctagacctaagtttccgttcgagtatccgagagataatattcacagcgttcaagattggtttcacgaaagaatacacacatggtttagtaaaagaaatcttttgaacagacctgagaaaaacattgttatggcacattctttagggtcttacttgatggctttatatttgcaaaaatataaggaatctccatcttttaaaaagttaatcctttgttccccagcaggcgtgtcttatagagatttcaacaatactgcttctgaggttgaaaaatggaaaccgcctccttggtggtatgtcaagctttgggacagaaatatctctccttttacattggtaagaaattttcgccagttaggttccaagattacaagtggatggagttatagacgctttaagcacattttgaatggtgatccagaacagtccaaaagatttgaagccttgcatagatacgcatatgctattttcaataaacgtggttctggtgaatacttattaagctttgctttgaaatgtggtggtgaaccaagattatctttggagcagcagttattcgatggcaaaaagtctgatattttaaagaatagtaattgtgactggctttggctttatggcgatgacgattggatggatgtgaatggtggacttagagtatctagattcttgaaagagaagttgaaacaaaaaagtaacgtcatcattgttcctcattctgggcatcacttgtacttggataactataagtttttcaataatattcttacgaaagaaatgcaaaaaatatga

SEQ ID NO: 4365 - DNA, 1203 bp, Saccharomyces cerevisiae
atgacagcctcatcaaatgacgatgacctaatattcgaatgttatagcgatcctgagttaaaaagatggacacaccttgctaatgcaaaagcttggaaaggtattctgaccgtgcagcagtacgctgatagggaacaattgctagggtcttcagagatttctcaaaagaataaatcaaatgaaatgatgacaaaatacccaaaaagttaccagtggcttgggcagaagtactttgttttaaaggatcgatctttgccagataatggaaaatttagtcaagttgtttccagttgcgaaactttaaacaggattggatattgtattcatccgggttctaatggaaaaatcgagccagctttgattgtatgcattgggggcgtctttacctttgaaaaccatcgcggcaagggctacgccaagaagatgattatcaaactgaatgaattttatgacaagattcgtgatgacgctaacaccgtactagaattgaaaaatttggtgattaacctttacagcgaagtcggagaatattattccgcattaggatacgagagtatgcatgttcccttgcaccgcatttctaaattagatgaacttactgagagatactgtggagaagatgatgaccatgatggtaagtacttgggatttgatgattacaggggtttagtaggactacatgagacacagttcaaagaaagcttattaagtttacacaaagaaaacccagagaagtttgtttttaccgttgcgccagactttgacattttcacatggtttcagtatcgtgatctttttatcatgaataaatcaggaagaaaagcccagcaaaatctgttttttggatacgcgttgagtgataacagccacatcatatggcatcacaattggaacggtgattctctgattattgtcaaaatccatatacctgaagaaacatttcaaaggaaagaattgaagctcaaaaaattactaaggaaggccatagaagagacaaagcttcatggattgcaagaattagaattttgggacgaagaaattcccatcaaaaagtacccacaattgtttcagttattaacagagcttgaaaatgaatctaaagttttctcagaaaacggttccatcagtgctgttcgtccccccaaaggatatacagccgagcaggtaatttgggataacaataccaaattctgttggttttaa

SEQ ID NO: 4366 - DNA, 1203 bp, Artificial Sequence
  Description of Artificial Sequence: Synthetic polynucleotide
atgacagcctcttccaatgacgatgacttgatattcgaatgttatagcgatcctgagttaaaaagatggacacaccttgctaatgcaaaagcttggaaaggtattttgaccgtgcagcagtacgctgatagggaacaattgttggggtcttctgagatttctcaaaagaataaatctaatgaaatgatgacaaaatacccaaaaagttaccagtggcttgggcagaagtactttgttttaaaggatagatctttgccagataatggaaaatttagtcaagttgtttccagttgcgaaactttaaacaggattggatattgtattcatccgggttctaatggaaaaatcgagccagctttgattgtatgcattgggggcgtctttacctttgaaaaccatcgcggcaagggctacgccaagaagatgattatcaaattgaatgaattttatgacaagattcgtgatgacgctaacaccgtattggaattgaaaaatttggtgattaacctttacagcgaagtcggagaatattattccgcattaggatacgagagtatgcatgttcccttgcaccgcatttctaaattagatgaacttactgagagatactgtggagaagatgatgaccatgatggtaagtacttgggatttgatgattacaggggtttagtaggattgcatgagacacagttcaaagaaagcttattaagtttacacaaagaaaacccagagaagtttgtttttaccgttgcgccagactttgacattttcacatggtttcagtatcgtgatctttttatcatgaataaaagtggaagaaaagcccagcaaaatttattttttggatacgcgttgagtgataacagccacatcatatggcatcacaattggaacggtgattctttgattattgtcaaaatccatatacctgaagaaacatttcaaaggaaagaattgaagctcaaaaaattattgaggaaggccatagaagagacaaagcttcatggattgcaagaattagaattttgggacgaagaaattcccatcaaaaagtacccacaattgtttcagttattaacagagcttgaaaatgaatctaaagttttctctgaaaacggttccatcagtgctgttcgtccccccaaaggatatacagccgagcaggtaatttgggataacaataccaaattctgttggttttga

SEQ ID NO: 4367 - DNA, 1170 bp, Saccharomyces cerevisiae
atgtctctactaggcgccaggtccacttaccgttggttttcaatcgctgcatcaattccgactaagaatgctattggcaaatccacgtacctcttagcttcaagaaatcaacagtaccgaggcatcataacgtcaactgtagactggaaaccaatcaagacaggtaagagcccaaatgatgattctcgaagagaaagatcctttggcaagaaaattgttctgggtctgatgttcgcgatgccaataatatccttctatttgggaacttggcaagtaaggagattgaagtggaaaaccaagctgattgcggcatgcgaaactaaacttacttatgaaccaataccacttcctaagtcatttacacctgacatgtgcgaggattgggaataccgtaaagttatacttaccggacacttccttcacaatgaagagatgtttgttggtccaagaaagaaaaatggagaaaagggttattttctgtttacaccgttcattagagatgacaccggtgagaaagttctgatagaaagagggtggataagtgaagaaaaagttgctcctgactcaagaaatttacaccatttgtcgttgcctcaagaagaacacttgaaagtggtttgcttagtaagacctccaaagaaaagaggctcgctacaatgggcgaaaaaggatccaaattctagattgtggcaggtgccagacatatatgacatggcaagatcatcagggtgcacgcccattcaatttcaagccttgtatgacatgaaggaccatccaataatcgaggaacacacaagaaacgaggcttcacaaaacaattccacctctagcctgtggaagttctggaaacgagaacctacgactgctgtaaacggaacgcaagctgttgataataatacatcgaagcctcgttctaggcaggaaatgccgacagaccaaacaattgaattcgatgaacgacagtttatcaaagcaggtgttcccataggccggaagcccactattgatttaaagaataaccatctacaatatttggtaacgtggtatggcctttcgtttttgagcacaatcttcctcattgtggctcttaggaaggcgaaaagagggggcgttgtgtcccaagaccaactaatgaaagagaaactgaagcattcaaggaaatatatgtaa

SEQ ID NO: 4368 - DNA, 1170 bp, Artificial Sequence
  Description of Artificial Sequence: Synthetic polynucleotide
atgtctttattaggcgccaggtccacttaccgttggttttctatcgctgcatctattccgactaagaatgctattggcaaatccacgtacctcttagcttccagaaatcaacagtacagaggcatcataacgtctactgtagactggaaaccaatcaagacaggtaagagcccaaatgatgattctagaagagaaagatcctttggcaagaaaattgttttaggtttgatgttcgcgatgccaataatatccttctatttgggaacttggcaagtaaggagattgaagtggaaaaccaagttgattgcggcatgcgaaactaaacttacttatgaaccaataccacttcctaagagctttacacctgacatgtgcgaggattgggaataccgtaaagttatacttaccggacacttccttcacaatgaagagatgtttgttggtccaagaaagaaaaatggagaaaagggttattttttgtttacaccgttcattagagatgacaccggtgagaaagttttgatagaaagagggtggataagtgaagaaaaagttgctcctgacagtagaaatttacaccatttgtctttgcctcaagaagaacacttgaaagtggtttgcttagtaagacctccaaagaaaagaggctccttacaatgggcgaaaaaggatccaaattctagattgtggcaggtgccagacatatatgacatggcaagaagttccgggtgcacgcccattcaatttcaagccttgtatgacatgaaggaccatccaataatcgaggaacacacaagaaacgaggcttctcaaaacaattccacctctagcttgtggaagttctggaaaagagaacctacgactgctgtaaacggaacgcaagctgttgataataatacatccaagcctcgttctaggcaggaaatgccgacagaccaaacaattgaattcgatgaaagacagtttatcaaagcaggtgttcccataggcagaaagcccactattgatttaaagaataaccatttacaatatttggtaacgtggtatggcctttcttttttgagcacaatcttcctcattgtggctcttaggaaggcgaaaagagggggcgttgtgtcccaagaccaattgatgaaagagaaattgaagcattccaggaaatatatgtga

SEQ ID NO: 4369 - DNA, 1032 bp, Saccharomyces cerevisiae
atgagcgaagataaagctaaattagggaccacaaggtctgccacggaatatcgtttatccattggtagcgctccgacttcaagaaggtcgtctatgggtgaatcctcatccctgatgaaatttgctgatcaagagggattaacgagttccgttggcgaatataacgagaataccatacaacagcttctgttgcctaaaataagagaactgagcgattcaatcattactttagattccaatttcacgcgcttaaattttatccacgagagtttagctgatcttaatgaatccctaggttcgttgttgtacggtattatgagcaattcatggtgcgtagaattctcacaggcgcctcatgatattcaagacgatttgatcgctattaaacaattgaaatcgttggaagatgagaaaaataacttagtaatggaactctccaatatggaacgcgggattaaaagaaaaaaagacgaacaaggtgaaaatgatttggccaaggcatctcagaacaaacagtttaaccagccgctatttccctcctcacaagtaagaaaatacaggtcatatgacaacagagacaagaggaagccctccaagataggcaacaacttacaagtagagaatgaggaggactatgaagacgatactagtagtgaagcttcttttgttctaaatccaacaaatatcggtatgtccaaatcatctcaaggtcacgtgactaaaaccacgcgtttgaataataataccaacagtaaactgagaagaaagtccatcttacatacaatcagaaatagcattgcttccggcgctgatttacccatcgaaaacgacaatgttgttaatttgggagatctgcatccaaataatcgaatatcactcggaagtggtgctgcaagagtggtcaatgggcccgttacgaagaacagaaattcaatgttctcaggacgtgctgaaaggaaacccacagaaagcagacattctgttgcaaagaaaactgaaaaaaaaataaatacaaggccccccttcagatga

SEQ ID NO: 4370 - DNA, 1032 bp, Artificial Sequence
  Description of Artificial Sequence: Synthetic polynucleotide
atgagcgaagataaagctaaattagggaccacaaggtctgccacggaatatcgtttatccattggtagcgctccgacttccagaaggtcttctatgggtgaatcctcctccttgatgaaatttgctgatcaagagggattaacgagttccgttggcgaatataacgagaataccatacaacagcttttattgcctaaaataagagaattgagcgattctatcattactttagattccaatttcacgcgcttaaattttatccacgagagtttagctgatcttaatgaatccttgggttctttgttgtacggtattatgagcaattcttggtgcgtagaattctctcaggcgcctcatgatattcaagacgatttgatcgctattaaacaattgaaatctttggaagatgagaaaaataacttagtaatggaactctccaatatggaacgcgggattaaaagaaaaaaagacgaacaaggtgaaaatgatttggccaaggcatctcagaacaaacagtttaaccagccgttgtttccctcctctcaagtaagaaaatacaggagttatgacaacagagacaagaggaagccctccaagataggcaacaacttacaagtagagaatgaggaggactatgaagacgatactagtagtgaagcttcttttgttttgaatccaacaaatatcggtatgtccaaatcttctcaaggtcacgtgactaaaaccacgcgtttgaataataataccaacagtaaattgagaagaaagtccatcttacatacaatcagaaatagcattgcttccggcgctgatttacccatcgaaaacgacaatgttgttaatttgggagatttgcatccaaataatagaatatctctcggaagtggtgctgcaagagtggtcaatgggcccgttacgaagaacagaaattctatgttcagtggacgtgctgaaaggaaacccacagaaagcagacattctgttgcaaagaaaactgaaaaaaaaataaatacaaggccccccttcagatga

SEQ ID NO: 4371 - DNA, 4356 bp, Saccharomyces cerevisiae
atggaagagacgggagattcgaagctggtccctagggacgaggaagaaatagtaaatgacaacgatgaaactaaagcgcctagtgaggaagaagaaggagaagatgtctttgactcctctgaggaagacgaagatattgatgaagacgaagatgaggcaagaaaagtgcaagaaggcttcattgtcaacgatgatgatgaaaatgaagacccaggaacaagtatttccaaaaaaagaagaaaacataaaagaagagaaagagaagaagatgatcgactatccgaagatgatttggatttgttaatggagaatgctggtgttgaacgtaccaaagcgagctcctcttcaggaaaatttaaaagattaaagagagtaggagatgaaggaaacgctgcagaatcagaaagtgacaacgtcgctgcatcaaggcaagattctacgtctaaattggaagatttcttttctgaagatgaagaagaagaagaatctggtttacgcaacggtaggaacaatgaatatgggcgtgatgaagaagaccatgaaaataggaacagaacagctgacaaaggtggaatcttggacgaattggatgatttcattgaagatgatgaattttctgatgaggacgacgaaaccagacaaaggaggatccaagaaaagaagcttttaagagaacaatccatcaaacaacctacacagattactggtctatcgtcggataagattgacgagatgtatgacatttttggtgatggtcatgactacgattgggctttagaaattgaaaatgaagaactagaaaatggtaacgacaacaatgaagctgaagaagaagagatcgatgaagaaactggtgctataaaaagcaccaagaaaaagatatctctacaagacatttatgatttagaggatttgaaaaaaaacttgatgactgaaggagacatgaaaattagaaagacagatattccagaaagatatcaagaattaagagcaggtattactgactacggaaatatgtcatcggaggatcaagaattagaaagaaactggatagcagaaaaaatttctgtggataagaacttcgatgccaattatgatctcactgaatttaaagaagcaattgggaacgcaatcaaatttatcaccaaagaaaacttggaagtcccttttatatatgcttaccgtcgtaactatatttcctcaagagaaaaagatgggtttcttttgactgaagatgacctttgggatatagttagccttgacatcgaatttcacagtcttgtgaacaaaaaggattatgtccagagattttatgcagaattacatatcgatgatcctattgtcactgaatacttcaaaaatcagaatactgcatctattgcggaactgaattctctacaggatatttatgactacctagaattcaaatatgccaacgaaatcaatgaaatgtttataaaccacactggaaagactggtaagaaacatttgaaaaattccagttatgaaaaatttaaagctagtcctctttatcaagcggttagtgatattggtatatcagctgaggatgttggtgaaaatatcagttcccagcatcaaatccaccctcccgtagatcatccaagttccaaaccagtagaagtgatagaatctatattgaatgcaaacagcggtgatttgcaagtctttacgtccaatactaagctggcaattgatacggtccaaaaatactactctttggaattgtctaaaaatacaaaaataagggaaaaagttagatccgatttttccaaatattatctggctgacgttgtgttaactgctaaaggtaaaaaagaaattcaaaagggatctctgtatgaggacataaaatatgccatcaatagaactccaatgcacttccgtagggatccagacgtttttttgaaaatggtcgaggctgagtctttgaacctgctcagtgttaagttacacatgtcgtcacaagcccaatatatagagcatttattccaaattgcacttgaaactaccaatacctcggacatcgcaatagaatggaataacttccgtaaactggcattcaaccaagcgatggacaagattttccaggatatatctcaagaagtcaaagacaatttaacaaaaaattgtcaaaaattggtagccaagactgttcgccataagtttatgacaaaattagaccaggctccattcattcctaatgtcagggatccaaaaattccaaaaatcttatctttaacctgtggacagggtagattcggagccgacgctataattgctgtctacgtcaacagaaagggtgattttataagagattacaagattgtcgacaatccatttgataagacgaatcctgaaaaatttgaagacaccttggataatatcattcaaagctgtcaaccgaatgccatcggaatcaatggccctaacccaaagactcaaaaattttacaaaagattacaagaagttctacataagaagcaaatcgtcgacagtagaggacatactattccaatcatttacgttgaggacgaagtcgctatccgttatcagaattccgaaagagctgctcaagaattccctaataaacctcctctagttaaatactgtatcgccttggcgcgctatatgcattccccattgttggaatatgctaatttaacaagtgaagaagtgagatcattgtcaattcatccacaccaaaatctgttatcctcagaacaattgagttgggctcttgaaaccgctttcgttgatattgtcaacctggtaagtgttgaagttaacaaagccacagataataattactacgctagtgcgctgaaatacatctctggctttggaaaacgtaaagctattgatttcttacagtcccttcaaaggctaaatgaaccattactggctcgtcaacaattaattactcataacattcttcacaagactatttttatgaattccgcgggattcctctatatctcatggaatgaaaaaagacaaaaatacgaagatttggaacatgatcaactagatagcactagaattcatccagaagactaccatttggccaccaaggttgccgctgatgctttagaatacgatcctgatactattgccgaaaaagaagaacaggggactatgagtgaattcattgaactgttgagagaagatcctgaccgtagagctaaactagaatcactaaatctagaatcatacgcagaagaacttgagaagaataccggattaagaaaacttaataatctaaatacaattgtccttgaattgttggatggatttgaagaattgagaaatgactttcatcctttgcaaggtgatgaaattttccaaagtttgactggtgagtctgaaaagacgtttttcaagggtagtattattccagtcagagtagaaagattctggcacaacgatataatttgcactacaaactctgaagttgaatgtgtagtaaatgctcaacgtcacgcaggtgcacaattaagaagacctgcaaatgaaatatacgaaattggtaaaacatatccagcaaaggtgatatatattgactatgctaatattactgcagaagtttccttattagatcatgatgtcaaacagcaatatgttccaataagctacagtaaagatccttccatttgggacttgaaacaagaactggaagatgccgaagaggagaggaaattgatgatggcagaagcccgtgcaaagagaacacatcgtgttatcaatcatccttactatttccctttcaacggcagacaggctgaggattacttaaggagtaaagaacgtggtgaattcgtgatcagacagtctagccgaggtgatgaccacttggttatcacctggaaattggataaggatttgtttcaacatattgatatccaagaattagaaaaagaaaatcctttggctttaggtaaagtcttgattgtcgacaatcagaaatacaatgatttagaccagatcattgtagaatatcttcaaaacaaggtaaggctcttgaatgaaatgacatctagtgaaaaattcaaaagcggtactaagaaagatgtggtcaagtttattgaagactactctagagtgaatccaaataagtctgtgtactatttcagtttgaaccacgataaccctggttggttttacttgatgttcaagattaacgcaaatagcaaattatacacatggaatgtgaaattaacgaacactggttatttcctggtaaactacaattatccaagtgttatccagctttgtaatggttttaagacgcttctaaaatctaacagtagtaagaatagaatgaacaactaccgttag

SEQ ID NO: 4372 - DNA, 4356 bp, Artificial Sequence
  Description of Artificial Sequence: Synthetic polynucleotide
atggaagagacgggagattctaagttggtccctagggacgaggaagaaatagtaaatgacaacgatgaaactaaagcgcctagtgaggaagaagaaggagaagatgtctttgactcctctgaggaagacgaagatattgatgaagacgaagatgaggcaagaaaagtgcaagaaggcttcattgtcaacgatgatgatgaaaatgaagacccaggaacaagtatttccaaaaaaagaagaaaacataaaagaagagaaagagaagaagatgatagattatccgaagatgatttggatttgttaatggagaatgctggtgttgaacgtaccaaagcgagctcctcttctggaaaatttaaaagattaaagagagtaggagatgaaggaaacgctgcagaaagtgaaagtgacaacgtcgctgcaagcaggcaagattctacgtctaaattggaagatttcttttctgaagatgaagaagaagaagaatctggtttacgcaacggtaggaacaatgaatatgggcgtgatgaagaagaccatgaaaataggaacagaacagctgacaaaggtggaatcttggacgaattggatgatttcattgaagatgatgaattttctgatgaggacgacgaaaccagacaaaggaggatccaagaaaagaagcttttaagagaacaatccatcaaacaacctacacagattactggtttatcttctgataagattgacgagatgtatgacatttttggtgatggtcatgactacgattgggctttagaaattgaaaatgaagaattggaaaatggtaacgacaacaatgaagctgaagaagaagagatcgatgaagaaactggtgctataaaaagcaccaagaaaaagatatctttacaagacatttatgatttagaggatttgaaaaaaaacttgatgactgaaggagacatgaaaattagaaagacagatattccagaaagatatcaagaattaagagcaggtattactgactacggaaatatgtcttctgaggatcaagaattagaaagaaactggatagcagaaaaaatttctgtggataagaacttcgatgccaattatgatctcactgaatttaaagaagcaattgggaacgcaatcaaatttatcaccaaagaaaacttggaagtcccttttatatatgcttaccgtcgtaactatatttccagcagagaaaaagatgggtttcttttgactgaagatgacctttgggatatagttagccttgacatcgaatttcacagtcttgtgaacaaaaaggattatgtccagagattttatgcagaattacatatcgatgatcctattgtcactgaatacttcaaaaatcagaatactgcatctattgcggaattgaattctttgcaggatatttatgactacttggaattcaaatatgccaacgaaatcaatgaaatgtttataaaccacactggaaagactggtaagaaacatttgaaaaattccagttatgaaaaatttaaagctagtcctctttatcaagcggttagtgatattggtatatctgctgaggatgttggtgaaaatatcagttcccagcatcaaatccaccctcccgtagatcatccaagttccaaaccagtagaagtgatagaatctatattgaatgcaaacagcggtgatttgcaagtctttacgtccaatactaagttagcaattgatacggtccaaaaatactactctttggaattgtctaaaaatacaaaaataagggaaaaagttagatccgatttttccaaatattatttggctgacgttgtgttaactgctaaaggtaaaaaagaaattcaaaagggatctttgtatgaggacataaaatatgccatcaatagaactccaatgcacttccgtagggatccagacgtttttttgaaaatggtcgaggctgagtctttgaacttactcagtgttaagttacacatgtcttctcaagcccaatatatagagcatttattccaaattgcacttgaaactaccaataccagtgacatcgcaatagaatggaataacttccgtaaattggcattcaaccaagcgatggacaagattttccaggatatatctcaagaagtcaaagacaatttaacaaaaaattgtcaaaaattggtagccaagactgttcgccataagtttatgacaaaattagaccaggctccattcattcctaatgtcagggatccaaaaattccaaaaatcttatctttaacctgtggacagggtagattcggagccgacgctataattgctgtctacgtcaacagaaagggtgattttataagagattacaagattgtcgacaatccatttgataagacgaatcctgaaaaatttgaagacaccttggataatatcattcaaagctgtcaaccgaatgccatcggaatcaatggccctaacccaaagactcaaaaattttacaaaagattacaagaagttttgcataagaagcaaatcgtcgacagtagaggacatactattccaatcatttacgttgaggacgaagtcgctatccgttatcagaattccgaaagagctgctcaagaattccctaataaacctcctttggttaaatactgtatcgccttggcgcgctatatgcattccccattgttggaatatgctaatttaacaagtgaagaagtgagaagtttgtctattcatccacaccaaaatttattatccagtgaacaattgagttgggctcttgaaaccgctttcgttgatattgtcaacttggtaagtgttgaagttaacaaagccacagataataattactacgctagtgcgttgaaatacatctctggctttggaaaacgtaaagctattgatttcttacagtcccttcaaaggttgaatgaaccattattagctcgtcaacaattaattactcataacattcttcacaagactatttttatgaattccgcgggattcctctatatcagttggaatgaaaaaagacaaaaatacgaagatttggaacatgatcaattggatagcactagaattcatccagaagactaccatttggccaccaaggttgccgctgatgctttagaatacgatcctgatactattgccgaaaaagaagaacaggggactatgagtgaattcattgaattattgagagaagatcctgaccgtagagctaaattagaatctttgaatttggaatcttacgcagaagaacttgagaagaataccggattaagaaaacttaataatttgaatacaattgtccttgaattgttggatggatttgaagaattgagaaatgactttcatcctttgcaaggtgatgaaattttccaaagtttgactggtgagtctgaaaagacgtttttcaagggtagtattattccagtcagagtagaaagattctggcacaacgatataatttgcactacaaactctgaagttgaatgtgtagtaaatgctcaacgtcacgcaggtgcacaattaagaagacctgcaaatgaaatatacgaaattggtaaaacatatccagcaaaggtgatatatattgactatgctaatattactgcagaagtttccttattagatcatgatgtcaaacagcaatatgttccaataagctacagtaaagatccttccatttgggacttgaaacaagaattggaagatgccgaagaggagaggaaattgatgatggcagaagcccgtgcaaagagaacacatcgtgttatcaatcatccttactatttccctttcaacggcagacaggctgaggattacttaaggagtaaagaacgtggtgaattcgtgatcagacagtctagcagaggtgatgaccacttggttatcacctggaaattggataaggatttgtttcaacatattgatatccaagaattagaaaaagaaaatcctttggctttaggtaaagtcttgattgtcgacaatcagaaatacaatgatttagaccagatcattgtagaatatcttcaaaacaaggtaaggctcttgaatgaaatgacatctagtgaaaaattcaaaagcggtactaagaaagatgtggtcaagtttattgaagactactctagagtgaatccaaataagtctgtgtactatttcagtttgaaccacgataaccctggttggttttacttgatgttcaagattaacgcaaatagcaaattatacacatggaatgtgaaattaacgaacactggttatttcttagtaaactacaattatccaagtgttatccagctttgtaatggttttaagacgcttttgaaatctaacagtagtaagaatagaatgaacaactaccgttga

SEQ ID NO: 4373 - DNA, 1431 bp, Saccharomyces cerevisiae
atggctgacaattctacttccagattttatactaatctattgatagctaattatctcaaacataacggtctggaagatacattagctgcattcataagggagacagcgttacctctttctgccttagaaaagtccgatagttcaaatagtaatgtcggtgagataccgctagaagacttgcagagtgtcgttgaagataggatttactacaaaagacggtctttcaaagataggtttaaaactctttcaataaacgatgatttagccccaattgacaatgctaagtatggaattcaaccttggaaccatagtttgaaatttagtattgatgtaaaattgaacaaatccttacccaaagataccttgttcattagcgcaacttttacagaagatagcaaatatatattactttcgtcagctactggatacctagtaatctacgacattgagaaagcgacgtcgaagtcatttaaaattaatgaaaaagtcaagagcatcgtcaagctgtacggacccattggtagctccggttaccaatatgtatgtccaatgaacggaagtttttacttgctaaataacgattttgaactggtgaacaacgcagtatggaaaattcatgccagaatgattacgcatataaagatctgcaatgttacggaatcatcttggtttgttattactagtggaatggataacttcctgcgattgagtttgttggagataaaaaacgggaacactttcctcacaaaactctccgaaataaagttggcttccaattgtacgtcgttgaatgtaatcgccaacggtgacggcaatggtcagaatagtttctctgtgtttcttaccagagcagaatacactcatatagcatgttactcaattatagatgccaaaaatcttgtccattcatacaatattgccttaaacaatgcggaatttagcacgtacgctttcaacattcgagacgtaatggcagtagattatgttcattccaatactaaggatacgataggattatcacccagtaccatgctagttgtagccacgtcacataaaccatacatgagattgattttagtagaaatacctatgaatacaggccatccaaaggcaatgaaattggataaagttcagacttactacgataaaatcttacgaaattttgcgacagaaatatatcaagatgatttctcattaccaattctcggcaaattagaatcttctaatggtgtattggtaggaaatgatgaaggtatttacagtgttgatttgatgactggtgattcgagaattttaaatattcctggtgaggcaaactccttgcacgacaggataaagtgtatggatatcagtaaggaccaaatgagaatggtcgctggaacgtctactaagtcaatttacatcctaaatgtaatcagaaatgcacagtaa

SEQ ID NO: 4374 - DNA, 1431 bp, Artificial Sequence
  Description of Artificial Sequence: Synthetic polynucleotide
atggctgacaattctacttccagattttatactaatttattgatagctaattatctcaaacataacggtttggaagatacattagctgcattcataagggagacagcgttacctctttctgccttagaaaagtccgatagtagtaatagtaatgtcggtgagataccgttggaagacttgcagagtgtcgttgaagataggatttactacaaaagaagatctttcaaagataggtttaaaactctttccataaacgatgatttagccccaattgacaatgctaagtatggaattcaaccttggaaccatagtttgaaatttagtattgatgtaaaattgaacaaatccttacccaaagataccttgttcattagcgcaacttttacagaagatagcaaatatatattactttcttctgctactggatacttggtaatctacgacattgagaaagcgacgtccaagagctttaaaattaatgaaaaagtcaagagcatcgtcaagttgtacggacccattggtagctccggttaccaatatgtatgtccaatgaacggaagtttttacttgttgaataacgattttgaattagtgaacaacgcagtatggaaaattcatgccagaatgattacgcatataaagatctgcaatgttacggaaagctcttggtttgttattactagtggaatggataacttcttaagattgagtttgttggagataaaaaacgggaacactttcctcacaaaactctccgaaataaagttggcttccaattgtacgtctttgaatgtaatcgccaacggtgacggcaatggtcagaatagtttctctgtgtttcttaccagagcagaatacactcatatagcatgttactctattatagatgccaaaaatcttgtccattcttacaatattgccttaaacaatgcggaatttagcacgtacgctttcaacattagagacgtaatggcagtagattatgttcattccaatactaaggatacgataggattatctcccagtaccatgcttgttgtagccacgagtcataaaccatacatgagattgattttagtagaaatacctatgaatacaggccatccaaaggcaatgaaattggataaagttcagacttactacgataaaatcttaagaaattttgcgacagaaatatatcaagatgatttctctttaccaattctcggcaaattagaatcttctaatggtgtattggtaggaaatgatgaaggtatttacagtgttgatttgatgactggtgattccagaattttaaatattcctggtgaggcaaactccttgcacgacaggataaagtgtatggatatcagtaaggaccaaatgagaatggtcgctggaacgtctactaagtctatttacatcttgaatgtaatcagaaatgcacagtga

SEQ ID NO: 4375 - DNA, 438 bp, Saccharomyces cerevisiae
atgggtaaaggtaagccaagaggtttgaactctgctagaaagctacgtgtccacagaagaaacaaccgttgggccgaaaacaactacaagaagagattgttgggtactgccttcaagtcttctccattcggtggttcttctcatgccaagggtatcgtcttggaaaaattgggtatcgaatccaagcaacctaactctgctatcagaaagtgtgttagagttcaattaatcaagaacggtaagaaggtcactgctttcgttccaaacgatggttgtttgaactttgtcgacgaaaatgatgaagtcttgctagcaggtttcggtagaaagggtaaagctaagggtgatattccaggtgttagattcaaggtcgttaaggtctctggtgtctccttgttggctttgtggaaagaaaagaaggaaaagccaagatcataa

SEQ ID NO: 4376 - DNA, 438 bp, Artificial Sequence
  Description of Artificial Sequence: Synthetic polynucleotide
atgggtaaaggtaagccaagaggtttgaactctgctagaaagttgcgtgtccacagaagaaacaaccgttgggccgaaaacaactacaagaagagattgttgggtactgccttcaagtcttctccattcggtggttcttctcatgccaagggtatcgtcttggaaaaattgggtatcgaatccaagcaacctaactctgctatcagaaagtgtgttagagttcaattaatcaagaacggtaagaaggtcactgctttcgttccaaacgatggttgtttgaactttgtcgacgaaaatgatgaagtcttgttggcaggtttcggtagaaagggtaaagctaagggtgatattccaggtgttagattcaaggtcgttaaggtctctggtgtctccttgttggctttgtggaaagaaaagaaggaaaagccaagatcttga

SEQ ID NO: 4377 - DNA, 1626 bp, Saccharomyces cerevisiae
atgtttggtttcagcggtagtaataacgggttcggaaataaaccagctggttcgaccggtttttcatttggacaaaacaataacaatacaaatactcaaccttcggcttcaggatttggttttgggggcagccagccaaattctgggacggctactaccggagggtttggtgcaaatcaggccacaaatacttttggaagtaaccaacaaagtagtacaggtggaggccttttcggtaataagcctgctcttggcagcctaggaagttcaagcactaccgcttcaggaactacagctactggaacaggtttatttgggcaacaaacagcacaacctcaacaatccaccattggaggtgggttatttggaaacaagccaactaccacaacgggaggtcttttcggcaacagtgcacaaaacaatagtaccacaagtgggggtttatttggtaataaagtaggatccactggctcactgatgggcggcaatagcactcaaaacacatctaacatgaatgcaggcggactttttggtgcaaagcctcagaatactacagcgactacgggaggcctatttggcagtaagccacaaggatcaacaactaatggtggcctgtttggaagcggcacccagaataacaatacccttgggggaggtggcctttttggccaatcccagcagcctcaaacaaacactgcgcccggacttggaaacacggtatccacacaaccatcatttgcttggtctaagccttcaactggatctaatttacagcagcagcagcagcagcaaattcaagtaccgttgcaacaaacgcaagcaattgctcaacaacagcagctgtctaattatccgcagcaaattcaagaacaggtgttgaaatgtaaagaatcgtgggatccaaacacaacgaaaacaaaactcagggctttcgtgtacaataaagtgaacgaaacggaagccattttatatacaaaaccaggacatgtacttcaagaagagtgggatcaggcaatggaaaagaaaccttcccctcagacaattcccattcaaatatatggatttgagggtttgaatcaacgtaatcaagtacagactgaaaatgtagcccaagctagaataattttgaaccatattttagagaaatccacacaattgcaacaaaagcatgaattggacactgcgtccagaattttgaaggcacaatcaaggaatgttgaaattgaaaaaagaatcttaaaattgggcacacaattggcaaccctgaaaaatagaggactgccattgggtattgcagaagagaaaatgtggtcgcaattccaaactttactacagcggagcgaagatcctgcaggtttaggtaagactaacgaactttgggcacgtttggctatcttaaaagaacgtgctaaaaacatttctagtcaattagatagtaaattaatggttttcaacgacgatacaaaaaaccaagacagcatgtccaaaggcaccggtgaagaatctaatgatcgtattaataagatagtggaaattctgacgaatcaacaacgcggtataacatatttaaatgaggttttagagaaagatgctgcaattgtaaaaaaatataaaaataaaacgtaa

SEQ ID NO: 4378 - DNA, 1626 bp, Artificial Sequence
  Description of Artificial Sequence: Synthetic polynucleotide
atgtttggtttcagcggtagtaataacgggttcggaaataaaccagctggttctaccggtttttcttttggacaaaacaataacaatacaaatactcaaccttctgcttctggatttggttttgggggcagccagccaaattctgggacggctactaccggagggtttggtgcaaatcaggccacaaatacttttggaagtaaccaacaaagtagtacaggtggaggccttttcggtaataagcctgctcttggcagcttgggaagtagtagcactaccgcttctggaactacagctactggaacaggtttatttgggcaacaaacagcacaacctcaacaatccaccattggaggtgggttatttggaaacaagccaactaccacaacgggaggtcttttcggcaacagtgcacaaaacaatagtaccacaagtgggggtttatttggtaataaagtaggatccactggctctttgatgggcggcaatagcactcaaaacacatctaacatgaatgcaggcggactttttggtgcaaagcctcagaatactacagcgactacgggaggcttatttggcagtaagccacaaggaagtacaactaatggtggcttatttggaagcggcacccagaataacaatacccttgggggaggtggcctttttggccaatcccagcagcctcaaacaaacactgcgcccggacttggaaacacggtatccacacaaccatcttttgcttggtctaagccttccactggatctaatttacagcagcagcagcagcagcaaattcaagtaccgttgcaacaaacgcaagcaattgctcaacaacagcagctttctaattatccgcagcaaattcaagaacaggtgttgaaatgtaaagaaagttgggatccaaacacaacgaaaacaaaactcagggctttcgtgtacaataaagtgaacgaaacggaagccattttatatacaaaaccaggacatgtacttcaagaagagtgggatcaggcaatggaaaagaaaccttcccctcagacaattcccattcaaatatatggatttgagggtttgaatcaacgtaatcaagtacagactgaaaatgtagcccaagctagaataattttgaaccatattttagagaaatccacacaattgcaacaaaagcatgaattggacactgcgtccagaattttgaaggcacaatccaggaatgttgaaattgaaaaaagaatcttaaaattgggcacacaattggcaaccttgaaaaatagaggattaccattgggtattgcagaagagaaaatgtggtctcaattccaaactttattgcagagaagcgaagatcctgcaggtttaggtaagactaacgaactttgggcacgtttggctatcttaaaagaacgtgctaaaaacatttctagtcaattagatagtaaattaatggttttcaacgacgatacaaaaaaccaagacagcatgtccaaaggcaccggtgaagaatctaatgatcgtattaataagatagtggaaattttaacgaatcaacaacgcggtataacatatttaaatgaggttttagagaaagatgctgcaattgtaaaaaaatataaaaataaaacgtga

SEQ ID NO: 4379 - DNA, 789 bp, Saccharomyces cerevisiae
atggactttttgaatgatgatgaactagacttagatttaccggtaaccgcagaaatatcgaaagagttattcgcaacagaaatagagaagtatcgtgaatccgagactaatgggaccgatgttgataactttgatgtcgacagattcctagtgcagaaaaatttccattaccttcctctcgattcccttattagagatttgtctggactttcacaaaaaatggtacaaacattattagaacaaataagaagtaactacgacgactatctgactttttccaatacctatacagatgaagaaaatgaaactctaataaatttagagaaaacacaaagtgatcttcaaaaatttatgactcaattagatcatttgataaaggatgacatcagcaatacacaagaaattataaaggatgtcctggaatacctaaagaagttagatgagatttacggctctctgcgtaaccattcacaattgacagaagcgctctcacttggaaagagattgagtaaatctctccatgaaatgtgcggtatagaaccattagaagaagaaatttgctctggcctgattgagcagttgtataagttgattacggcatctcgtcgaatattggagtcttgtgctgattccaattcaccatatattcatcatctgcgcaatgactatcaagaccttctgcaagaatttcaaatctcactgaaaatcttgaccgaaaagtgtcttgaaaacccatcaagcctgcaaaacctatctttgacattagtctccattataaaaacggcatag

SEQ ID NO: 4380 - DNA, 789 bp, Artificial Sequence
  Description of Artificial Sequence: Synthetic polynucleotide
atggactttttgaatgatgatgaattagacttagatttaccggtaaccgcagaaatatccaaagagttattcgcaacagaaatagagaagtatcgtgaatccgagactaatgggaccgatgttgataactttgatgtcgacagattcttggtgcagaaaaatttccattaccttcctctcgattcccttattagagatttgtctggactttctcaaaaaatggtacaaacattattagaacaaataagaagtaactacgacgactatttgactttttccaatacctatacagatgaagaaaatgaaactttgataaatttagagaaaacacaaagtgatcttcaaaaatttatgactcaattagatcatttgataaaggatgacatcagcaatacacaagaaattataaaggatgtcttggaatacttgaagaagttagatgagatttacggctctttacgtaaccattctcaattgacagaagcgctctcccttggaaagagattgagtaaatctctccatgaaatgtgcggtatagaaccattagaagaagaaatttgctctggcttaattgagcagttgtataagttgattacggcatctcgtagaatattggagtcttgtgctgattccaattctccatatattcatcatttacgcaatgactatcaagaccttttacaagaatttcaaatctctttgaaaatcttgaccgaaaagtgtcttgaaaacccatccagcttacaaaacttatctttgacattagtctccattataaaaacggcatga

SEQ ID NO: 4381 - DNA, 1479 bp, Saccharomyces cerevisiae
atggagagtcgaactacagggcctttaacgactgaaacctacgatggccccactgtggccttcatgatattaggtgccgccctagtattttttatggtgcccggattgggattcttgtactccggattggcaagaaggaagtctgcactagcactaatctgggttgtattaatggcgactttggtcggtatactgcaatggtatttctggggttactctctagctttttcaaagtccgctccgaataataaattcattgggaatctagattcgtttggctttagaaacgtgtacggaaaaaaattcgatgaagatgcctaccctgagctcgcgtatgcaaccttccaaatgatgttttcgtgcgtcaacttaagtattatcgctggcgccactgccgaaagaggcaggctgctaccgcacatggtttttctctttattctagctaccattggatattgtccagtgacgtattggatttggtcaccaggtggttgggcataccaatggggagtcctcgattgggcaggcggcggcaacattgaaatattaagcgctgtttccgggtttgtttactcttggtttttgggcaaaagaaatgaaaagttactgataaatttcaggcctcataatgtttcattggtcactctaggcacatccatactgtggtttggctggctgctatttaattctgcatcctcattatccccaaatttgaggtcagtttatgcattcatgaatacatgtctcagtgccattactggtgggatgacgtggtgtcttctggattacagatcggagaagaaatggtcgacagttggtctgtgctccggtatcatttctgggctggtggctgcaacgccaagctcaggctgtataaccctttacggttcacttattcaaggcattgtggcgggggtagtgtgtaactttgcgacgaagttgaaatactacgctaaagtagatgatgccatggacattctagctgagcacggggttgcaggcgtaataggactaattttcaatgccctttttggagcagactgggtcattggtatggatggcactacagagcacgagggcggctgggtaactcacaattacaagcaaatgtataagcagatcgcttacattgccgcatccattgggtacactgctgctgtaactgcaataatctgctttgtgctcggctacatacccggtatgaggctaagaatatcagaagaggcagaggaggcgggtatggacgaagatcaaattggcgaatttgcgtacgattatgtggaagtgagaagagattactatctatggggtgtagacgaagattcacaacgctctgatgtaaatcaccgggtgaacaacgctcatttggccgctgaacgtagcagtagcggtactaatagttcctcggatgggaatggagaaatgattcaatccgaaaagatcctaccaattcatcaagaagatcctgccaataggtaa

SEQ ID NO: 4382 - DNA, 1479 bp, Artificial Sequence
  Description of Artificial Sequence: Synthetic polynucleotide
atggagagtagaactacagggcctttaacgactgaaacctacgatggccccactgtggccttcatgatattaggtgccgccttggtattttttatggtgcccggattgggattcttgtactccggattggcaagaaggaagtctgcattggcattaatctgggttgtattaatggcgactttggtcggtatattgcaatggtatttctggggttactctttggctttttccaagtccgctccgaataataaattcattgggaatttggattcttttggctttagaaacgtgtacggaaaaaaattcgatgaagatgcctaccctgagctcgcgtatgcaaccttccaaatgatgttttcttgcgtcaacttaagtattatcgctggcgccactgccgaaagaggcaggcttttgccgcacatggtttttctctttattttggctaccattggatattgtccagtgacgtattggatttggtctccaggtggttgggcataccaatggggagtcctcgattgggcaggcggcggcaacattgaaatattaagcgctgtttccgggtttgtttactcttggtttttgggcaaaagaaatgaaaagttattgataaatttcaggcctcataatgtttctttggtcactttgggcacatccatattatggtttggctggttgttatttaattctgcatcctctttatccccaaatttgaggtctgtttatgcattcatgaatacatgtctcagtgccattactggtgggatgacgtggtgtcttttagattacagaagtgagaagaaatggtctacagttggtctttgctccggtatcatttctgggttagtggctgcaacgccaagcagtggctgtataaccctttacggttctcttattcaaggcattgtggcgggggtagtgtgtaactttgcgacgaagttgaaatactacgctaaagtagatgatgccatggacattttggctgagcacggggttgcaggcgtaataggattgattttcaatgccctttttggagcagactgggtcattggtatggatggcactacagagcacgagggcggctgggtaactcacaattacaagcaaatgtataagcagatcgcttacattgccgcatccattgggtacactgctgctgtaactgcaataatctgctttgtgctcggctacatacccggtatgaggttaagaatatctgaagaggcagaggaggcgggtatggacgaagatcaaattggcgaatttgcgtacgattatgtggaagtgagaagagattactatttatggggtgtagacgaagattctcaacgctctgatgtaaatcacagagtgaacaacgctcatttggccgctgaacgtagcagtagcggtactaatagttccagtgatgggaatggagaaatgattcaatccgaaaagatcttgccaattcatcaagaagatcctgccaataggtga

SEQ ID NO: 4383 - DNA, 216 bp, Saccharomyces cerevisiae
atgtcaagacacaagtacaagttatggatgtgcatcgcaaagggaaaaaggggagtgggggaaagaaatacgtttgtccctaagtgctcttatgctcccttttgtgcttcagaggttcttgatcaattattaagaggggataactctatcgtatataacttttatcttaaaaatggttcaggtagtgtttatataggctcagtctttcttatctga

SEQ ID NO: 4384 - DNA, 216 bp, Artificial Sequence
  Description of Artificial Sequence: Synthetic polynucleotide
atgagtagacacaagtacaagttatggatgtgcatcgcaaagggaaaaaggggagtgggggaaagaaatacgtttgtccctaagtgctcttatgctcccttttgtgcttctgaggttcttgatcaattattaagaggggataactctatcgtatataacttttatcttaaaaatggttctggtagtgtttatataggctctgtctttcttatctga

SEQ ID NO: 4385 - DNA, 1209 bp, Saccharomyces cerevisiae
atgcgtgagaatgcaatgtctacaaagaaacttccctataaattatctggcagcagcaaaataacaacttccatacctaatgatttaatcatactgcgaaataattgcataaattcactgaacagttcctcgtccaaagctgacagcattacatgtatagatacgtggctaaaatacacagagggtttgttaacccacaggtacgaagctaataatgacgccgctctcattgaagaggagatagcgattgcgttaatcaatgttgccgtattttatcaagacatcggtattgaaacattgtacagagcttatgaatcttcacaagcgtcaaataacttatggacaacaagcgggacctatctaaagagaggtctaggcttaatctgctttcttggaaagaattttcaaataaacacagctaatgattgccaaaagatgcaggttctcaacgtccttaatcagctatcattagagtttcaattgctgcaacaactagggattgtcgttttagcactgtctaaactaagatcaaaaatcagcaaggatgctgttgcggaccttgagcctcaagaattggaagagctaggcaagtccagtgtcttttacgctaagctttgtattggatcttatagcactgcttcgcaatgccaaggaggccgtatagtggacgcattatttatgaattatttacagagtttgacctatctcttcctatcaatcaaccaatacaacaatgatgagtgcggaattgccattgggatgctccaagaatcgatcaaaaaactgttaaatatagtacccaattcgcaactaaaagagttggacattttatcctcaaccgatattacaaagaagagggatcttataaagatgtcgtttaaaaggaaaatacatgggtctactttaaaaaaccaacggatatttgagaagaaggtgccattttcatccaaagcgtacatgatgccgttattgaaatcttcattagacgattttgttatcccactaacgatactgttaaggtacagataccagacaaccaatgagaattattccttcaaaacggttgaaaccgacgtttctaaattgaaggagcttttccccaggggaaaatcgtcagatattgaaggcactgtatggagtttccaagatggacatcttacatttgcagactcaaataatgcaacccacaattgcggtaattatttttga

SEQ ID NO: 4386 - DNA, 1209 bp, Artificial Sequence
  Description of Artificial Sequence: Synthetic polynucleotide
atgcgtgagaatgcaatgtctacaaagaaacttccctataaattatctggcagcagcaaaataacaacttccatacctaatgatttaatcatattaagaaataattgcataaattctttgaacagttcctcctccaaagctgacagcattacatgtatagatacgtggttgaaatacacagagggtttgttaacccacaggtacgaagctaataatgacgccgctctcattgaagaggagatagcgattgcgttaatcaatgttgccgtattttatcaagacatcggtattgaaacattgtacagagcttatgaatcttctcaagcgtctaataacttatggacaacaagcgggacctatttgaagagaggtcttggcttaatctgctttcttggaaagaattttcaaataaacacagctaatgattgccaaaagatgcaggttctcaacgtccttaatcagttatctttagagtttcaattgttgcaacaattagggattgtcgttttagcattatctaaattgagaagtaaaatcagcaaggatgctgttgcggaccttgagcctcaagaattggaagagttgggcaagtccagtgtcttttacgctaagctttgtattggatcttatagcactgcttctcaatgccaaggaggccgtatagtggacgcattatttatgaattatttacagagtttgacctatctcttcttatctatcaaccaatacaacaatgatgagtgcggaattgccattgggatgctccaagaaagtatcaaaaaattattaaatatagtacccaattctcaattgaaagagttggacattttatcctccaccgatattacaaagaagagggatcttataaagatgagttttaaaaggaaaatacatgggtctactttaaaaaaccaaagaatatttgagaagaaggtgccattttcttccaaagcgtacatgatgccgttattgaaatcttctttagacgattttgttatcccattaacgatattattaaggtacagataccagacaaccaatgagaattattccttcaaaacggttgaaaccgacgtttctaaattgaaggagcttttccccaggggaaaatcttctgatattgaaggcactgtatggagtttccaagatggacatcttacatttgcagactctaataatgcaacccacaattgcggtaattatttttga

SEQ ID NO: 4387 - DNA, 1542 bp, Saccharomyces cerevisiae
atgtcaacacccacagcagcagatcgcgcgaaggcacttgaaagaaagaacgaaggaaatgtttttgtgaaggaaaaacattttttaaaggccattgaaaaatatacagaggcgatcgatttagattctacacagtctatctatttttcgaacagagcatttgctcactttaaggtagataactttcaaagcgctttaaatgactgtgatgaagccattaaactggatcccaaaaatatcaaagcttatcatagacgtgcattatcctgcatggctctgctagaatttaaaaaggctaggaaagatttgaatgtgcttctaaaggcgaagcccaatgatccggctgctactaaggcgttacttacatgtgataggttcattagagaagaaagatttaggaaagctatcggaggcgcagaaaatgaagccaagatcagtttgtgtcagactttgaacttgagttcatttgatgctaatgcagatttagccaattatgaaggtccaaagttagaatttgaacagctgtatgacgataagaatgcctttaaaggtgcaaagatcaagaacatgtctcaagagtttatttccaaaatggttaacgatcttttcctaaagggaaaatatttaccaaaaaagtacgttgcagctattatctctcatgctgataccttatttcgtcaagagccatctatggtagaactagaaaataactctactcctgatgttaagatatcagtatgtggtgatacgcatggccaattttatgatgttttgaatttatttcgcaagtttggtaaagtaggtcctaagcacacttatctattcaatggtgattttgtcgaccgtggttcttggtcgtgtgaagttgcactattattctactgtttgaaaatattacatccaaataatttctttttgaacagaggtaatcatgagagtgataatatgaacaaaatctatgggtttgaagatgagtgtaaatacaaatattcacaaaggatatttaacatgtttgcacaaagttttgagagccttccattggctaccttaattaataatgattaccttgtaatgcatggtggtttaccaagtgatccttcagcaactttgtctgatttcaagaatattgatagatttgcccaaccacctagagatggcgcctttatggaacttctatgggcggacccacaagaagccaacgggatgggtccttctcagcgtggtttaggacatgcttttggacccgacattacagatagatttctaagaaacaacaaattgcgcaagatttttagatctcacgagttaagaatgggtggtgtgcaattcgagcagaagggtaaattaatgacagttttcagtgctccaaactattgtgatagccaaggtaatcttgggggtgttattcatgttgtaccaggccatggtattttacaggctggcaggaatgacgaccaaaatctaataattgagacattcgaagctgttgagcacccagatataaaaccaatggcctattctaatggtggttttggtttatag

SEQ ID NO: 4388 - DNA, 1542 bp, Artificial Sequence
  Description of Artificial Sequence: Synthetic polynucleotide
atgtctacacccacagcagcagatcgcgcgaaggcacttgaaagaaagaacgaaggaaatgtttttgtgaaggaaaaacattttttaaaggccattgaaaaatatacagaggcgatcgatttagattctacacagtctatctatttttccaacagagcatttgctcactttaaggtagataactttcaaagcgctttaaatgactgtgatgaagccattaaattggatcccaaaaatatcaaagcttatcatagacgtgcattatcctgcatggctttgttggaatttaaaaaggctaggaaagatttgaatgtgcttttgaaggcgaagcccaatgatccggctgctactaaggcgttacttacatgtgataggttcattagagaagaaagatttaggaaagctatcggaggcgcagaaaatgaagccaagatcagtttgtgtcagactttgaacttgagttcttttgatgctaatgcagatttagccaattatgaaggtccaaagttagaatttgaacagttatatgacgataagaatgcctttaaaggtgcaaagatcaagaacatgtctcaagagtttatttccaaaatggttaacgatcttttcttgaagggaaaatatttaccaaaaaagtacgttgcagctattatctctcatgctgataccttatttcgtcaagagccatctatggtagaattggaaaataactctactcctgatgttaagatatctgtatgtggtgatacgcatggccaattttatgatgttttgaatttatttcgcaagtttggtaaagtaggtcctaagcacacttatcttttcaatggtgattttgtcgaccgtggttcttggtcttgtgaagttgcattattattctactgtttgaaaatattacatccaaataatttctttttgaacagaggtaatcatgagagtgataatatgaacaaaatctatgggtttgaagatgagtgtaaatacaaatattctcaaaggatatttaacatgtttgcacaaagttttgagagccttccattggctaccttaattaataatgattaccttgtaatgcatggtggtttaccaagtgatccttctgcaactttgtctgatttcaagaatattgatagatttgcccaaccacctagagatggcgcctttatggaacttttatgggcggacccacaagaagccaacgggatgggtccttctcagcgtggtttaggacatgcttttggacccgacattacagatagatttttaagaaacaacaaattgcgcaagatttttagatctcacgagttaagaatgggtggtgtgcaattcgagcagaagggtaaattaatgacagttttcagtgctccaaactattgtgatagccaaggtaatcttgggggtgttattcatgttgtaccaggccatggtattttacaggctggcaggaatgacgaccaaaatttgataattgagacattcgaagctgttgagcacccagatataaaaccaatggcctattctaatggtggttttggtttatga

SEQ ID NO: 4389 - DNA, 1719 bp, Saccharomyces cerevisiae
atgtgtggtatctttgcagccttcaagcatgaagatattcacaacttcaaaccaaaagctctacaactatctaaaaaaatcagacaccgtggcccagattggtcaggaaatgccgttatgaattccaccattttcgttcacgagaggttggctattgttggtttagactccggtgcccagccaatcacttcagctgatggcgaatatatgcttggcgttaatggtgagatctacaaccacatccaactaagggagatgtgctctgattacaagtttcaaactttcagtgactgtgaacccatcataccgttatatttggaacatgatatcgatgctccaaaatatctggacggtatgttcgcattttgtctgtatgattccaagaaagaccgtattgtcgctgcaagagaccctatcggtgttgtcactttatacatggggcgttcttctcagtctccagagaccgtttattttgcctccgaattaaaatgtctaactgacgtttgtgacagtatcatttcgttccctcctggtcatgtctacgattctgaaacggacaagattactcgttactttaccccagactggttggatgaaaagcgtatcccatccaccccagttgactaccatgctatcagacacagtttagaaaaggccgttagaaagaggctaatggctgaagttccatacggtgttcttctatccggtgggctggactcttctttgattgctgcgattgctgctcgtgaaacggaaaaagctaatgctgatgctaacgaagacaacaatgttgacgagaagcaacttgcaggtatcgatgaccaaggccatctacacacatccggttggtctcgtttgcattcgtttgcgattggtctaccaaatgcacctgatttacaagcggctagaaaagtcgccaaattcattggttctatccaccatgaacacacttttacattacaagaaggtttggatgctttggacgacgtgatctaccatttggaaacttacgacgttaccactatcagagcttctacaccaatgttcttactatctagaaagattaaggcccaaggtgtcaaaatggttctttctggtgaaggctcggacgaaatattcggtggctatctatatttcgcacaagcaccttctgctgcagaatttcacaccgaatctgtgcaacgtgtcaagaacttgcatttggcagattgtttgagagctaataagtccacgatggcttggggtctagaagctcgtgttcccttcttagacaaagactttttgcagctatgtatgaacattgatccaaatgaaaagatgatcaagccaaaggaaggacgtatcgaaaaatacattttaagaaaggcattcgacactacagatgaaccagatgttaagccatacctacctgaagaaatcttatggagacaaaaggaacaattttccgatggtgttggctactcatggattgacggcctaagagacactgctgaaagggccatttctgacgccatgtttgccaatccaaaggctgattggggcgacgatattccaaccaccaaagaagcttactggtacaggctgaagtttgatgcttggtttcctcaaaagactgcggcagacactgtcatgagatggattccaaaggccgattggggttgtgccgaagatccttcaggtagatacgccaaaatacacgaaaagcacgtcagtgcttaa

SEQ ID NO: 4390 - DNA, 1719 bp, Artificial Sequence
  Description of Artificial Sequence: Synthetic polynucleotide
atgtgtggtatctttgcagccttcaagcatgaagatattcacaacttcaaaccaaaagctttacaattatctaaaaaaatcagacaccgtggcccagattggtctggaaatgccgttatgaattccaccattttcgttcacgagaggttggctattgttggtttagactccggtgcccagccaatcactagtgctgatggcgaatatatgcttggcgttaatggtgagatctacaaccacatccaattaagggagatgtgctctgattacaagtttcaaactttcagtgactgtgaacccatcataccgttatatttggaacatgatatcgatgctccaaaatatttggacggtatgttcgcattttgtttgtatgattccaagaaagaccgtattgtcgctgcaagagaccctatcggtgttgtcactttatacatggggcgttcttctcagtctccagagaccgtttattttgcctccgaattaaaatgtttaactgacgtttgtgacagtatcatttctttccctcctggtcatgtctacgattctgaaacggacaagattactcgttactttaccccagactggttggatgaaaagcgtatcccatccaccccagttgactaccatgctatcagacacagtttagaaaaggccgttagaaagaggttgatggctgaagttccatacggtgttcttctttccggtgggttggactcttctttgattgctgcgattgctgctcgtgaaacggaaaaagctaatgctgatgctaacgaagacaacaatgttgacgagaagcaacttgcaggtatcgatgaccaaggccatttgcacacatccggttggtctcgtttgcattcttttgcgattggtttgccaaatgcacctgatttacaagcggctagaaaagtcgccaaattcattggttctatccaccatgaacacacttttacattacaagaaggtttggatgctttggacgacgtgatctaccatttggaaacttacgacgttaccactatcagagcttctacaccaatgttcttattatctagaaagattaaggcccaaggtgtcaaaatggttctttctggtgaaggctctgacgaaatattcggtggctatttgtatttcgcacaagcaccttctgctgcagaatttcacaccgaatctgtgcaacgtgtcaagaacttgcatttggcagattgtttgagagctaataagtccacgatggcttggggtttggaagctcgtgttcccttcttagacaaagactttttgcagttgtgtatgaacattgatccaaatgaaaagatgatcaagccaaaggaaggacgtatcgaaaaatacattttaagaaaggcattcgacactacagatgaaccagatgttaagccatacttacctgaagaaatcttatggagacaaaaggaacaattttccgatggtgttggctactcttggattgacggcttaagagacactgctgaaagggccatttctgacgccatgtttgccaatccaaaggctgattggggcgacgatattccaaccaccaaagaagcttactggtacaggttaaagtttgatgcttggtttcctcaaaagactgcggcagacactgtcatgagatggattccaaaggccgattggggttgtgccgaagatccttctggtagatacgccaaaatacacgaaaagcacgtcagtgcttga

SEQ ID NO: 4391 - DNA, 3111 bp, Saccharomyces cerevisiae
atgggaaggactattaggagacgccggagtaattcgtcgctttcggaggccatatcagtttctttaggaataaatcaagactcatctgtgaacaagatgcatagagcgagtgttagcgcaatgtctcctccattatgccgttcatacatgagcggattttttactggtggaaactcacctatgatcaataatttgtcggattcaaaacttcccatctcgaacaaacaacatcctaaagtgatacatggatcagaaaatttgcataggcagacagctcaactatccaatgaattttgctcctcttctgtggaagaaaattctcccacaattaaggattacatggacattataggcaatggtgatagaaaagatgatcaatctatgcgtactatagaagagaatattgatgaagaatattcagatgagtactccagattgctacttagcccagcatcgtctaacgtggacgatgaccgaaatcgaggactacagaatagttcactaccggaattagaagatggttacgcgggcggatatcagtcacttcgtccctcccataatttaaggtttaggccaagaaacttgtggcatatgtgtacgtcatttccttccaaatttgcacattatctgcccgcagcagtgttaggtttgcttttgaacattttagatgccttatcttatggtatgatcatttttccaatcacagagccagttttttctcatttagggcccactggtatatccatgttttatatttccaccataatatcacaagccgtgtactccggaggctggtcgagttttccttccgggattgggagtgaaatgattgaaattactccgttttatcatacaatggcattagctataaaagaggcattagcaggtaatgatgacgaaatcataacgacaacgatattttgttatgtgataagttcgatgctcacaggtgtcgttttctatgcattgggtaaactacgactaggaaagatagtgggattttttccacgacacatattgattggctgtattggaggtgttggttatttcttgataattacaggaattgaagtcacaacgagggtggcgaaatttgaatattcatggccttttttttcagggctgtttacggattatgacacattagcgaaatggttattacctgtactattgactgtagttttaatcggcactcaacgctactttaagaactcactcgttttgccaagtttttacatcttgacgttagttttgtttcattttattgttgcgatcattccaacattatccttggatgctttgagacaagctggatggatttttcctattgccaactcagatagtaaatggtatgaccattatagattatttaatgtccataaagttcattggtcactagttttgcaacaaataccaacgatgatggcattgacattttttggtatcctacatgttcctataaatgttcctgcgttggctatgtcactacaaatggataagtatgatgttgacagagaattgattgcacatggttattccaacttttttagtggattattaggttctgtccaaaattacttggtatataccaacagtgttctgtttattagggcgggcgctgattcgccattcgctgggttccttttaatagctttgactatctgtattatgatcattggaccagtcataatatcattcattccaatctgtatagtgggctctctaattttcctactaggctacgagttattagtggaagcgttggtcgatacatggaataaattgaatagattcgaatatttgactgttgtcattattgttttcacgatgggtatctttgattttgtcctaggtatcatcgttggcattttaattgcatgtttttcgtttttggtggatagtacgaaattacaaaccattaacggtgaatataatgggaacgtcgcaagaagtacagtatatcgtgattacgttcaaacaaaatttttggatggaattggtgaacaaatatatgttttaaagctccaaaaccttctgtttttcggaacaatcatatctattgaagagaaaattgaaagattgctgcaaataagtaacaaagatgcaacaaaacgcagaataaagtatttaatattggactttaaaaatattaatgccgacaatattgactattctgcggcagaaggtttcaatagaattaaaagattcacggaaaccaaaagaatcaaactaatcatatcttcaatcaaagaaagggaccgtatttacaacgccttcaataatgtgggattactaaacgatgtggaattatttgctgatttaaacagtgcgttggaatggtgtgaaaacgaattcctttttcaatataaacaattaagaaaaaaggcgaaagaaagattggaagaaggaaagcaaaataatgtcgtatccgcagtaattgcagccactaaaaacaaaaaaattgatacaataggaaatggtttaaacaggggaagcaatggagacacagcgagaaacttaatgtcactaccaaccaatactcctcgtaattaccaaatactttctgtagcacagaatgtatttgtaaacgacgaacaagcagtgaagaatttcaaaaaggagtacaaagatgatgaacctgtcctgcctatattgttatttgcattaaagcagtaccgacccgatataatatctgaagttcaaaaagtaagagaaaaggaaatcaagttttgggcacaactctgcccctacttcaccaggcgcagattagcaagtcaatcacatttactacatgcagacaacatttttttccttgtggaaacaggtatgttgaaggcaacatatgaactaccacaaggaaccttgtacgagattttttcaaatggcacatgcttcggaaaaatcattgcgccagggaatgctatgcctagagaacaaaagctcaccatcgaaactgaaactgattccgtattatgggttatagactctagctcgttgaacaaattgaaagaagacaatctagcattgtacgtggaggttgcattaatggtcatgtgtatcaaggacaccagattcaaagaattactaggttacacacttgttagcgcatga

SEQ ID NO: 4392 - DNA, 3111 bp, Artificial Sequence
  Description of Artificial Sequence: Synthetic polynucleotide
atgggaaggactattaggagacgcaggagtaattcttctctttctgaggccatatctgtttctttaggaataaatcaagactcttctgtgaacaagatgcatagagcgagtgttagcgcaatgtctcctccattatgccgttcttacatgagcggattttttactggtggaaactctcctatgatcaataatttgagtgattctaaacttcccatctccaacaaacaacatcctaaagtgatacatggatctgaaaatttgcataggcagacagctcaattatccaatgaattttgctcctcttctgtggaagaaaattctcccacaattaaggattacatggacattataggcaatggtgatagaaaagatgatcaatctatgcgtactatagaagagaatattgatgaagaatattctgatgagtactccagattgttacttagcccagcatcttctaacgtggacgatgacagaaatagaggattacagaatagttctttaccggaattagaagatggttacgcgggcggatatcagtctcttcgtccctcccataatttaaggtttaggccaagaaacttgtggcatatgtgtacgtcttttccttccaaatttgcacattatttacccgcagcagtgttaggtttgcttttgaacattttagatgccttatcttatggtatgatcatttttccaatcacagagccagttttttctcatttagggcccactggtatatccatgttttatatttccaccataatatctcaagccgtgtactccggaggctggtctagttttccttccgggattgggagtgaaatgattgaaattactccgttttatcatacaatggcattagctataaaagaggcattagcaggtaatgatgacgaaatcataacgacaacgatattttgttatgtgataagttctatgctcacaggtgtcgttttctatgcattgggtaaacttcgtttaggaaagatagtgggattttttccaagacacatattgattggctgtattggaggtgttggttatttcttgataattacaggaattgaagtcacaacgagggtggcgaaatttgaatattcttggccttttttttctgggttgtttacggattatgacacattagcgaaatggttattacctgtacttttgactgtagttttaatcggcactcaacgctactttaagaactctctcgttttgccaagtttttacatcttgacgttagttttgtttcattttattgttgcgatcattccaacattatccttggatgctttgagacaagctggatggatttttcctattgccaacagtgatagtaaatggtatgaccattatagattatttaatgtccataaagttcattggtctttggttttgcaacaaataccaacgatgatggcattgacattttttggtatcttgcatgttcctataaatgttcctgcgttggctatgtctttacaaatggataagtatgatgttgacagagaattgattgcacatggttattccaacttttttagtggattattaggttctgtccaaaattacttggtatataccaacagtgttttatttattagggcgggcgctgattctccattcgctgggttccttttaatagctttgactatctgtattatgatcattggaccagtcataatatctttcattccaatctgtatagtgggctctttgattttcttattaggctacgagttattagtggaagcgttggtcgatacatggaataaattgaatagattcgaatatttgactgttgtcattattgttttcacgatgggtatctttgattttgtcttgggtatcatcgttggcattttaattgcatgtttttcttttttggtggatagtacgaaattacaaaccattaacggtgaatataatgggaacgtcgcaagaagtacagtatatcgtgattacgttcaaacaaaatttttggatggaattggtgaacaaatatatgttttaaagctccaaaaccttttatttttcggaacaatcatatctattgaagagaaaattgaaagattgttgcaaataagtaacaaagatgcaacaaaacgcagaataaagtatttaatattggactttaaaaatattaatgccgacaatattgactattctgcggcagaaggtttcaatagaattaaaagattcacggaaaccaaaagaatcaaattaatcatatcttctatcaaagaaagggaccgtatttacaacgccttcaataatgtgggattattaaacgatgtggaattatttgctgatttaaacagtgcgttggaatggtgtgaaaacgaattcctttttcaatataaacaattaagaaaaaaggcgaaagaaagattggaagaaggaaagcaaaataatgtcgtatccgcagtaattgcagccactaaaaacaaaaaaattgatacaataggaaatggtttaaacaggggaagcaatggagacacagcgagaaacttaatgtctttaccaaccaatactcctcgtaattaccaaatactttctgtagcacagaatgtatttgtaaacgacgaacaagcagtgaagaatttcaaaaaggagtacaaagatgatgaacctgtcttacctatattgttatttgcattaaagcagtacagacccgatataatatctgaagttcaaaaagtaagagaaaaggaaatcaagttttgggcacaactctgcccctacttcaccaggcgcagattagcaagtcaatctcatttattacatgcagacaacatttttttccttgtggaaacaggtatgttgaaggcaacatatgaattaccacaaggaaccttgtacgagattttttctaatggcacatgcttcggaaaaatcattgcgccagggaatgctatgcctagagaacaaaagctcaccatcgaaactgaaactgattccgtattatgggttatagactctagctctttgaacaaattgaaagaagacaatttggcattgtacgtggaggttgcattaatggtcatgtgtatcaaggacaccagattcaaagaattattgggttacacacttgttagcgcatga

SEQ ID NO: 4393 - DNA, 693 bp, Saccharomyces cerevisiae
atgcctgtcccatctgttactgtcactaccgataatgaatatgaagacatatcgtccttttcttctattgactcttacaaaccggagccctttactgggttcaaagattctgaagctccagaacagcctcttttaaaaaacgataccattgttggaaaggggcaactggaagatgatagtaatgtagatgatcaacaccgtcattcagatgtgcattctcatcacagttctagtactttaaaaaggccaacttcaaattcgatagaaaagatggttacccacaatgctttagagggcaactcagaaacagttgattccttaaaagaagatggtttaaatttgaacaagaaagctcttccggatattaccgccccagtaacaaactcagctcacgatgctgcatttccagaagagtatcgtttagaaactgaaaccgggttggtcaaattgaagacgcttgaaagtttgaagagggaggactctcgcgtatcctcaactaaaaaagagcatattaacgaccatacagatatgcattcgacacgatccaaggttactacaaattctcaaggttcttctctagaaccaaacaagttgaacatggcagtagagaagaataagaagaggatcgaaaaatatcaaaaacataaatcagaaaaggggatcaaggggttttttcatagaattttcgattaa

SEQ ID NO: 4394 - DNA, 693 bp, Artificial Sequence
  Description of Artificial Sequence: Synthetic polynucleotide
atgcctgtcccatctgttactgtcactaccgataatgaatatgaagacatatcttccttttcttctattgactcttacaaaccggagccctttactgggttcaaagattctgaagctccagaacagcctcttttaaaaaacgataccattgttggaaaggggcaattggaagatgatagtaatgtagatgatcaacaccgtcattctgatgtgcattctcatcacagttctagtactttaaaaaggccaacttccaattctatagaaaagatggttacccacaatgctttagagggcaactctgaaacagttgattccttaaaagaagatggtttaaatttgaacaagaaagctcttccggatattaccgccccagtaacaaactctgctcacgatgctgcatttccagaagagtatcgtttagaaactgaaaccgggttggtcaaattgaagacgcttgaaagtttgaagagggaggactctcgcgtatccagcactaaaaaagagcatattaacgaccatacagatatgcattctacaagatccaaggttactacaaattctcaaggttcttctttggaaccaaacaagttgaacatggcagtagagaagaataagaagaggatcgaaaaatatcaaaaacataaaagtgaaaaggggatcaaggggttttttcatagaattttcgattga

SEQ ID NO: 4395 - DNA, 939 bp, Saccharomyces cerevisiae
atgtgcattttaatggccacaagggcacatcctgactatgaactcatcttaatatctaacagagacgaattcttggcaagaaaaacacatgctacatgctggcataacaatgattttatcctttcaccctacgatctggccaaaacctcagcagaaaaacaaatatttggcacttggtctggcataaataaagaaggaaaattagccactattcttaatttaaaacttgacaatgagcaaaataatacgaaatcaagatcccgtggtctgttaccatttatatttttgtcgatccataaagcagattttgaagattgggataattacaaaaagtttgaaggtcactatgatgggttgaagtccacaggtgattttaattttttttacggcgacgttatcaaaaagcaatataaagttattgattctctaggaagaacttttgatgtgttgagttctacctgtaggaaagatcttgattcttacatggttgtttctaatggtaaattttatgacagctccagtataccagggcaggcttgggaaaaagtaaaggtagcacgtgatagtttagaaaatctagttttagagaatattgaatcagatgaggagaaaataatatcaagttgctttcaactcgcctcgaagtcttcccttccaagcactatttcaaacccagatgtcttgcagatggtagatccaaatgtaaccatgaataccatatacgtaccacctttacggaggcctcccagggatgacttaggtgcctcaattcctgatggtgattactacggaactcgctctcaaatagttttactcgtgagtaaggattcaacgagagttacctttatagaaagggtcctttatagctcagatgaagacgtgcgcaagtattcggtaacctcacctaaggaggaaaaaaggtttaaattcaaattgtaa

SEQ ID NO: 4396 - DNA, 939 bp, Artificial Sequence
  Description of Artificial Sequence: Synthetic polynucleotide
atgtgcattttaatggccacaagggcacatcctgactatgaactcatcttaatatctaacagagacgaattcttggcaagaaaaacacatgctacatgctggcataacaatgattttatcctttctccctacgatttggccaaaacctctgcagaaaaacaaatatttggcacttggtctggcataaataaagaaggaaaattagccactattcttaatttaaaacttgacaatgagcaaaataatacgaaatctagatcccgtggtttattaccatttatatttttgtccatccataaagcagattttgaagattgggataattacaaaaagtttgaaggtcactatgatgggttgaagtccacaggtgattttaattttttttacggcgacgttatcaaaaagcaatataaagttattgattctttgggaagaacttttgatgtgttgagttctacctgtaggaaagatcttgattcttacatggttgtttctaatggtaaattttatgacagctccagtataccagggcaggcttgggaaaaagtaaaggtagcacgtgatagtttagaaaatttggttttagagaatattgaaagtgatgaggagaaaataatatctagttgctttcaactcgcctccaagtcttcccttccaagcactatttccaacccagatgtcttgcagatggtagatccaaatgtaaccatgaataccatatacgtaccacctttaagaaggcctcccagggatgacttaggtgcctctattcctgatggtgattactacggaactcgctctcaaatagttttactcgtgagtaaggattctacgagagttacctttatagaaagggtcctttatagcagtgatgaagacgtgcgcaagtattctgtaacctctcctaaggaggaaaaaaggtttaaattcaaattgtga

SEQ ID NO: 4397 - DNA, 2142 bp, Saccharomyces cerevisiae
atgccatccctgtctcaaccatttagactagcaactctcccaaaaattgcttcattgagcaatttttctttacaagcagattacgttcaagtcgcagatggcacctttaatgaatctacaaataacataacgttaggtatttccgggtcatctatatctcaatatattattaatcctacaccaaagttaacattcgattacccaataccctctacaaatattatcacggcatgcaatgctgagaaaggtcaagcgaacattgacggaaatatagaagccagtaccgatgatgaagccaacaacgagaagactatcaacacccaaaaaaaaagaaatgttgaaatttgggcctttggtttaatggtaaataagggtaattatacgctaaatgttatcactaaggcactggaagataccactgatacctcaaatgaccatctgagtgagagtgatattgacaataaagcatacacgggttcagacgaatttttatctcagtataagatcaaggcgaaagccaaagtcatgagtattaaaattgacaccaagaacagcttagtaattgcaattttacagaacgggttgattgaaatttttgattttaagttaacacttttgcattcatttgatatatcttatgataacttaaaatatgctaaatggttcactgaaaatggaactgaatatgtttttgttctctgtccattacaggatgataaagtctgctataaattgctcgagctaacagattgtggcagtggagaaagttcgcccataaaagaattatcatctactatcatcgaaggattttcttttgaaaattcaaagctttgttatcaatttggaaaactttacaaattgaaccaggggaaaatatacatttactctttaccacattgccaattgcaacaagttattgaatttccgatggtggataaactcagtcctggagatgacttaatctctttccaacctgtttcagtaaacagagttctactgaccgtaaacaacgtcatttatctactagacttactgcattgttctactttaagccaaagagaattaactcacgtgaaaacattccaactattaaaatctgcagtgatcaattcagaaaagtcgcataattcaaaaacaatagcaattggtatttcaacgaaaaatggaccaaacccaacgtcttccttagaaataattaatattgatgttggaactaatacgttgaaggactcattaggcaagagttttcaagttggaaataatgatagctcagttattttaaagccgctatttgatgataaagacataaatgacaagagagtgaaatgtaacgacgtcagcggggattcaagcgttccagtcctccactgtaatgaagttattgaaaagctttcagcccttcaagataatgacattacatcatttgatgacatatttttcaaagaactaaaaatcaaagaagaacattatactgaaaaagatagatatatttctgatcctggctttttgaataaagttttagatctaattttcggaaagtttagcggaaatgattatccaaaaactttaacgtttttattgacacacccattgtttccattgagtcgtacacgcaacttgctatccttactaagagaccaacctagattatttaaacaagcaattgtaacatgcccaaacttgccattaaatgaactacttgaagaattgttttctatcagaaacagggaactattacttgatatctcatttaggattttgcaggatttcaccagagactctattaaacaagaaatgaagaaactaagtaaattagacgttcaaaatttcattgagttcataacaagcggtggtgaagacagctcaccagaatgcttcaaccctagccaaagcacgcagctatttcaactcttgtcccttgtgctagattctatcgggctattttcattagaaggtgctctattggagaacttaaccttatatattgacaaacaagttgagattgctgaaagaaataccgaattgtggaatttgattgatacgaaaggttttcagcatgggtttgctagctcaacctttgataacggaacttctcagaagcgagccttacccacttacaccatggaatacttggacatttga

SEQ ID NO: 4398 - DNA, 2142 bp, Artificial Sequence
  Description of Artificial Sequence: Synthetic polynucleotide
atgccatccttatctcaaccatttagattagcaactctcccaaaaattgcttctttgagcaatttttctttacaagcagattacgttcaagtcgcagatggcacctttaatgaatctacaaataacataacgttaggtatttccgggagttctatatctcaatatattattaatcctacaccaaagttaacattcgattacccaataccctctacaaatattatcacggcatgcaatgctgagaaaggtcaagcgaacattgacggaaatatagaagccagtaccgatgatgaagccaacaacgagaagactatcaacacccaaaaaaaaagaaatgttgaaatttgggcctttggtttaatggtaaataagggtaattatacgttgaatgttatcactaaggcattggaagataccactgatacctctaatgaccatttgagtgagagtgatattgacaataaagcatacacgggttctgacgaatttttatctcagtataagatcaaggcgaaagccaaagtcatgagtattaaaattgacaccaagaacagcttagtaattgcaattttacagaacgggttgattgaaatttttgattttaagttaacacttttgcattcttttgatatatcttatgataacttaaaatatgctaaatggttcactgaaaatggaactgaatatgtttttgttctctgtccattacaggatgataaagtctgctataaattgctcgagttgacagattgtggcagtggagaaagttctcccataaaagaattatcttctactatcatcgaaggattttcttttgaaaattctaagctttgttatcaatttggaaaactttacaaattgaaccaggggaaaatatacatttactctttaccacattgccaattgcaacaagttattgaatttccgatggtggataaactcagtcctggagatgacttaatctctttccaacctgtttctgtaaacagagttttattaaccgtaaacaacgtcatttatttattagacttattacattgttctactttaagccaaagagaattaactcacgtgaaaacattccaattattaaaatctgcagtgatcaattctgaaaagagtcataattctaaaacaatagcaattggtatttctacgaaaaatggaccaaacccaacgtcttccttagaaataattaatattgatgttggaactaatacgttgaaggactctttaggcaagagttttcaagttggaaataatgatagctctgttattttaaagccgttgtttgatgataaagacataaatgacaagagagtgaaatgtaacgacgtcagcggggattctagcgttccagtcctccactgtaatgaagttattgaaaagctttctgcccttcaagataatgacattacatcttttgatgacatatttttcaaagaattgaaaatcaaagaagaacattatactgaaaaagatagatatatttctgatcctggctttttgaataaagttttagatttgattttcggaaagtttagcggaaatgattatccaaaaactttaacgtttttattgacacacccattgtttccattgagtcgtacacgcaacttgttatccttattaagagaccaacctagattatttaaacaagcaattgtaacatgcccaaacttgccattaaatgaattgcttgaagaattgttttctatcagaaacagggaattattacttgatatctcttttaggattttgcaggatttcaccagagactctattaaacaagaaatgaagaaattaagtaaattagacgttcaaaatttcattgagttcataacaagcggtggtgaagacagctctccagaatgcttcaaccctagccaaagcacgcagttatttcaactcttgtcccttgtgttggattctatcgggttgttttctttagaaggtgctttattggagaacttaaccttatatattgacaaacaagttgagattgctgaaagaaataccgaattgtggaatttgattgatacgaaaggttttcagcatgggtttgctagctctacctttgataacggaacttctcagaagagagccttacccacttacaccatggaatacttggacatttga

SEQ ID NO: 4399 - DNA, 648 bp, Saccharomyces cerevisiae
atggatttttacaaattagacgagaagctgaaggagttgaaaaggaaaagagtagatgtatctataaagagtaggaagttggctgacagagagattcaggaagtaagcgcaaatcgaaaaccaagagtatacagtatggaagacgtaaatgatgcagatgaatcagtaggagatacagaaagtcctgaaaaagagaaagcatttcattacactgtccaagaatatgatgcgtgggaacgtaggcatcctcaagggaagactgggcaaagccaaagaggtggaatttcctatgatcaacttgcaaaattgagttatgagaagaccttgcggaatctcgctacgcaaacacagaattcgagcaaacaggatagttccgccgatgaagaagacaataaaaacgtacccaagaagggtagaatcggcaaggtacagaaggacactaagacgggtaagataacaattgcagatgacgacaagctagttaataagttggccgtttctttgcaatctgagtcgaaaaaaagatacgaagcaagaaaaagacaaatgcaaaatgcaaaaacactgtatggggttgaaagcttcattaatgacaaaaataaacaattcaatgaaaaattgagcagggaatcaaaaggatcagaataa

SEQ ID NO: 4400 - DNA, 648 bp, Artificial Sequence
  Description of Artificial Sequence: Synthetic polynucleotide
atggatttttacaaattagacgagaagttgaaggagttgaaaaggaaaagagtagatgtatctataaagagtaggaagttggctgacagagagattcaggaagtaagcgcaaatagaaaaccaagagtatacagtatggaagacgtaaatgatgcagatgaaagtgtaggagatacagaaagtcctgaaaaagagaaagcatttcattacactgtccaagaatatgatgcgtgggaacgtaggcatcctcaagggaagactgggcaaagccaaagaggtggaatttcctatgatcaacttgcaaaattgagttatgagaagaccttgagaaatctcgctacgcaaacacagaatagtagcaaacaggatagttccgccgatgaagaagacaataaaaacgtacccaagaagggtagaatcggcaaggtacagaaggacactaagacgggtaagataacaattgcagatgacgacaagttggttaataagttggccgtttctttgcaatctgagagtaaaaaaagatacgaagcaagaaaaagacaaatgcaaaatgcaaaaacattatatggggttgaaagcttcattaatgacaaaaataaacaattcaatgaaaaattgagcagggaaagtaaaggatctgaatga

SEQ ID NO: 4401 - DNA, 2451 bp, Saccharomyces cerevisiae
atgctattcaatatcaaccgtcaagaagacgacccctttacgcaattgatcaatcaatcttcggcaaatacgcaaaatcagcaagcgcatcagcaggaaagcccttatcagtttttgcaaaaggttgtgtccaatgagccaaaaggtaaggaagagtgggtctcgccatttagacaagatgccctcgccaataggcaaaacaaccgggcatatggggaagacgcaaaaaacagaaagtttcctaccgtaagtgctacttctgcctattcaaaacagcaacctaaggatttagggtacaaaaacataccaaaaaatgctaagagagccaaagatattagatttccaacttacctaactcaaaatgaagaaagacaatatcagttactaactgagttggaactaaaggagaaacatttgaaatatttgaagaagtgccagaaaattactgacttaactaaggatgaaaaagatgacactgacactactacttcttcgtccacttctacatcatcatcgtcatcgtcatcgtcatcgtcatcgtcatcgtcttcatcagatgaaggggacgttacttctactaccacatctgaggccactgaagcaactgctgacactgcaactacgacaaccactaccaccagtacttctactaccagcacttctactactaatgctgtcgaaaatagtgctgatgaagcaacttccgtggaggaagaacatgaagacaaagtgagtgagtctacttcaattggcaaaggcactgctgattcagctcaaattaatgtagcggaaccaatctcatccgagaatggggtgttggaaccacgcactacagatcaaagtggcggttcaaagtcaggtgtcgtgccaacagacgaacaaaaggaggaaaaatccgatgtaaaaaaagtcaatcctcccagtggggaagaaaaaaaggaagtggaagcggaaggggatgcagaagaggaaaccgaacaatcgtctgcagaggaatctgctgagagaacgtctactccagaaacctcggaaccggaatccgaagaagatgaaagcccaatcgatccaagcaaggctcccaaggtcccttttcaggaaccttctcgaaaggaaagaaccggaattttcgctttatggaaaagccctacttcttcatctacccaaaaaagtaagaccgccgctccatccaatccagtggccactccagaaaatcctgaattaattgtaaagacaaaagaacatggttacctatcaaaggcagtttatgataaaatcaattatgatgaaaaaattcatcaagcatggttagctgatcttcgagcaaaggaaaaggataaatatgatgctaaaaataaagaatacaaagaaaagctacaagatttacaaaatcagattgacgaaattgaaaattcaatgaaggccatgagagaagaaacttctgagaaaattgaagttagtaaaaaccggttggtcaaaaaaatcattgatgttaatgccgagcataataataagaaactaatgatattaaaagacactgaaaatatgaaaaaccaaaagttgcaggagaaaaatgaggtcttggacaaacaaaccaacgttaagtcagaaatcgatgatttgaacaatgagaaaacgaatgtccaaaaggagttcaatgactggaccacgaacttaagtaacttatctcaacagttggatgctcagatctttaagattaaccagattaatttgaaacaaggcaaagttcaaaacgaaatcgataatctggaaaagaaaaaggaggatttggttacccaaactgaagaaaataagaagctgcatgaaaaaaatgtacaagttttggaaagtgtagagaacaaggaatatcttccacaaattaatgatattgataatcaaatatcaagcttattgaacgaagtgaccataatcaagcaggaaaacgccaatgaaaaaactcaactatcggcaattaccaaaagactcgaagatgagcgccgcgctcatgaagaacagttgaagctagaagctgaagaaagaaaacgcaaagaagagaacttattggaaaaacagcgccaagagctggaggaacaagcgcatcaggctcaattagatcatgagcagcaaattactcaagtcaagcaaacctataatgaccaattgactgaactacaggataagctggcaaccgaagagaaagaactggaggcagtcaagagggaaagaacgcgattacaagctgaaaaggctatcgaggaacaaactcgccagaaaaacgctgatgaggccttgaagcaagaaatattgagtaggcagcacaaacaagctgaaggtatacacgcggctgaaaaccacaaaataccaaatgaccgttcacaaaagaatacgagcgtccttccaaaggacgattccttgtatgaatatcatactgaggaagacgtcatgtatgcctaa

SEQ ID NO: 4402 - DNA, 2451 bp, Artificial Sequence
  Description of Artificial Sequence: Synthetic polynucleotide
atgcttttcaatatcaaccgtcaagaagacgacccctttacgcaattgatcaatcaatcttctgcaaatacgcaaaatcagcaagcgcatcagcaggaaagcccttatcagtttttgcaaaaggttgtgtccaatgagccaaaaggtaaggaagagtgggtctctccatttagacaagatgccctcgccaataggcaaaacaacagagcatatggggaagacgcaaaaaacagaaagtttcctaccgtaagtgctacttctgcctattctaaacagcaacctaaggatttagggtacaaaaacataccaaaaaatgctaagagagccaaagatattagatttccaacttacttgactcaaaatgaagaaagacaatatcagttattaactgagttggaattgaaggagaaacatttgaaatatttgaagaagtgccagaaaattactgacttaactaaggatgaaaaagatgacactgacactactacttcttcttccacttctacatcttcttcttcttcttcttcttcttcttcttcttcttcttcttcttctgatgaaggggacgttacttctactaccacatctgaggccactgaagcaactgctgacactgcaactacgacaaccactaccaccagtacttctactaccagcacttctactactaatgctgtcgaaaatagtgctgatgaagcaacttccgtggaggaagaacatgaagacaaagtgagtgagtctacttctattggcaaaggcactgctgattctgctcaaattaatgtagcggaaccaatctcttccgagaatggggtgttggaaccacgcactacagatcaaagtggcggttccaagtctggtgtcgtgccaacagacgaacaaaaggaggaaaaatccgatgtaaaaaaagtcaatcctcccagtggggaagaaaaaaaggaagtggaagcggaaggggatgcagaagaggaaaccgaacaatcttctgcagaggaatctgctgagagaacgtctactccagaaaccagtgaaccggaatccgaagaagatgaaagcccaatcgatccaagcaaggctcccaaggtcccttttcaggaaccttctagaaaggaaagaaccggaattttcgctttatggaaaagccctacttcttcttctacccaaaaaagtaagaccgccgctccatccaatccagtggccactccagaaaatcctgaattaattgtaaagacaaaagaacatggttacctttccaaggcagtttatgataaaatcaattatgatgaaaaaattcatcaagcatggttagctgatcttcgtgcaaaggaaaaggataaatatgatgctaaaaataaagaatacaaagaaaagttacaagatttacaaaatcagattgacgaaattgaaaattctatgaaggccatgagagaagaaacttctgagaaaattgaagttagtaaaaacagattggtcaaaaaaatcattgatgttaatgccgagcataataataagaaattaatgatattaaaagacactgaaaatatgaaaaaccaaaagttgcaggagaaaaatgaggtcttggacaaacaaaccaacgttaagtctgaaatcgatgatttgaacaatgagaaaacgaatgtccaaaaggagttcaatgactggaccacgaacttaagtaacttatctcaacagttggatgctcagatctttaagattaaccagattaatttgaaacaaggcaaagttcaaaacgaaatcgataatttggaaaagaaaaaggaggatttggttacccaaactgaagaaaataagaagttgcatgaaaaaaatgtacaagttttggaaagtgtagagaacaaggaatatcttccacaaattaatgatattgataatcaaatatctagcttattgaacgaagtgaccataatcaagcaggaaaacgccaatgaaaaaactcaattaagtgcaattaccaaaagactcgaagatgagcgccgcgctcatgaagaacagttgaagttggaagctgaagaaagaaaacgcaaagaagagaacttattggaaaaacagcgccaagagttagaggaacaagcgcatcaggctcaattagatcatgagcagcaaattactcaagtcaagcaaacctataatgaccaattgactgaattacaggataagttagcaaccgaagagaaagaattagaggcagtcaagagggaaagaacgagattacaagctgaaaaggctatcgaggaacaaactcgccagaaaaacgctgatgaggccttgaagcaagaaatattgagtaggcagcacaaacaagctgaaggtatacacgcggctgaaaaccacaaaataccaaatgaccgttctcaaaagaatacgagcgtccttccaaaggacgattccttgtatgaatatcatactgaggaagacgtcatgtatgcctga

SEQ ID NO: 4403 - DNA, 525 bp, Saccharomyces cerevisiae
atgctatcagctgcagataatttagtgcgcatcataaatgctgtttttcttattatatccataggtctaatcagcggcctgataggtacacagacaaagcatagttctcgagtgaacttttgtatgtttgccgccgtttatggtctggttacggattcattatatgggtttttggctaatttctggacatcattaacatacccagcaattttgcttgttttggattttttaaatttcatatttacgtttgtagcagccaccgctttggctgtaggtataagatgccattcgtgtaaaaacaaaacatatctggaacagaataagatcatacaaggctcaagctccagatgtcatcaatctcaggctgctgttgcgtttttttacttttcctgttttctattcctcatcaaagtgactgtggccacgatgggtatgatgcaaaatggtggatttggctctaataccggattcagcagaaggagggcaagaagacaaatgggcatacctacaatttcccaggtttaa

SEQ ID NO: 4404 - DNA, 525 bp, Artificial Sequence
  Description of Artificial Sequence: Synthetic polynucleotide
atgctttctgctgcagataatttagtgcgcatcataaatgctgtttttcttattatatccataggtttgatcagcggcttgataggtacacagacaaagcatagttctcgtgtgaacttttgtatgtttgccgccgtttatggtttagttacggattctttatatgggtttttggctaatttctggacaagtttaacatacccagcaattttgcttgttttggattttttaaatttcatatttacgtttgtagcagccaccgctttggctgtaggtataagatgccattcttgtaaaaacaaaacatatttggaacagaataagatcatacaaggcagtagctccagatgtcatcaatctcaggctgctgttgcgtttttttacttttcctgttttcttttcctcatcaaagtgactgtggccacgatgggtatgatgcaaaatggtggatttggctctaataccggattcagcagaaggagggcaagaagacaaatgggcatacctacaatttcccaggtttga

SEQ ID NO: 4405 - DNA, 864 bp, Saccharomyces cerevisiae
atgtctaattctgccaaacttatcgatgtcatcaccaaggtggcgttgcccattggtataattgctagcgggattcagtactccatgtatgatgtgaagggtggttctcgtggtgttattttcgacagaatcaatggtgtaaagcaacaggttgtgggtgaaggcactcatttcttggtgccttggctacagaaggcgatcatatacgatgtgaggacgaaaccaaagagcattgctaccaatactggtacgaaggatttgcaaatggtgtcattgaccttgagagtcttacatagaccagaggtcttacagctacccgcaatataccaaaatttgggtctcgattacgacgaaagagtgttaccatctatcggcaatgaggttttaaagtctatagtagctcaatttgatgctgctgagttaattactcagagagaaattatttctcaaaaaatcagaaaagagctttctacgagggccaacgaattcggtattaagttggaagatgtctctatcactcatatgacgtttggtcccgaattcacgaaagcagttgagcagaagcagattgcacagcaagatgccgaaagagccaaattccttgtcgaaaaggcagagcaagagagacaagcttctgttatcagagctgaaggtgaagcagaaagtgctgaattcatttcaaaagccttagctaaagttggtgatggtctgttattgattagaagattagaagcttctaaggacatcgctcaaacattagcaaactcatctaacgttgtctatttaccaagtcaacattctggtggtggtaacagcgagtcttcgggatcaccaaattccttgcttttgaacattggccgttaa

SEQ ID NO: 4406 - DNA, 864 bp, Artificial Sequence
  Description of Artificial Sequence: Synthetic polynucleotide
atgtctaattctgccaaacttatcgatgtcatcaccaaggtggcgttgcccattggtataattgctagcgggattcagtactccatgtatgatgtgaagggtggttctcgtggtgttattttcgacagaatcaatggtgtaaagcaacaggttgtgggtgaaggcactcatttcttggtgccttggttacagaaggcgatcatatacgatgtgaggacgaaaccaaagagcattgctaccaatactggtacgaaggatttgcaaatggtgtctttgaccttgagagtcttacatagaccagaggtcttacagttgcccgcaatataccaaaatttgggtctcgattacgacgaaagagtgttaccatctatcggcaatgaggttttaaagtctatagtagctcaatttgatgctgctgagttaattactcagagagaaattatttctcaaaaaatcagaaaagagctttctacgagggccaacgaattcggtattaagttggaagatgtctctatcactcatatgacgtttggtcccgaattcacgaaagcagttgagcagaagcagattgcacagcaagatgccgaaagagccaaattccttgtcgaaaaggcagagcaagagagacaagcttctgttatcagagctgaaggtgaagcagaaagtgctgaattcatttccaaagccttagctaaagttggtgatggtttattattgattagaagattagaagcttctaaggacatcgctcaaacattagcaaactcttctaacgttgtctatttaccaagtcaacattctggtggtggtaacagcgagtcttctggatctccaaattccttgcttttgaacattggccgttga

SEQ ID NO: 4407 - DNA, 552 bp, Saccharomyces cerevisiae
atgccaaacttctggattcttgagaatcgtaggagctatacgtctgatacatgtatgtcgaggatcgtgaaggagtacaaagtcatactgaaaacattggccagtgatgaccccatagcgaacccctaccgggggataatcgagtcacttaacccgattgacgaaaccgacttgagcaagtgggaagctataatttctgggccgtcagacacaccttatgaaaatcatcagtttcgaatactaatagaagtccctagttcctaccccatgaatccaccaaagataagttttatgcagaacaatattttgcactgcaatgttaaatcagccacaggagaaatatgtctgaacatccttaaaccagaggagtggactcctgtatgggatttgttacactgtgttcatgctgtttggagactcctaagggaacccgtttgtgattctccacttgacgtagacattggtaatatcatccgctgtggcgatatgagtgcctatcaggggattgtaaagtacttcctagcagaaagagagcggatcaacaaccattga

SEQ ID NO: 4408 - DNA, 552 bp, Artificial Sequence
  Description of Artificial Sequence: Synthetic polynucleotide
atgccaaacttctggattcttgagaatcgtaggagctatacgtctgatacatgtatgtctaggatcgtgaaggagtacaaagtcatattgaaaacattggccagtgatgaccccatagcgaacccctaccgtgggataatcgagtctcttaacccgattgacgaaaccgacttgagcaagtgggaagctataatttctgggccgtctgacacaccttatgaaaatcatcagtttagaatattaatagaagtccctagttcctaccccatgaatccaccaaagataagttttatgcagaacaatattttgcactgcaatgttaaaagtgccacaggagaaatatgtttgaacatccttaaaccagaggagtggactcctgtatgggatttgttacactgtgttcatgctgtttggagactcttgagggaacccgtttgtgattctccacttgacgtagacattggtaatatcatccgctgtggcgatatgagtgcctatcaggggattgtaaagtacttcttggcagaaagagagagaatcaacaaccattga

SEQ ID NO: 4409 - DNA, 3369 bp, Saccharomyces cerevisiae
atgacgaaaaagaaagcagctactaattatgctgaaaggcaaaatttagccagtgaagattcttcaggtgattcggttcattttaaggactttattcccttacaagagttactgaaagataaaaattatgttccatcggtggaaaatttggagaagatcttatataatgaaaccatgtttaatgatcagaaaatatgctctaacctattgcttgaggctctcataattacgttgttcacaacaatttcagggaagtcagctttacgattaattcagacttcttctttgaaggaaagaaaatcctgggcccagtcctttgaaaataacagttctagctatgcttccatagtactgagttggaaagataatgatatattactcctgaaattcttaaggtttttattagcaaataaaacggcccctcttcaaattaatcggtacaatcttccagaatacaaactcccgttgagctttttaattgtttcaaaaattactattccgtccatattactcaatgaaacgtataatttgttaaaggactatttgtattcgataactggccgtatagagagtttgataagctgcagctccacatttgataagccagcacttgtcgttagaaaaattttaaaagattacaatagaatgatagaatgccgaaatttttatttctggtattcctttaatgctgagaacagagtaaatcttacttttagtgataacattagcctgttaatggaaaatgatgaaggcaatgctggaagtggccttgacgatagccgttttgatcatcaaaaacaaccgagagaggcgataatgggccgaacaataaatgaccaggaacaaatatattcattcgaactgaaccaagatggaacgcttgaaatacccaacgttatggagcattctttactaagacacgagcttctttttaaaatattaaatctcactacggtattgacgccattattggaactacaattttctacgctatgtggcttagtagatccattaatgcagcctactcccaatgataagcatattatatcgatagactttctttttcagctttttttgggattaatgtctcagtcgatcaagacttctcaagaacacaacgaccattatgactggaaattttatatgtgttttaacatgcaaaaaattattgatgctaccatgttgaggctcaactgctttgattttgatatattaaactcggtaaacaatacagataatgcagttcattggaagacgcaacttcacagatggctaccgcatggcctgaatacacaagacttggaattactctatatgattgatatactggcggtatataccatctacaagttgtatgaaaaaatacctatacaactaaacccatttttattttcattaatatccttatggaaaaacctctcctgtgttatacttttagccttagaaattgatagaattgaagaggagaatggcacttacgaaacgccgcttatggttcgcgccacaattcgtggagccgcagcattgaggtctgtaatagctaccgttctcaatggattagtgaaaaataatgatcatgatttcaagcacgagtctttaaacacattcatgtcgccctatggaagaaaattgtgtcatggtgctttatatgccgatttaaggtcacatactgcatctctacttgcgcttggagcaagcatcgaagatgtaacagatttatttgccgatttacagtcaggtgatagatttgatgaggatattagatatatgtttgattatgaatgtgaagattatgatgaatctttctctgaaagcgatcatggaggattggatgaaagcgttgttaacccaacagaaaaaatagcatctggtagtaataatgttttctttcggagacggtgcaattgcatcttcaatgatgataagttggtggcagaggatggtgcaaatgaagcctttgggtcaacaaatagcgaaaacgttgaaggcgcaatgcataataataggaatgcggtacataacgcgactacagccacttctgatcacgtcgttacgtcacctaacccactttccgttagatcaagaagtacttttgaatttgactatagtggggaagattggagggacgttcccagagatttcaatatgtactattcgccatcttattcattcatccatgagcctaagttagatgtcatatttagtttgactctacgtggcgcaacagaaaagttgaataaggaggaatccatattgttagtgcgttcagttgcatcgtgtgtaaggaacgagcaggaccaaatgattttagcagacctggagtctaatttttccgcaagtataaacggcgatgtagaaggtgaaggaaataccaaaatgtccaagatagataatgaagatctcagaagaaccacgccggatgatatttatgaaatatggtctgaagaatcagcatttgaaaggatgctaaacgtgaatcacgacgttgcgtggagattaatggatgaaatgttaatgtgcaccggttataggagaatattgatatggttccttacgcatttggagttaaaacattcgttgatatattacgtttttgaactaataatggggttacgtggaaaaccgttttccggagaagccagtgatcaagataaaaaggatgatatgatatatgagatcttgaagaaaaagcagaagaatgaagatgcttcaggacttcccttttcaaggcaaggacctatcgtattatctgatattgagactaaaatgttactgcaggagttttttatgaatgctgctatttttttgtcatcaaaaaataacgaagaagagaatgaagacggcgagaaaatctccttgtactcccttggtttggttaggttgatctgttacatggtgcagacactcatcgcgaacgacaagtttttttttaccaaatcagaatgcacttttgagcttcaaactttactgatgacatggattggcatccttcctgaagccaaagatttattctttaagatcaagacaaggctcgccatggaagaagaggatagtgccgatactatgcagcatgagggcaggaagaactctgacatagagaagaagctaaacgctaagccagcttctgaactgaatctgaaattgttaaacctgtttccctcaaagcctgcaaacaaagacgatagttcccctattaacacgttgcgtagttttatcgctgattactccttcgacacccaggtgaaccctccaggaagaagggtggtgttctacgatggtaagattttgccattgcccaaagccgataagcctatcccacttcatgaatatataacactcgcagagctcgatgttggagacagtgagtga

SEQ ID NO: 4410 - DNA, 3369 bp, Artificial Sequence
  Description of Artificial Sequence: Synthetic polynucleotide
atgacgaaaaagaaagcagctactaattatgctgaaaggcaaaatttagccagtgaagattcttctggtgattctgttcattttaaggactttattcccttacaagagttattgaaagataaaaattatgttccatctgtggaaaatttggagaagatcttatataatgaaaccatgtttaatgatcagaaaatatgctctaaccttttgcttgaggctctcataattacgttgttcacaacaatttctgggaagtctgctttaagattaattcagacttcttctttgaaggaaagaaaatcctgggcccagtcctttgaaaataacagttctagctatgcttccatagtattgagttggaaagataatgatatattactcttgaaattcttaaggtttttattagcaaataaaacggcccctcttcaaattaatagatacaatcttccagaatacaaactcccgttgagctttttaattgtttccaaaattactattccgtccatattactcaatgaaacgtataatttgttaaaggactatttgtattctataactggccgtatagagagtttgataagctgcagctccacatttgataagccagcacttgtcgttagaaaaattttaaaagattacaatagaatgatagaatgcagaaatttttatttctggtattcctttaatgctgagaacagagtaaatcttacttttagtgataacattagcttattaatggaaaatgatgaaggcaatgctggaagtggccttgacgatagccgttttgatcatcaaaaacaaccgagagaggcgataatgggcagaacaataaatgaccaggaacaaatatattctttcgaattgaaccaagatggaacgcttgaaatacccaacgttatggagcattctttattaagacacgagcttctttttaaaatattaaatctcactacggtattgacgccattattggaattacaattttctacgttgtgtggcttagtagatccattaatgcagcctactcccaatgataagcatattatatccatagactttctttttcagctttttttgggattaatgtctcagtctatcaagacttctcaagaacacaacgaccattatgactggaaattttatatgtgttttaacatgcaaaaaattattgatgctaccatgttgaggctcaactgctttgattttgatatattaaactctgtaaacaatacagataatgcagttcattggaagacgcaacttcacagatggcttccgcatggcttgaatacacaagacttggaattactctatatgattgatatattggcggtatataccatctacaagttgtatgaaaaaatacctatacaattgaacccatttttattttctttaatatccttatggaaaaacctctcctgtgttatacttttagccttagaaattgatagaattgaagaggagaatggcacttacgaaacgccgcttatggttcgcgccacaattcgtggagccgcagcattgaggtctgtaatagctaccgttctcaatggattagtgaaaaataatgatcatgatttcaagcacgagtctttaaacacattcatgtctccctatggaagaaaattgtgtcatggtgctttatatgccgatttaaggagccatactgcatctttacttgcgcttggagcaagcatcgaagatgtaacagatttatttgccgatttacagtctggtgatagatttgatgaggatattagatatatgtttgattatgaatgtgaagattatgatgaatctttctctgaaagcgatcatggaggattggatgaaagcgttgttaacccaacagaaaaaatagcatctggtagtaataatgttttctttagaagaagatgcaattgcatcttcaatgatgataagttggtggcagaggatggtgcaaatgaagcctttgggtctacaaatagcgaaaacgttgaaggcgcaatgcataataataggaatgcggtacataacgcgactacagccacttctgatcacgtcgttacgtctcctaacccactttccgttagatctagaagtacttttgaatttgactatagtggggaagattggagggacgttcccagagatttcaatatgtactattctccatcttattctttcatccatgagcctaagttagatgtcatatttagtttgactttacgtggcgcaacagaaaagttgaataaggaggaatccatattgttagtgcgttctgttgcatcttgtgtaaggaacgagcaggaccaaatgattttagcagacttggagtctaatttttccgcaagtataaacggcgatgtagaaggtgaaggaaataccaaaatgtccaagatagataatgaagatctcagaagaaccacgccggatgatatttatgaaatatggtctgaagaaagtgcatttgaaaggatgttgaacgtgaatcacgacgttgcgtggagattaatggatgaaatgttaatgtgcaccggttataggagaatattgatatggttccttacgcatttggagttaaaacattctttgatatattacgtttttgaattgataatggggttacgtggaaaaccgttttccggagaagccagtgatcaagataaaaaggatgatatgatatatgagatcttgaagaaaaagcagaagaatgaagatgcttctggacttccctttagcaggcaaggacctatcgtattatctgatattgagactaaaatgttattgcaggagttttttatgaatgctgctatttttttgagttctaaaaataacgaagaagagaatgaagacggcgagaaaatctccttgtactcccttggtttggttaggttgatctgttacatggtgcagacactcatcgcgaacgacaagtttttttttaccaaaagtgaatgcacttttgagcttcaaactttattgatgacatggattggcatccttcctgaagccaaagatttattctttaagatcaagacaaggctcgccatggaagaagaggatagtgccgatactatgcagcatgagggcaggaagaactctgacatagagaagaagttgaacgctaagccagcttctgaattgaatttgaaattgttaaacttgtttccctccaagcctgcaaacaaagacgatagttcccctattaacacgttgcgtagttttatcgctgattactccttcgacacccaggtgaaccctccaggaagaagggtggtgttctacgatggtaagattttgccattgcccaaagccgataagcctatcccacttcatgaatatataacactcgcagagctcgatgttggagacagtgagtga

SEQ ID NO: 4411 - DNA, 777 bp, Saccharomyces cerevisiae
atgggttccagaagatacgattccaggacaacaattttctcccctgagggacgtctatatcaggttgaatacgcgctagaatccatttcacatgcaggtaccgcaattgggattatggcatctgatgggattgttcttgcagcagaacgcaaagtcacaagtactttactagaacaagacacctctaccgaaaaactttataagttaaacgataaaattgcggttgccgttgctggactgactgcagatgcagaaattctaataaatacggctagaattcacgctcaaaattaccttaaaacctataatgaagatataccagtagaaattttggtgagaaggctaagtgatataaaacaaggttacacgcaacatggtggtttaagaccatttggtgtgtcctttatctacgccggttatgacgatagatacggttaccaattgtatacatctaatccatcgggaaactatacagggtggaaggctattagtgttggcgctaacacatcagcagcacaaaccctacttcaaatggactacaaggatgatatgaaagtcgatgatgccattgaactggctttaaaaacgttatccaaaactaccgacagtagcgcgctgacttatgacaggttggaatttgctactatcagaaagggtgctaatgacggagaagtgtatcagaagattttcaagcctcaagagataaaggatatattggtaaagactggtattaccaagaaggatgaagacgaagaagctgatgaagatatgaaataa

SEQ ID NO: 4412 - DNA, 777 bp, Artificial Sequence
  Description of Artificial Sequence: Synthetic polynucleotide
atgggttccagaagatacgattccaggacaacaattttctcccctgagggacgtttatatcaggttgaatacgcgttagaatccatttctcatgcaggtaccgcaattgggattatggcatctgatgggattgttcttgcagcagaacgcaaagtcacaagtactttattggaacaagacacctctaccgaaaaactttataagttaaacgataaaattgcggttgccgttgctggattaactgcagatgcagaaattttaataaatacggctagaattcacgctcaaaattaccttaaaacctataatgaagatataccagtagaaattttggtgagaaggttgagtgatataaaacaaggttacacgcaacatggtggtttaagaccatttggtgtgtcctttatctacgccggttatgacgatagatacggttaccaattgtatacatctaatccatctggaaactatacagggtggaaggctattagtgttggcgctaacacaagtgcagcacaaaccttacttcaaatggactacaaggatgatatgaaagtcgatgatgccattgaattggctttaaaaacgttatccaaaactaccgacagtagcgcgttgacttatgacaggttggaatttgctactatcagaaagggtgctaatgacggagaagtgtatcagaagattttcaagcctcaagagataaaggatatattggtaaagactggtattaccaagaaggatgaagacgaagaagctgatgaagatatgaaatga

SEQ ID NO: 4413 - DNA, 726 bp, Saccharomyces cerevisiae
atgtctgcgtcactagtgaatcgatcattgaaaaatataaggaatgaattagaatttttgaaggaatcaaacgtcatatcaggcgacattttcgaattaatcaatagcaagttacctgagaaatgggatggaaaccaaagatcgccccaaaatgcagatacagaagagtacgttgaagctttatatgattttgaagctcaacaagatggagatttgtcattgaaaacaggtgataaaatacaagttttagagaagatttctccagattggtatagaggcaagtcaaataataagatcggaatattccctgcaaattatgtgaaacctgctttcacgagatcagcctcacctaaatctgcggaagctgcttcaagctcgactgtttctcgtcccagtgttccacctccatcatacgaaccagccgcatcacagtatccttcacagcaggtttcagcaccttatgcacctccagccggttatatgcaagctccgcctccacagcaacagcaggcgcctttaccatatcctccacctttcactaattactatcaacagcctcagcaacagtacgcaccaccttcacagcaagcaccggtggaagcacaaccgcaacagagcagtggggctagtagtgccttcaagagttttggtagcaaattgggaaatgctgctatatttggcgctggttctgctattggtagtgatattgtcaacagcattttttag

SEQ ID NO: 4414 - DNA, 726 bp, Artificial Sequence
  Description of Artificial Sequence: Synthetic polynucleotide
atgtctgcgtctttggtgaatagaagtttgaaaaatataaggaatgaattagaatttttgaaggaatctaacgtcatatctggcgacattttcgaattaatcaatagcaagttacctgagaaatgggatggaaaccaaagatctccccaaaatgcagatacagaagagtacgttgaagctttatatgattttgaagctcaacaagatggagatttgtctttgaaaacaggtgataaaatacaagttttagagaagatttctccagattggtatagaggcaagagcaataataagatcggaatattccctgcaaattatgtgaaacctgctttcacgagatctgcctctcctaaatctgcggaagctgcttctagctctactgtttctcgtcccagtgttccacctccatcttacgaaccagccgcatcccagtatccttctcagcaggtttctgcaccttatgcacctccagccggttatatgcaagctccgcctccacagcaacagcaggcgcctttaccatatcctccacctttcactaattactatcaacagcctcagcaacagtacgcaccaccttctcagcaagcaccggtggaagcacaaccgcaacagagcagtggggctagtagtgccttcaagagttttggtagcaaattgggaaatgctgctatatttggcgctggttctgctattggtagtgatattgtcaacagcattttttga

SEQ ID NO: 4415 - DNA, 1845 bp, Saccharomyces cerevisiae
atgagtgatcaagaatctgttgtttcattcaactcacaaaacacttccatggtggacgttgagggccaacaacctcaacagtatgtcccctcaaaaaccaactctcgtgcaaatcaacttaagttaactaagactgagaccgtcaagtctttacaagatttaggtgtcacttcagccgccccagtgcctgatatcaatgcgccacaaactgctaagaataacattttccctgaagaatataccatggaaacaccatctgggctggttccagtggctaccttacaatctatgggtagaaccgcctctgccttatctcgtactagaacaaagcaattgaaccgtaccgctaccaattcctcatccacaggtaaagaagaaatggaagaggaagaaactgaagaacgtgaagaccagagcggtgaaaacgagctagatccagagatcgaattcgttacttttgttactggtgatccagaaaaccctcacaattggccctcatgggttcgttggagttacactgtcctgttgtccatcttagttatttgcgttgcctacggttctgcttgtatcagtggtgggttgggaaccgttgaaaagaaataccatgtaggtatggaagccgctattttatcatgttctttaatggttattgggttctcgctgggtcctttgatttggtctcctgttagtgatctttacggtagaagagttgcttactttgtttctatgggtctttatgtcatcttcaatatcccttgcgccttagctccaaatctaggttgtcttttagcttgtagatttttatgtggtgtttggtcatcatctggtttgtgtttagttggtgggtctattgccgatatgttcccaagtgaaacaagaggtaaggctattgctttcttcgcttttgctccttacgttggtcccgttgttggtccactagttaacggttttatttccgtttctaccggacgtatggacctgattttctgggtcaatatggcctttgcaggtgttatgtggatcatatcttctgccatcccagaaacgtacgctccagttatcttgaagagaaaggctgctagattaagaaaggaaactggtaatcccaagattatgactgagcaggaagcgcaaggtgtcagtatgagtgaaatgatgagggcttgtctgttgagacctttgtacttcgctgtcactgaacctgttctagttgccacttgtttctacgtgtgtttgatttactctctactatatgcgttcttctttgccttccctgtcattttcggtgaactatatggctacaaagataaccttgtgggtttaatgtttattcctattgttatcggtgctctttgggcgttagccacaactttctactgtgaaaacaaatatttacaaattgtcaaacagcgtaaacctactcctgaagatcgtttgctaggtgctaagatcggtgctccatttgctgcaattgctctatggatcctgggtgctaccgcttataaacatattatttgggttggtccagcttcagctggtttagcttttggtttcggtatggtgttgatttattattcattgaataattacattattgattgctacgtccaatacgcatccagtgctctggctacaaaggttttcttaagatccgccggtggtgctgccttccccttgtttaccattcaaatgtaccacaaattgaatttgcactggggttcttggttgttggctttcatctccactgctatgattgctttaccttttgcattttcttactggggtaagggcttgagacataagttgtccaagaaggactattccatcgacagtgttgagatgtaa

SEQ ID NO: 4416 - DNA, 1845 bp, Artificial Sequence
  Description of Artificial Sequence: Synthetic polynucleotide
atgagtgatcaagaatctgttgtttctttcaactctcaaaacacttccatggtggacgttgagggccaacaacctcaacagtatgtcccctctaaaaccaactctcgtgcaaatcaacttaagttaactaagactgagaccgtcaagtctttacaagatttaggtgtcacttctgccgccccagtgcctgatatcaatgcgccacaaactgctaagaataacattttccctgaagaatataccatggaaacaccatctgggttggttccagtggctaccttacaatctatgggtagaaccgcctctgccttatctcgtactagaacaaagcaattgaaccgtaccgctaccaattcctcctccacaggtaaagaagaaatggaagaggaagaaactgaagaacgtgaagaccagagcggtgaaaacgagttagatccagagatcgaattcgttacttttgttactggtgatccagaaaaccctcacaattggcccagctgggttcgttggagttacactgtcttattgtccatcttagttatttgcgttgcctacggttctgcttgtatcagtggtgggttgggaaccgttgaaaagaaataccatgtaggtatggaagccgctattttaagttgttctttaatggttattgggttctccttgggtcctttgatttggtctcctgttagtgatctttacggtagaagagttgcttactttgtttctatgggtctttatgtcatcttcaatatcccttgcgccttagctccaaatttgggttgtcttttagcttgtagatttttatgtggtgtttggtcttcttctggtttgtgtttagttggtgggtctattgccgatatgttcccaagtgaaacaagaggtaaggctattgctttcttcgcttttgctccttacgttggtcccgttgttggtccattagttaacggttttatttccgtttctaccggacgtatggacttgattttctgggtcaatatggcctttgcaggtgttatgtggatcatatcttctgccatcccagaaacgtacgctccagttatcttgaagagaaaggctgctagattaagaaaggaaactggtaatcccaagattatgactgagcaggaagcgcaaggtgtcagtatgagtgaaatgatgagggcttgtttgttgagacctttgtacttcgctgtcactgaacctgttttggttgccacttgtttctacgtgtgtttgatttactctttattatatgcgttcttctttgccttccctgtcattttcggtgaattgtatggctacaaagataaccttgtgggtttaatgtttattcctattgttatcggtgctctttgggcgttagccacaactttctactgtgaaaacaaatatttacaaattgtcaaacagcgtaaacctactcctgaagatcgtttgttgggtgctaagatcggtgctccatttgctgcaattgctttatggatcttgggtgctaccgcttataaacatattatttgggttggtccagcttctgctggtttagcttttggtttcggtatggtgttgatttattattctttgaataattacattattgattgctacgtccaatacgcatccagtgctttggctacaaaggttttcttaagatccgccggtggtgctgccttccccttgtttaccattcaaatgtaccacaaattgaatttgcactggggttcttggttgttggctttcatctccactgctatgattgctttaccttttgcattttcttactggggtaagggcttgagacataagttgtccaagaaggactattccatcgacagtgttgagatgtga

SEQ ID NO: 4417 - DNA, 2871 bp, Saccharomyces cerevisiae
atgagatcatcgattttgtttctactaaaattgatgaaaattatggatgttcagcaacagcaagaagctatgtcatcagaagataggtttcaggaactggtggactccctaaagccaagaactgcgcatcagtacaagacctactatactaagtacatacaatggtgtcagctcaatcaaattataccgacaccggaggacaattctgtaaatagcgtcccctataaagacctgccaatatctgctgaactgatacattggtttttgttagatacattaataaccgatgataagcctggagagaaaagagaagagactgaagatcttgatgaggaggaggagaattcattcaagatcgctacgttgaagaaaattataggcagtctcaattttttgtcaaaattgtgcaaagttcatgaaaatccaaatgctaatatagacacaaaatacctggagtcagtcaccaagcttcatacccattggatagattcacaaaaggcaatcaccactaatgaaacaaataacacaaatactcaagtgctgtgtccaccattattgaaagtgtctttgaatttatggaacccagaaactaaccatctctctgagaaattttttaaaacctgttctgaaaaattaagattcctggtggattttcaattaagaagttatttgaacctttcatttgaagaaagatcaaagatacgatttggttccctcaagctcggtaaaagggacagagacgctataatttatcataaagtaactcattcggcggaaaaaaaagatacgccgggccaccatcaactccttgcattattaccccaagattgtccatttatctgccctcaaactacattagctgcatatttgtatttaaggttctatggtataccatctgtttcgaaaggggatggctttcccaatttgaacgctgatgaaaatggctcacttttacaagatattcccatactaagaggcaaatcactgacaacttatcccagagaggaaacatttagtaattattatacaaccgtgtttaggtattgccacttaccttataaaagaagagaatatttcaacaaatgtaaccttgtttacccaacttgggatgaagacacttttagaacatttttcaatgaagaaaaccatggaaattggttagaacaacctgaggcctttgcgttccctgacaaaataccgttcgacttcaagaaaatcatgaacttcaaatcgccctacacttcgtattctacaaacgctaaaaaggacccttttccgcctccaaaggatttattagttcaaatatttccggagattgatgaatataaaagacatgattatgaaggtttgtctcagaattcaagggattttctagatttaatggaagttttacgagaaagatttttgagcaatctaccatggatttacaaattctttcctaatcatgatatattccaggaccccatttttggaaattccgattttcaatcatacttcaatgacaaaactatacattcaaagggttcacccattttatcattcgatatactaccaggctttaataaaatctataagaataagacaaatttttactcactcttaatagaaaggccttcgcagttgacatttgcttcgagtcataatccagatacacaccccactcaaaaacaagaatctgaggggccattacaaatgagtcaacttgatactacacaattaaatgaattattgaagcaacagagtttcgaatatgtgcagttccaaacactttctaatttccaaattttattatcggtattcaataaaatttttgagaaattggagatgaaaaaatcttcaagaggctatattttacatcagcttaatttattcaaaattaccttggatgaaagaattaagaaatctaagattgacgatgccgataaatttatacgtgataatcagcccattaaaaaagaagaaaacattgtgaatgaagatgggcctaacacatcaaggcggacaaagaggccgaagcaaattagattactctcaattgcggattcctccgacgaatcctccacggaggattcaaatgtattcaaaaaggacggtgaatccatcgaagatggcgcatatggagaaaatgaagatgagaatgactctgagatgcaagagcagttaaaatctatgataaacgaacttataaactccaaaataagcacttttttacgggaccaaatggatcaatttgaattgaaaataaacgctttattagataaaattcttgaagaaaaagtcactcgtattatcgagcaaaaacttggttcacacacggggaagttttcaacgttgaagaggccacaactatacatgacggaagaacacaatgttggatttgatatggaagttcctaaaaaacttaggaccagtggtaagtacgcagagactgtgaaagataatgatgatcatcaagccatgtcaactactgcatcgccgtctcctgagcaagatcaagaagcaaagagctatactgacgaacaagaatttatgctggacaaatccatagacagcatagagggaatcattcttgaatggttcaccccaaacgctaagtacgccaaccaatgcgtgcattcaatgaacaaatcaggtaacaagtcgtggagagctaattgtgaagctttatacaaggaaagaaaatcaattgttgaattctatatttatttggtaaatcatgagagtctcgacagatacaaagcagttgatatttgcgaaaaattacgagatcagaacgaaggttcattttcgcgcttggcaaagttcctaaggaagtggaggcatgaccatcaaaattcatttgatggtctgttagtatatctatctaactga

SEQ ID NO: 4418 - DNA, 2871 bp, Artificial Sequence
  Description of Artificial Sequence: Synthetic polynucleotide
atgagatcttccattttgtttttattgaaattgatgaaaattatggatgttcagcaacagcaagaagctatgtcttctgaagataggtttcaggaattagtggactccttgaagccaagaactgcgcatcagtacaagacctactatactaagtacatacaatggtgtcagctcaatcaaattataccgacaccggaggacaattctgtaaatagcgtcccctataaagacttaccaatatctgctgaattgatacattggtttttgttagatacattaataaccgatgataagcctggagagaaaagagaagagactgaagatcttgatgaggaggaggagaattctttcaagatcgctacgttgaagaaaattataggcagtctcaattttttgagtaaattgtgcaaagttcatgaaaatccaaatgctaatatagacacaaaatacttggagtctgtcaccaagcttcatacccattggatagattctcaaaaggcaatcaccactaatgaaacaaataacacaaatactcaagtgttgtgtccaccattattgaaagtgtctttgaatttatggaacccagaaactaaccatctctctgagaaattttttaaaacctgttctgaaaaattaagattcttggtggattttcaattaagaagttatttgaacctttcttttgaagaaagatccaagataagatttggttccctcaagctcggtaaaagggacagagacgctataatttatcataaagtaactcattctgcggaaaaaaaagatacgccgggccaccatcaactccttgcattattaccccaagattgtccatttatctgccctcaaactacattagctgcatatttgtatttaaggttctatggtataccatctgtttccaaaggggatggctttcccaatttgaacgctgatgaaaatggctctcttttacaagatattcccatattaagaggcaaatctttaacaacttatcccagagaggaaacatttagtaattattatacaaccgtgtttaggtattgccacttaccttataaaagaagagaatatttcaacaaatgtaaccttgtttacccaacttgggatgaagacacttttagaacatttttcaatgaagaaaaccatggaaattggttagaacaacctgaggcctttgcgttccctgacaaaataccgttcgacttcaagaaaatcatgaacttcaaaagtccctacacttcttattctacaaacgctaaaaaggacccttttccgcctccaaaggatttattagttcaaatatttccggagattgatgaatataaaagacatgattatgaaggtttgtctcagaattctagggattttttggatttaatggaagttttaagagaaagatttttgagcaatttaccatggatttacaaattctttcctaatcatgatatattccaggaccccatttttggaaattccgattttcaatcttacttcaatgacaaaactatacattctaagggttctcccattttatctttcgatatattgccaggctttaataaaatctataagaataagacaaatttttactccctcttaatagaaaggccttctcagttgacatttgcttccagtcataatccagatacacaccccactcaaaaacaagaatctgaggggccattacaaatgagtcaacttgatactacacaattaaatgaattattgaagcaacagagtttcgaatatgtgcagttccaaacactttctaatttccaaattttattaagtgtattcaataaaatttttgagaaattggagatgaaaaaatcttctagaggctatattttacatcagcttaatttattcaaaattaccttggatgaaagaattaagaaatctaagattgacgatgccgataaatttatacgtgataatcagcccattaaaaaagaagaaaacattgtgaatgaagatgggcctaacacatccaggagaacaaagaggccgaagcaaattagattactctccattgcggattcctccgacgaatcctccacggaggattctaatgtattcaaaaaggacggtgaatccatcgaagatggcgcatatggagaaaatgaagatgagaatgactctgagatgcaagagcagttaaaatctatgataaacgaacttataaactccaaaataagcacttttttaagagaccaaatggatcaatttgaattgaaaataaacgctttattagataaaattcttgaagaaaaagtcactcgtattatcgagcaaaaacttggttctcacacggggaagttttctacgttgaagaggccacaattgtacatgacggaagaacacaatgttggatttgatatggaagttcctaaaaaacttaggaccagtggtaagtacgcagagactgtgaaagataatgatgatcatcaagccatgtctactactgcaagtccgtctcctgagcaagatcaagaagcaaagagctatactgacgaacaagaatttatgttggacaaatccatagacagcatagagggaatcattcttgaatggttcaccccaaacgctaagtacgccaaccaatgcgtgcattctatgaacaaatctggtaacaagtcttggagagctaattgtgaagctttatacaaggaaagaaaatccattgttgaattctatatttatttggtaaatcatgagagtctcgacagatacaaagcagttgatatttgcgaaaaattaagagatcagaacgaaggttcttttagccgcttggcaaagttcttgaggaagtggaggcatgaccatcaaaattcttttgatggtttattagtatatttatctaactga

SEQ ID NO: 4419 - DNA, 1404 bp, Saccharomyces cerevisiae
atgcgaatctcaaaaaatagtcataagcggcaaagaacgaggctatatttcctcgttacatttattatttattcgataataccctgccgtgcggtactcgtgccttggctggatgatgacccatttgaagcaacgcttctagaaatgggggatgaaccatggagtaaggacatcctttcaagcacacctccgttacatccatctgaagttaccgaggataacaaaagcttaaaacaaaggggcaatgtaccgcaatatgtcatcgataatagccctctgctccatttatatagtgaagaaaagtactggccagctgatgttaaggattttgtaaaaagattccagttgagagaccacagtggggagaaaattatcaatgaacaccttcgtgacttaagtgacttacaagagtattattcggtagagttagagaacggaacgtggggccgagtatccagtgaaggtacatatatgacaagtttagatgattttgataagggccctgactggttgttgggtgaacaaccagaatatggtacaggtcacataaagaaagcaccagcagttctttttgtcgttgacaaaggaaatggttgggtagacgcgttctggttttatttctaccccttcaattggggtccttatattatgggctccggaccatggggaaatcatgtaggggactgggaacattctttagtacgattctataaaggagaaccacaatatctatggatgagtgcgcatgggggtggtagtgcctataagttcgaagccattgagaaaatcaaaagattgcgtcgtgttgacggtaaattgacaaacgaggttattaagaagcctttaatatttagtgcaagaggcacacatgcacattatgcatcagtcggtcaacatgcgcacgatgttccgtttttctttatgccattgagtgactttactgatagagggccattatgggatccttctttaaactattatgcctatacagtgactgtgggggaaaaaatgacaccatgcggcgctgaagaaactaaaatgggactagaatggctatcgttcaaaggcgcttggggcgataaacaattaagacctagggatcccagacaaaaatggtgcccatttcaatggaaatatattgacggaccaaaaggtccactattcaaaaatatggaaagggtttctttatgccaaagatttaaatggtggaatttttggaagggctgcccggcaagaagatatataaaaagaggggaaggtttggatgcagaaaagaatgatcttgtgggtgacaattgtggtatcttgctgtacaacataaggccaaagtggctgcgtagcatactccgttttttgacgtggaggggaagcgtatgtttcattatggactactttacagggtaa

SEQ ID NO: 4420 - DNA, 1404 bp, Artificial Sequence
  Description of Artificial Sequence: Synthetic polynucleotide
atgagaatctccaaaaatagtcataagagacaaagaacgaggttatatttcctcgttacatttattatttattctataataccctgccgtgcggtactcgtgccttggcttgatgatgacccatttgaagcaacgcttttagaaatgggggatgaaccatggagtaaggacatcctttctagcacacctccgttacatccatctgaagttaccgaggataacaaaagcttaaaacaaaggggcaatgtaccgcaatatgtcatcgataatagccctttactccatttatatagtgaagaaaagtactggccagctgatgttaaggattttgtaaaaagattccagttgagagaccacagtggggagaaaattatcaatgaacaccttcgtgacttaagtgacttacaagagtattattctgtagagttagagaacggaacgtggggcagagtatccagtgaaggtacatatatgacaagtttagatgattttgataagggccctgactggttgttgggtgaacaaccagaatatggtacaggtcacataaagaaagcaccagcagttctttttgtcgttgacaaaggaaatggttgggtagacgcgttctggttttatttctaccccttcaattggggtccttatattatgggctccggaccatggggaaatcatgtaggggactgggaacattctttagtaagattctataaaggagaaccacaatatttatggatgagtgcgcatgggggtggtagtgcctataagttcgaagccattgagaaaatcaaaagattgcgtcgtgttgacggtaaattgacaaacgaggttattaagaagcctttaatatttagtgcaagaggcacacatgcacattatgcatctgtcggtcaacatgcgcacgatgttccgtttttctttatgccattgagtgactttactgatagagggccattatgggatccttctttaaactattatgcctatacagtgactgtgggggaaaaaatgacaccatgcggcgctgaagaaactaaaatgggattagaatggttatctttcaaaggcgcttggggcgataaacaattaagacctagggatcccagacaaaaatggtgcccatttcaatggaaatatattgacggaccaaaaggtccattattcaaaaatatggaaagggtttctttatgccaaagatttaaatggtggaatttttggaagggctgcccggcaagaagatatataaaaagaggggaaggtttggatgcagaaaagaatgatcttgtgggtgacaattgtggtatcttgttgtacaacataaggccaaagtggcttcgtagcatactccgttttttgacgtggaggggaagcgtatgtttcattatggactactttacagggtga

SEQ ID NO: 4421 - DNA, 1233 bp, Saccharomyces cerevisiae
atgttttccatattcaattcaccatgtgtttttgaacagctgccatcttttagtcagcccctacattcgcgttattttgattgcagttctccagtgagctattatccagaatgtaaaaggaggaaagcaataaaagctaacctaagagctccaaaaaaaagcgatgcaaattgttcagaacctttgaggtatgcacttgctgaaacaccaaatggttatacattaagcttgtctaagcggattccatatgaacttttttcaaagtacgttaatgagaaattaggtgagctaaaggagaaccattacagaccaacttaccatgttgtccaagatttttttggaaaccagtattatgttgaagatgaagcggatgaagatgctctattgagatctgcattgaaagatctggattttagagccataggaaagaaaattgctaaggatcttttccaagactacgaaatagaattgaatcatagaggtgatgaattgagcatattgagtaagaaggataaaatctttaaggaattctctctagaccaagtgtttgaagatgtttttgttattggctgtggagttgaaaacatagatgatggctcgagagaaaaatatgcacttttaaagattggtttagttaagcatgaggaagaaatttccgaaggtggcatcaacgaaccaaagatgccaataattgaatccaaaatagacgagtctcacgatgatgttaacatgtctgaatctttgaaggaggaagaagcggagaaagcgaaagaaccactaaccaaagaagaccaaataaaaaaatggatagaggaagaaagattgatgcaggaggaaagcagaaaatcagaacaggaaaaagctgccaaggaagatgaagaaaggcaaaagaaagagaaggaagccagattgaaggcaaggaaagaatctttgataaataagcaaaaaaccaagaggtcccagcaaaaaaaattgcaaaattccaaatcattgcctatctctgagattgaggccagcaataaaaataataatagcaattctggttcagcagaaagtgataatgaaagtataaacagtgattctgatacgactttggatttctctgtgtctggtaatacactaaaaaaacacgcttcacccctattagaagacgttgaggatgaggaagttgacagatacaacgagtccctaagcagatctcccaagggaaactctattattgaggagatataa

SEQ ID NO: 4422 - DNA, 1233 bp, Artificial Sequence
  Description of Artificial Sequence: Synthetic polynucleotide
atgttttccatattcaattctccatgtgtttttgaacagttaccatcttttagtcagccccttcattctcgttattttgattgcagttctccagtgagctattatccagaatgtaaaaggaggaaagcaataaaagctaacttgagagctccaaaaaaaagcgatgcaaattgttctgaacctttgaggtatgcacttgctgaaacaccaaatggttatacattaagcttgtctaagagaattccatatgaacttttttccaagtacgttaatgagaaattaggtgagttgaaggagaaccattacagaccaacttaccatgttgtccaagatttttttggaaaccagtattatgttgaagatgaagcggatgaagatgctttattgagatctgcattgaaagatttggattttagagccataggaaagaaaattgctaaggatcttttccaagactacgaaatagaattgaatcatagaggtgatgaattgagcatattgagtaagaaggataaaatctttaaggaattctctttggaccaagtgtttgaagatgtttttgttattggctgtggagttgaaaacatagatgatggctccagagaaaaatatgcacttttaaagattggtttagttaagcatgaggaagaaatttccgaaggtggcatcaacgaaccaaagatgccaataattgaatccaaaatagacgagtctcacgatgatgttaacatgtctgaatctttgaaggaggaagaagcggagaaagcgaaagaaccattgaccaaagaagaccaaataaaaaaatggatagaggaagaaagattgatgcaggaggaaagcagaaaaagtgaacaggaaaaagctgccaaggaagatgaagaaaggcaaaagaaagagaaggaagccagattgaaggcaaggaaagaatctttgataaataagcaaaaaaccaagaggtcccagcaaaaaaaattgcaaaattccaaatctttgcctatctctgagattgaggccagcaataaaaataataatagcaattctggttctgcagaaagtgataatgaaagtataaacagtgattctgatacgactttggatttctctgtgtctggtaatacattaaaaaaacacgcttctcccttattagaagacgttgaggatgaggaagttgacagatacaacgagtccttaagcagatctcccaagggaaactctattattgaggagatatga

SEQ ID NO: 4423 - DNA, 2316 bp, Saccharomyces cerevisiae
atgtctgtgcgaaacctcaccaataatcgtcattccaacagcgaaaatagtgtttccggaagcgaaaactccttttattcctcgaatgagcaatcaagacaaagctcatcattagaacctgcagatggtcagaacgttagggtgagcggtaatcctttccttggaagtgaagaatttgacgaagattataattcacccagtggagacgatgagcggcgtggggcaaatgaatattccagttcttcatccataaattataataacgatcctaacagcgatacttctcttctggctaatgaaaagaactcacccgagagaaatggtcaaagaatgtcagactataagggctattatgctaagactaacctaacttctgctaataacttaaacaatcataataacaataattataagaacattataagcagtagtaacgataatagttttgcatcacatttacagccgccggacagaaacttaccgtctcatccttcttcaaataatatgagtagcttttctaacaacagcttaattaagtctccaccaccttttgacagatatccgctagtaggaacgaggcatatttcagcggctcaatctcagtcgcagaaccttataaatgaaaagaaaagagcgaatatgactggctcatcttcttctgctcacgactcttcattatcatccaccaacttatacatgggcgaacaggatttttcgccctttggcggttatccagcttccttctttccgttaacgttggacgaaaaggaagacgatgactacattcataatccaaatgtcgaggaagaagcaaagttagatagaaggaggttcgttgacgacttcaaacacatggatagaagatctttcttggggcttctgggtattctatttttatttatggctggtatatttattttcattgtattacctgcaattacattttccggggtagtttatcatcatgaacatgttcatgcggcaaattcagcaggatcgtcgtcttctaatactacatccaagtcattgactgaatatcaatatcctcaacttgcggctataaggacaactttagttgatccagacacacctgacagtgcgaagacaagagtagcgaaagatggatctaaatggcagctggtgttttccgatgaatttaatgctgaaggtaggaccttttacgatggcgatgaccagttttggacagctcctgacatccactacgacgctacgaaagatcttgaatggtactcaccagatgccgttacaactacaaatggtaccttgacgttgagaatggatgcattcagaaaccatgacctttattacagatctggtatggtacagagctggaacaaactctgctttacagaaggtgcgttagaagtttccgcgaacctccctaattatggtcgagttacaggattatggcctggtatgtggaccatggggaacttgggcagaccaggttatttggcgagtactcaaggtgtttggccttattcatatgaagcatgtgacgctggtataacaccaaaccaaagttccccagatggtatttcttacttgccgggacaaaagttgagtgtttgtacttgtgataatgaggatcatccaaatcagggagttggaagaggcgcaccggaaatagatattttagaaggtgaagctgatacaattttgggtgttggtgttgcgtcacaatctctacaaattgctccatttgatatatggtacatgcccgattatgacttcatcgaagtttataatttcaccacaacaactatgaatacttacgctggtgggccttttcaacaagctgtctcagcaatatccactttaaatgtaacatggtatgaatttggggaggaagcaggttattttcaaaagtatgccattgaatatctcaatgatgacgacaacggatatattcgttggtttgtgggagagaaccctactttcacactatatgctacttctttacatcctagtggtaatattgactggaggagaataagtaaggagccaatgtcagcgattttaaacttaggtatttccaacaactgggcctatatcgactggcaatatatatttttcccggtgacaatgtcaatagattacgtccgattataccagccgaagggttctacgtccattacttgtgatcctgaggactacccgacatatgattatatccaaagccatctaaatgcatattataacgccaatttaactgattgggaacaggctggatatactttcccaaaaaatattctaacaggaggttgtagtagttcaaaattctcattatcctga

SEQ ID NO: 4424 - DNA, 2316 bp, Artificial Sequence
  Description of Artificial Sequence: Synthetic polynucleotide
atgtctgtgagaaacctcaccaataatcgtcattccaacagcgaaaatagtgtttccggaagcgaaaactccttttattcctctaatgagcaatctagacaaagctcttctttagaacctgcagatggtcagaacgttagggtgagcggtaatcctttccttggaagtgaagaatttgacgaagattataattctcccagtggagacgatgagagacgtggggcaaatgaatattccagttcttcttccataaattataataacgatcctaacagcgatacttctcttttagctaatgaaaagaactctcccgagagaaatggtcaaagaatgtctgactataagggctattatgctaagactaacttgacttctgctaataacttaaacaatcataataacaataattataagaacattataagcagtagtaacgataatagttttgcatctcatttacagccgccggacagaaacttaccgtctcatccttcttccaataatatgagtagcttttctaacaacagcttaattaagtctccaccaccttttgacagatatccgttagtaggaacgaggcatattagtgcggctcaatctcagtctcagaaccttataaatgaaaagaaaagagcgaatatgactggctcttcttcttctgctcacgactcttctttatcttccaccaacttatacatgggcgaacaggatttttctccctttggcggttatccagcttccttctttccgttaacgttggacgaaaaggaagacgatgactacattcataatccaaatgtcgaggaagaagcaaagttagatagaaggaggttcgttgacgacttcaaacacatggatagaagatctttcttggggcttttgggtattttatttttatttatggctggtatatttattttcattgtattacctgcaattacattttccggggtagtttatcatcatgaacatgttcatgcggcaaattctgcaggatcttcttcttctaatactacatccaagtctttgactgaatatcaatatcctcaacttgcggctataaggacaactttagttgatccagacacacctgacagtgcgaagacaagagtagcgaaagatggatctaaatggcagttggtgttttccgatgaatttaatgctgaaggtaggaccttttacgatggcgatgaccagttttggacagctcctgacatccactacgacgctacgaaagatcttgaatggtactctccagatgccgttacaactacaaatggtaccttgacgttgagaatggatgcattcagaaaccatgacctttattacagatctggtatggtacagagctggaacaaactctgctttacagaaggtgcgttagaagtttccgcgaacctccctaattatggtagagttacaggattatggcctggtatgtggaccatggggaacttgggcagaccaggttatttggcgagtactcaaggtgtttggccttattcttatgaagcatgtgacgctggtataacaccaaaccaaagttccccagatggtatttcttacttgccgggacaaaagttgagtgtttgtacttgtgataatgaggatcatccaaatcagggagttggaagaggcgcaccggaaatagatattttagaaggtgaagctgatacaattttgggtgttggtgttgcgtctcaatctttacaaattgctccatttgatatatggtacatgcccgattatgacttcatcgaagtttataatttcaccacaacaactatgaatacttacgctggtgggccttttcaacaagctgtctctgcaatatccactttaaatgtaacatggtatgaatttggggaggaagcaggttattttcaaaagtatgccattgaatatctcaatgatgacgacaacggatatattcgttggtttgtgggagagaaccctactttcacattatatgctacttctttacatcctagtggtaatattgactggaggagaataagtaaggagccaatgagtgcgattttaaacttaggtatttccaacaactgggcctatatcgactggcaatatatatttttcccggtgacaatgagtatagattacgtcagattataccagccgaagggttctacgtccattacttgtgatcctgaggactacccgacatatgattatatccaaagccatttgaatgcatattataacgccaatttaactgattgggaacaggctggatatactttcccaaaaaatattttaacaggaggttgtagtagttctaaattctctttatcctga

SEQ ID NO: 4425 - DNA, 981 bp, Saccharomyces cerevisiae
atgtctgctacctctactgctacttccacaagtgcctctcaattgcacttaaactctactccagttactcactgcttatctgacatcgttaagaaagaagattggtctgactttaaatttgctcccatccgcgaatccactgtctctcgtgctatgacttctcgttatttcaaggatcttgacaagtttgccgtttctgacgtgattattgtcggtgcgggctcttcaggtttatccgccgcttacgtcatcgccaagaacagaccagacttgaaggtttgtattatcgaaagttcagttgcaccaggtggtggtagttggttgggtggtcaattatttagtgccatggttatgagaaaaccagctcatttgttcttacaagagttggaaatcccttacgaagacgaaggtgactatgttgtcgttaagcatgccgctttgttcatctctactgtcctttcaaaggtcttgcaattaccaaatgttaaactgttcaatgctacctgtgttgaagatttggttaccagaccacctaccgaaaagggcgaagtcaccgttgctggtgttgtcaccaactggacgttagttacccaagctcacggtactcaatgttgcatggaccctaacgtaattgaattggcaggttacaaaaatgacggaactcgtgacttgagtcaaaagcatggtgtcattttatccactaccggtcatgatggtccatttggtgctttctgcgccaagagaatcgtcgacattgatcaaaaccaaaaattgggcggtatgaagggtctggacatgaaccatgccgaacacgatgtcgttattcactctggtgcatacgccggtgttgacaacatgtactttgctggtatggaagttgctgaactggatggattaaaccgtatgggtccaacttttggagctatggctttgagtggtgttcatgctgctgagcaaattttgaaacactttgctgcttag

SEQ ID NO: 4426 - DNA, 981 bp, Artificial Sequence
  Description of Artificial Sequence: Synthetic polynucleotide
atgtctgctacctctactgctacttccacaagtgcctctcaattgcacttaaactctactccagttactcactgcttatctgacatcgttaagaaagaagattggtctgactttaaatttgctcccatccgcgaatccactgtctctcgtgctatgacttctcgttatttcaaggatcttgacaagtttgccgtttctgacgtgattattgtcggtgcgggctcttctggtttatccgccgcttacgtcatcgccaagaacagaccagacttgaaggtttgtattatcgaaagttctgttgcaccaggtggtggtagttggttgggtggtcaattatttagtgccatggttatgagaaaaccagctcatttgttcttacaagagttggaaatcccttacgaagacgaaggtgactatgttgtcgttaagcatgccgctttgttcatctctactgtcctttccaaggtcttgcaattaccaaatgttaaattattcaatgctacctgtgttgaagatttggttaccagaccacctaccgaaaagggcgaagtcaccgttgctggtgttgtcaccaactggacgttagttacccaagctcacggtactcaatgttgcatggaccctaacgtaattgaattggcaggttacaaaaatgacggaactcgtgacttgagtcaaaagcatggtgtcattttatccactaccggtcatgatggtccatttggtgctttctgcgccaagagaatcgtcgacattgatcaaaaccaaaaattgggcggtatgaagggtttggacatgaaccatgccgaacacgatgtcgttattcactctggtgcatacgccggtgttgacaacatgtactttgctggtatggaagttgctgaattagatggattaaaccgtatgggtccaacttttggagctatggctttgagtggtgttcatgctgctgagcaaattttgaaacactttgctgcttga

SEQ ID NO: 4427 - DNA, 2124 bp, Saccharomyces cerevisiae
atggttttgaaatctacttccgcaaatgatgtttcagtatatcaggtttctggtacaaacgtttcaagatcacttccagactggattgcgaaaaagcgcaaaaggcaattaaagaatgatttagaatatcaaaatagagtagaactgattcaagattttgaatttagcgaagcctccaataagattaaagtgagtagagatgggcaatattgcatggctaccggtacatacaaacctcagatccatgtctacgattttgctaatttgtcactgaagttcgatagacacacagatgctgaaaacgtggatttcactattctctctgacgattggactaaaagtgtacatttacaaaatgatagaagtattcaattccaaaacaaaggtggtctacattacaccacaagaattcctaaatttgggagaagtttagtttacaataaggtaaactgtgatttatatgttggtgcgagcggtaatgagttatacaggttgaacttggaaaaggggagatttttaaacccattcaagttggatactgaaggcgtgaaccatgtttctatcaatgaagtaaatgggttgttagcggcaggcacggaaacaaatgtagtggaattctgggatccaaggtcgcgttcccgtgtttcaaagctatatttagagaacaatattgacaacagaccattccaagtcaccacaaccagtttccgtaatgacgggttaacttttgcatgtggtacgtcgaacggttattcatacatttatgacttgcgtacttctgaaccttccattattaaagaccaaggttatgggtttgacattaagaaaattatttggttggataacgtcggcacggaaaataaaattgttacatgtgacaagagaattgcaaaaatatgggatagactagatggtaaggcatacgcttctatggagcctagtgttgatattaacgacattgagcatgtaccaggtacaggtatgtttttcaccgctaacgaaagtattcccatgcatacatattatattccaagtttaggaccatctccacgctggtgctcattcttggattctatcacagaagaattagaagaaaaaccaagtgacactgtttactctaactacaggttcattactagagacgacgttaaaaaattgaatttaacgcacttggtgggatccagagtattaagagcatacatgcatggtttctttattaacactgaactttacgataaggtttcattaattgctaatccagatgcctacaaagatgaaagagaaagagaaattagacgtagaattgagaaagaaagagaatccagaatcagaagttcaggggctgttcaaaaacctaaaattaaagtcaataaaacattggttgataaactatctcaaaaacgtggtgataaagttgcaggaaaggttcttacggatgaccgtttcaaagaaatgtttgaggatgaagaatttcaagtcgatgaagatgactatgatttcaaacaattgaatccagtaaaatccatcaaagaaaccgaagaaggtgctgctaaacgtattagggcgctaactgctgccgaagagtccgacgaagaaagaattgcaatgaaggatggcagaggtcactatgactacgaggatgaagagtctgatgaagaagaatctgatgatgaaacgaaccaaaagtcaaataaggaagaattaagtgaaaaagatttgagaaagatggaaaagcaaaaggcactaattgaacgcagaaagaaggaaaaggagcaaagcgaacgttttatgaacgaaatgaaagccggcacttccacgagtacgcaaagagacgaaagtgctcacgttacatttggcgaacaagtaggcgaattgcttgaggtggaaaatggaaagaaatcaaatgaatccattttacgtcgtaaccaacgcggtgaagcagaacttacttttattcctcaaagaaaaagcaaaaaagacggaaattataaatccaggcgtcatgataattcatcggatgaagaaggtattgacgaaaatggtaataagaaggacaatggtaggtcgaagcccagattcgaaaatagaagaagagctagcaaaaatgcgttccgtggtatgtag

SEQ ID NO: 4428 - DNA, 2124 bp, Artificial Sequence
  Description of Artificial Sequence: Synthetic polynucleotide
atggttttgaaatctacttccgcaaatgatgtttctgtatatcaggtttctggtacaaacgtttctagatctcttccagactggattgcgaaaaagcgcaaaaggcaattaaagaatgatttagaatatcaaaatagagtagaattgattcaagattttgaatttagcgaagcctccaataagattaaagtgagtagagatgggcaatattgcatggctaccggtacatacaaacctcagatccatgtctacgattttgctaatttgtctttgaagttcgatagacacacagatgctgaaaacgtggatttcactattctctctgacgattggactaaaagtgtacatttacaaaatgatagaagtattcaattccaaaacaaaggtggtttgcattacaccacaagaattcctaaatttgggagaagtttagtttacaataaggtaaactgtgatttatatgttggtgcgagcggtaatgagttatacaggttgaacttggaaaaggggagatttttaaacccattcaagttggatactgaaggcgtgaaccatgtttctatcaatgaagtaaatgggttgttagcggcaggcacggaaacaaatgtagtggaattctgggatccaaggtctcgttcccgtgtttccaagctttatttagagaacaatattgacaacagaccattccaagtcaccacaaccagtttccgtaatgacgggttaacttttgcatgtggtacgtccaacggttattcttacatttatgacttgcgtacttctgaaccttccattattaaagaccaaggttatgggtttgacattaagaaaattatttggttggataacgtcggcacggaaaataaaattgttacatgtgacaagagaattgcaaaaatatgggatagattagatggtaaggcatacgcttctatggagcctagtgttgatattaacgacattgagcatgtaccaggtacaggtatgtttttcaccgctaacgaaagtattcccatgcatacatattatattccaagtttaggaccatctccacgctggtgctctttcttggattctatcacagaagaattagaagaaaaaccaagtgacactgtttactctaactacaggttcattactagagacgacgttaaaaaattgaatttaacgcacttggtgggatccagagtattaagagcatacatgcatggtttctttattaacactgaactttacgataaggtttctttaattgctaatccagatgcctacaaagatgaaagagaaagagaaattagacgtagaattgagaaagaaagagaatccagaatcagaagttccggggctgttcaaaaacctaaaattaaagtcaataaaacattggttgataaattatctcaaaaacgtggtgataaagttgcaggaaaggttcttacggatgaccgtttcaaagaaatgtttgaggatgaagaatttcaagtcgatgaagatgactatgatttcaaacaattgaatccagtaaaatccatcaaagaaaccgaagaaggtgctgctaaacgtattagggcgttgactgctgccgaagagtccgacgaagaaagaattgcaatgaaggatggcagaggtcactatgactacgaggatgaagagtctgatgaagaagaatctgatgatgaaacgaaccaaaagagcaataaggaagaattaagtgaaaaagatttgagaaagatggaaaagcaaaaggcattgattgaacgcagaaagaaggaaaaggagcaaagcgaacgttttatgaacgaaatgaaagccggcacttccacgagtacgcaaagagacgaaagtgctcacgttacatttggcgaacaagtaggcgaattgcttgaggtggaaaatggaaagaaatctaatgaatccattttacgtcgtaaccaacgcggtgaagcagaacttacttttattcctcaaagaaaaagcaaaaaagacggaaattataaatccaggcgtcatgataattcttctgatgaagaaggtattgacgaaaatggtaataagaaggacaatggtaggtctaagcccagattcgaaaatagaagaagagctagcaaaaatgcgttccgtggtatgtga

SEQ ID NO: 4429 - DNA, 636 bp, Saccharomyces cerevisiae
atgagcaccgcattcaacgattactgcactgtttgtgatcgtctcattccaacatctccacagaaaacgaacattaataccaggaagatccaaagggacaatgaaaccaagagcagtttacaatcaaataagttatattgctccgaagattgtaagctgaaggattcgaaccctcttaatgagaaattattatcccacttgcataaaaaatcaaaaacttctcattcgcataatctcactccaccgctttcatattctaaaaatttaactgcatcaaacctcttcgagccgactacctcactatcttcatctccgacatcttcaactatcccctttgacgagttggagaagctagagtccttattaatttcaccattgctgctacctcaggatggtatagtcaatcctaagcaggagtctaatccttctcgtgttgacgaatatgatgaaaatgaacattatttgaacttagccgactctcttagactcgattctagttaccaattgcattcaaaggcacatttgggttacgaaaacaacttgccacgatcaaacgatctaattgatgatcatttgatctcagatcagatcattgagaataactacaacctatggtttagactatcctccagttaa

SEQ ID NO: 4430 - DNA, 636 bp, Artificial Sequence
  Description of Artificial Sequence: Synthetic polynucleotide
atgagcaccgcattcaacgattactgcactgtttgtgatcgtctcattccaacatctccacagaaaacgaacattaataccaggaagatccaaagggacaatgaaaccaagagcagtttacaaagcaataagttatattgctccgaagattgtaagttgaaggattccaaccctcttaatgagaaattattatcccacttgcataaaaaatctaaaacttctcattctcataatctcactccaccgctttcctattctaaaaatttaactgcatctaacctcttcgagccgactacctctttatcttcttctccgacatcttctactatcccctttgacgagttggagaagttggagtccttattaatttctccattgttattgcctcaggatggtatagtcaatcctaagcaggagtctaatccttctcgtgttgacgaatatgatgaaaatgaacattatttgaacttagccgactctcttagactcgattctagttaccaattgcattctaaggcacatttgggttacgaaaacaacttgccaagatctaacgatttgattgatgatcatttgatcagtgatcagatcattgagaataactacaacctttggtttagattatcctccagttga

SEQ ID NO: 4431 - DNA, 162 bp, Saccharomyces cerevisiae
atggggttcctccctgagtgtaatttaacgtgtgctttcttattgcattcgtttacattccctattgctcattgcccttctttcagttgggcatctttttttttcacaattaggccgcccttttttcccaaattggcacttgtttgtacgatctttagctag

SEQ ID NO: 4432 - DNA, 162 bp, Artificial Sequence
  Description of Artificial Sequence: Synthetic polynucleotide
atggggttcctccctgagtgtaatttaacgtgtgctttcttattgcattcttttacattccctattgctcattgcccttctttcagttgggcatctttttttttcacaattaggccgcccttttttcccaaattggcacttgtttgtacgatctttagctga

SEQ ID NO: 4433 - DNA, 867 bp, Saccharomyces cerevisiae
atgatggtacccaggattagtgcttcaccagttttcaagaggatatttcttcgatggggatttgtaactttacccatacagaaaaccgtatcccatacactgcgcagggactttagtgccccttgtaggagtatggtaaaatgccttctcctacgacctgggataagtgtgcactcagcacaagacagaaaattttacagtacagaggaaaaaagtagtcagtttgatgaaaataaaagcaaaagtaacaatgggaagaaaaatgagccacacggtattaaaggattaatggctaagtatggttattctgcactgatcgtatatatcctcttaacttgtgttgatttgccattatgttttctgggagtccactcactaggtgaagagaagattaagatctatctgaacagaggtaagcaattgattgggatgggtgagcctgacgaaagcaaagtcattcaagatgttagaaggaaacaggctcatcgcgaagcagtgcaagcagagaatgctgacaaggtggaggacgcatcgaggaaaactttcaatgagagatggcaagagatgaaggacagcacgttgttggccgaattgctaattgcgtatggcatacacaagagtttgatcatcgttagagtacccctgacggcagtgctaacgccatccttcgtcaagcttctgcagaggtttggcatcgacttgatgaagaagcagaaaaaggtattccaaacgatggcctctggtgccaaaataagatacaaagggaacaaccctagcgatttcatcaagaatgagggcacagcgctcgacattacaaagcgcaaaccaagaaccaaaggccagaaatggtttgatggcctaatgtga

SEQ ID NO: 4434 - DNA, 867 bp, Artificial Sequence
  Description of Artificial Sequence: Synthetic polynucleotide
atgatggtacccaggattagtgcttctccagttttcaagaggatatttcttcgttggggatttgtaactttacccatacagaaaaccgtatcccatacattacgcagggactttagtgccccttgtaggagtatggtaaaatgccttctcttaagacctgggataagtgtgcactctgcacaagacagaaaattttacagtacagaggaaaaaagtagtcagtttgatgaaaataaaagcaaaagtaacaatgggaagaaaaatgagccacacggtattaaaggattaatggctaagtatggttattctgcattaatcgtatatatcctcttaacttgtgttgatttgccattatgttttttgggagtccactctttgggtgaagagaagattaagatctatttgaacagaggtaagcaattgattgggatgggtgagcctgacgaaagcaaagtcattcaagatgttagaaggaaacaggctcatcgcgaagcagtgcaagcagagaatgctgacaaggtggaggacgcaagcaggaaaactttcaatgagagatggcaagagatgaaggacagcacgttgttggccgaattgttaattgcgtatggcatacacaagagtttgatcatcgttagagtacccttaacggcagtgttaacgccatccttcgtcaagcttttacagaggtttggcatcgacttgatgaagaagcagaaaaaggtattccaaacgatggcctctggtgccaaaataagatacaaagggaacaaccctagcgatttcatcaagaatgagggcacagcgctcgacattacaaagcgcaaaccaagaaccaaaggccagaaatggtttgatggcttaatgtga

SEQ ID NO: 4435 - DNA, 468 bp, Saccharomyces cerevisiae
atgaaggttgaagttgattccttttccggcgctaagatctacccaggtagaggtactttatttgtccgtggtgactccaaaattttcagattccaaaactccaaatctgcttctttgttcaaacaaagaaagaacccaagaagaatcgcttggaccgtcttgttcagaaagcatcacaagaagggtatcaccgaagaagttgctaagaagagatctagaaagaccgttaaggcgcaaagaccaatcactggtgcttctttggacttgatcaaggaaagaagatctttgaagccagaagttagaaaagctaacagagaagaaaaattgaaagccaacaaggaaaagaagagagctgaaaaggctgctagaaaggctgaaaaggctaagtccgctggtgtccaaggttccaaggtttccaagcaacaagctaagggtgctttccaaaaggttgccgccacttcccgttaa

SEQ ID NO: 4436 - DNA, 468 bp, Artificial Sequence
  Description of Artificial Sequence: Synthetic polynucleotide
atgaaggttgaagttgattccttttccggcgctaagatctacccaggtagaggtactttatttgtccgtggtgactccaaaattttcagattccaaaactccaaatctgcttctttgttcaaacaaagaaagaacccaagaagaatcgcttggaccgtcttgttcagaaagcatcacaagaagggtatcaccgaagaagttgctaagaagagatctagaaagaccgttaaggcgcaaagaccaatcactggtgcttctttggacttgatcaaggaaagaagatctttgaagccagaagttagaaaagctaacagagaagaaaaattgaaagccaacaaggaaaagaagagagctgaaaaggctgctagaaaggctgaaaaggctaagtccgctggtgtccaaggttccaaggtttccaagcaacaagctaagggtgctttccaaaaggttgccgccacttcccgttga

SEQ ID NO: 4437 - DNA, 1299 bp, Saccharomyces cerevisiae
atgtacaagttggacaataacgacattgacgatgaaacgaataactctgtttcactgacgagccttttagaatttctcgacccgatcgcttcaaaagtagtttcaaaatactaccatggttctcatctttcgaaagcagaacagaaattgcgaaattttgagggttttagaagacgtaaaccccatcatgaacatgatagtcatcatccacatcacctgaatagaagtcgctctttcttgcaattagaggacttcaaagtaagagcgttacaaagaattaggaatctggataaacccttggattccatttttttcaaaaacagctcaaggttggagaaagcattttaccctttcacactgtttaatatatttttcatcggatttttgatgggcaggtttccagaatggtttcatgtttactataccatcctgttcttcgttctgatgcccatacgtttttacacatactataaaaccaaaaaccactactttctggctgatttttgttactttgtgaacatgctatgcctattgtttatttggattttcccatattcatacagccttttccagtcatgttttgcattcactttcggaacgttatgctttgccgttattacttggagaaattccttggtaatacattctatagataagactacttcatgcttcattcacataatacctccctgtgtcatgtacgtcatctatcatggattaccactcgaatacaaaatcgaaaggtttccgggagcaattattcaaagtgaattggacatcaaaaaaaatattctttggacatccctttattatttggtttggcaatcattataccattacttcatcacgttgaaaaagtctagcaagatcaagtcaggggaaagaatgacaagttttgaatatttaaccacacaccaatttaaaaacttttgggcagttaaattaaggtcaccttggccgatgataatttacacactttctcaatatttctatcaactattcactatgctattgtgtggcatatggattcgttacaaattagctgcggccctatttttaactatagtatttctatgggcgtctcataatggggctacctactatatcgaccactacgggaagaatttcgaaaaagaagttgatagattacgtcttgaagttgagaatttacaacaaaagttacagcctgattctgatgcagtcatatctgatgcctccgtgaatgataaggattacttgaatgtcaaccgtgacgaagattttgacgactcttcaagtgtatcctcaaagagtgattaa

SEQ ID NO: 4438 - DNA, 1299 bp, Artificial Sequence
  Description of Artificial Sequence: Synthetic polynucleotide
atgtacaagttggacaataacgacattgacgatgaaacgaataactctgtttctttgacgagccttttagaatttctcgacccgatcgcttccaaagtagtttccaaatactaccatggttctcatctttctaaagcagaacagaaattgagaaattttgagggttttagaagacgtaaaccccatcatgaacatgatagtcatcatccacatcacttgaatagaagtcgctctttcttgcaattagaggacttcaaagtaagagcgttacaaagaattaggaatttggataaacccttggattccatttttttcaaaaacagcagtaggttggagaaagcattttaccctttcacattatttaatatatttttcatcggatttttgatgggcaggtttccagaatggtttcatgtttactataccatcttattcttcgttttgatgcccatacgtttttacacatactataaaaccaaaaaccactactttttggctgatttttgttactttgtgaacatgttgtgcttgttgtttatttggattttcccatattcttacagccttttccagtcctgttttgcattcactttcggaacgttatgctttgccgttattacttggagaaattccttggtaatacattctatagataagactacttcttgcttcattcacataatacctccctgtgtcatgtacgtcatctatcatggattaccactcgaatacaaaatcgaaaggtttccgggagcaattattcaaagtgaattggacatcaaaaaaaatattctttggacatccctttattatttggtttggcaatctttataccattacttcatcacgttgaaaaagtctagcaagatcaagagtggggaaagaatgacaagttttgaatatttaaccacacaccaatttaaaaacttttgggcagttaaattaaggtctccttggccgatgataatttacacactttctcaatatttctatcaattattcactatgcttttgtgtggcatatggattcgttacaaattagctgcggccttatttttaactatagtatttttatgggcgtctcataatggggctacctactatatcgaccactacgggaagaatttcgaaaaagaagttgatagattacgtcttgaagttgagaatttacaacaaaagttacagcctgattctgatgcagtcatatctgatgcctccgtgaatgataaggattacttgaatgtcaaccgtgacgaagattttgacgactcttccagtgtatcctccaagagtgattga

SEQ ID NO: 4439 - DNA, 2595 bp, Saccharomyces cerevisiae
atgtacatggccagatgtggccccaagaataatgtgctgtgtttcccatttcaactttcctttctattttcaaaacgactaataaataagcgtttcaagtataccctacaaactgaagatgaaaagaatatgatggggagtttaagtaaaaataaaataataacacctgaagacgttgagttcaaattagcacaattacgagaattttctaatactttaaaagaacgcattcacaacactaaatcggtgaattcagatggccaccaaagcaatagtatcgcaccaatctcagaagactcaaggaatgttaatgtcaccaaaacatcatctgttcctaatgaagaaaaatccaaaaatctatcagatttgattcattcttcgtttttagaaaaaatggatcacctcgtaccaaaagttataagagaaagagtagcagacgacgacatacttgcaaaaaacctttttgatagatcacacagtaattgggcacctgtcatagataggctttatgtcagtgagaaacggttcatggatattgattccagagaattttctgtttggttaaatggtacagtcaaatatttgccatttcatagtatactacacttggatgaaatgctattagaacaaatcaatggagatgttgtaaaatttaatacccacatgtacgaatgtatctttaacaacttaggaaatttaaaaccaactaattttaatcaggatggtactaacgataaagttatcctcaaaatgaaagagttgttagagaggtatgataaggcattaaaaataactgaagaaagaattaacaaaaaagaaggattcccttccaaagtaccaaagatgacgcaagcaatacttaataattgtttaaaatactcgaccaagtgttcaagctttcacgacatggattattttattacaaaattcagagatgattatggcataactcctaataagcaaaacctaactactgtaatacaattctactctaggaaggaaatgactaagcaagcctggaatacttttgacaccatgaaatttttatctacaaagcatttccctgatatctgcacatataacacaatgctgcgaatatgcgagaaggaacggaattttcctaaggctttggatttatttcaagaaattcaagaccacaatataaagcctacaacaaacacttacataatgatggcaagagtgttggcttcttcgagcagtaatgccgttgtcagtgagggtaaatcagactctctaagattactgggatggaaataccttcatgagttggaggacaagaatctttacagacataaaaaagatgacttaaatttatttttggctatgatggcattagccgcgtttgatggtgatattgaattaagtagagctctatattacttgttcatcgcgaaaaagtacaaaactttgtgcgcaaattggaaaggaaacattctcgtagatcaagatacaatttggaagtcaactttaatgccagaaatgctgaattatttgatgcttgcttatgcaagatttgatcccagaaatttgccagtcttatccggttatgaaaaaggcattgaattgagaagaaaatttcttcgcgaatttgattcctccatgaggttagatgatacagacaaattggtcaaatttaaattaccatttcttccaattagtgacctaaattcggaggcacaagtattggcggaatctaacgcaatctggagtttcaatatggaaaatggaggaacgcgcaatacattgacatcttcaaatgaagcggcgttggaggatatcaaaaaatataggcaattacttgattcgtttgcgcaagaagcagaggatttcaacgagtttaagtttaaagttatgtacgaagtgacgaaaatgcaaagagaaagtattaatgtgaacgtcttcaataaaatttcactacacacatatttgtcaattcccattaacttaaaacaacagaaggaattcttgcgaaggttgacgttcttcactttccaacaacacgaatttgaagctgtcataaagcgtttgtatgaaggataccgtaatattccttcgtcccatacgcgtgaccaaaattcaatatcaactgaagccatctcagtatccaaacctgagaccacggaagacctcaacttaataatgcatgatatatggtatattacatgtttgaggcacaaaatcatgatggacaccacgttatatgagctggtgatgaaagccgctatagaatttcaaaatgaggacttagcaaagaaagtatggaatgataggggtaaatttaggacgactgtaccgtttctgaaaatggaccaaagaataagaatagcaaaggatcagaaatttgcccatctaatggttgaattcttcacaaagcaaggaaagtattcggacgcaatagctatcatattgtcttcaaaaaatcgcttcaattggacttattccatggttaggaatttgcataaagcattagaagaaatcgaggatagaaatagcgttgaaatcttactggatgtagtaaacaaaaagtcacacgcaaaggccctgaagtgggaggaacaagaacttaacatgtag

SEQ ID NO: 4440 - DNA, 2595 bp, Artificial Sequence
  Description of Artificial Sequence: Synthetic polynucleotide
atgtacatggccagatgtggccccaagaataatgtgttgtgtttcccatttcaactttcctttttgttttccaaaagattaataaataagcgtttcaagtataccttacaaactgaagatgaaaagaatatgatggggagtttaagtaaaaataaaataataacacctgaagacgttgagttcaaattagcacaattaagagaattttctaatactttaaaagaacgcattcacaacactaaatctgtgaattctgatggccaccaaagcaatagtatcgcaccaatcagtgaagacagcaggaatgttaatgtcaccaaaacatcttctgttcctaatgaagaaaaatccaaaaatttaagtgatttgattcattcttcttttttagaaaaaatggatcacctcgtaccaaaagttataagagaaagagtagcagacgacgacatacttgcaaaaaacctttttgatagaagtcacagtaattgggcacctgtcatagataggctttatgtcagtgagaaaagattcatggatattgattccagagaattttctgtttggttaaatggtacagtcaaatatttgccatttcatagtatattacacttggatgaaatgcttttagaacaaatcaatggagatgttgtaaaatttaatacccacatgtacgaatgtatctttaacaacttaggaaatttaaaaccaactaattttaatcaggatggtactaacgataaagttatcctcaaaatgaaagagttgttagagaggtatgataaggcattaaaaataactgaagaaagaattaacaaaaaagaaggattcccttccaaagtaccaaagatgacgcaagcaatacttaataattgtttaaaatactctaccaagtgtagcagctttcacgacatggattattttattacaaaattcagagatgattatggcataactcctaataagcaaaacttgactactgtaatacaattctactctaggaaggaaatgactaagcaagcctggaatacttttgacaccatgaaatttttatctacaaagcatttccctgatatctgcacatataacacaatgttaagaatatgcgagaaggaaagaaattttcctaaggctttggatttatttcaagaaattcaagaccacaatataaagcctacaacaaacacttacataatgatggcaagagtgttggcttcttctagcagtaatgccgttgtcagtgagggtaaaagtgactctttgagattattaggatggaaataccttcatgagttggaggacaagaatctttacagacataaaaaagatgacttaaatttatttttggctatgatggcattagccgcgtttgatggtgatattgaattaagtagagctttgtattacttgttcatcgcgaaaaagtacaaaactttgtgcgcaaattggaaaggaaacattctcgtagatcaagatacaatttggaagtctactttaatgccagaaatgttgaattatttgatgcttgcttatgcaagatttgatcccagaaatttgccagtcttatccggttatgaaaaaggcattgaattgagaagaaaatttcttcgcgaatttgattcctccatgaggttagatgatacagacaaattggtcaaatttaaattaccatttcttccaattagtgacttgaattctgaggcacaagtattggcggaatctaacgcaatctggagtttcaatatggaaaatggaggaacgcgcaatacattgacatcttccaatgaagcggcgttggaggatatcaaaaaatataggcaattacttgattcttttgcgcaagaagcagaggatttcaacgagtttaagtttaaagttatgtacgaagtgacgaaaatgcaaagagaaagtattaatgtgaacgtcttcaataaaatttctttacacacatatttgtctattcccattaacttaaaacaacagaaggaattcttgagaaggttgacgttcttcactttccaacaacacgaatttgaagctgtcataaagcgtttgtatgaaggataccgtaatattccttcttcccatacgcgtgaccaaaattctatatctactgaagccatctctgtatccaaacctgagaccacggaagacctcaacttaataatgcatgatatatggtatattacatgtttgaggcacaaaatcatgatggacaccacgttatatgagttggtgatgaaagccgctatagaatttcaaaatgaggacttagcaaagaaagtatggaatgataggggtaaatttaggacgactgtaccgtttttgaaaatggaccaaagaataagaatagcaaaggatcagaaatttgcccatttaatggttgaattcttcacaaagcaaggaaagtattctgacgcaatagctatcatattgtcttctaaaaatcgcttcaattggacttattccatggttaggaatttgcataaagcattagaagaaatcgaggatagaaatagcgttgaaatcttattagatgtagtaaacaaaaagtctcacgcaaaggccttgaagtgggaggaacaagaacttaacatgtga

SEQ ID NO: 4441 - DNA, 819 bp, Saccharomyces cerevisiae
atgagagactataaattagtagtattgggtgctggtggtgtcggtaaatcctgcttaaccgtgcagtttgtacagggagtttatttggatacgtatgatccaacgatcgaagattcttacaggaaaaccatcgagatcgataacaaggtattcgacctggaaattttagatacagcgggtatagcacaatttactgcaatgagagaattatacataaagtcaggaatggggttcctgttggtatattcagtaacagatcggcaatctttggaagaattaatggagctaagagaacaggtccttaggatcaaagattccgatcgcgttccaatggttctaataggtaacaaggctgatctaatcaatgaaagggtaataagtgtggaagaaggtatagaggtaagcagtaaatggggtagagttcccttttatgaaacaagcgctttgttgaggagcaatgtggatgaagtgttcgttgatttagttaggcaaatcattcggaatgaaatggaaagtgttgcagttaaagacgcaagaaatcaaagtcaacaatttagcaaaatcgagtctccatcaaccaggctccctagttctgcgaaacaggatacgaaacaatcaaacaataagcaatcatcaaaaggtttatataacaaatcttcacaaggacaagctaaagttaaacaatctactccggttaatgaaaagcacaaaccgtcacatgccgttccgaaatctggttctagcaacaggacaggaattagcgctacttcacaacaaaagaaaaagaagaaaaacgcttccacttgcactattctatag

SEQ ID NO: 4442 - DNA, 819 bp, Artificial Sequence
  Description of Artificial Sequence: Synthetic polynucleotide
atgagagactataaattagtagtattgggtgctggtggtgtcggtaaatcctgcttaaccgtgcagtttgtacagggagtttatttggatacgtatgatccaacgatcgaagattcttacaggaaaaccatcgagatcgataacaaggtattcgacttggaaattttagatacagcgggtatagcacaatttactgcaatgagagaattatacataaagagtggaatggggttcttgttggtatattctgtaacagatagacaatctttggaagaattaatggagttaagagaacaggtccttaggatcaaagattccgatcgcgttccaatggttttgataggtaacaaggctgatttgatcaatgaaagggtaataagtgtggaagaaggtatagaggtaagcagtaaatggggtagagttcccttttatgaaacaagcgctttgttgaggagcaatgtggatgaagtgttcgttgatttagttaggcaaatcattagaaatgaaatggaaagtgttgcagttaaagacgcaagaaatcaaagtcaacaatttagcaaaatcgagtctccatctaccaggctccctagttctgcgaaacaggatacgaaacaaagtaacaataagcaatcttctaaaggtttatataacaaatcttctcaaggacaagctaaagttaaacaatctactccggttaatgaaaagcacaaaccgtctcatgccgttccgaaatctggttctagcaacaggacaggaattagcgctacttctcaacaaaagaaaaagaagaaaaacgcttccacttgcactattttatga

SEQ ID NO: 4443 - DNA, 654 bp, Saccharomyces cerevisiae
atgggaaaggcctgtttgaataaagaagtcggcacttacgaatgtgagggggaaagagatacctactcattttttacctctctctcagatatacaggattcaagtagtaacgaggaacaatgcggtgtaggaagtatattgagtgaagatagtttcacgtttgaagggtccaacgtgagcatacggttattttccttggacttaaatgccttgaatgaaaatgagaatggatccaagaatcctgtgaaatttaccattccgccaaaaatagaacaaagaaaggaagcaagacaaagagagaaacgtttaaggagggtggcagtactacctgagaattcgagaaactaccttgttgaatcaagtatggattcaagtagggaatacagtcaaccattttttgactggaggcatgaaatggtagaacatggagaggagagtgtaaaaccgtgtggttgtcataaatcgagaaaagcaaaatgcttcaaagaactggagatggagaatatagaaaagggcgatataaagaagagtctcttttacagagacataattgaatggtgcagagactatgaagtcaataaaactagggaagtctgtgttccgtctatacacgagttttacctacatggaaatggaagtgacaacctcttttga

SEQ ID NO: 4444 - DNA, 654 bp, Artificial Sequence
  Description of Artificial Sequence: Synthetic polynucleotide
atgggaaaggcctgtttgaataaagaagtcggcacttacgaatgtgagggggaaagagatacctactctttttttacctctctctctgatatacaggattctagtagtaacgaggaacaatgcggtgtaggaagtatattgagtgaagatagtttcacgtttgaagggtccaacgtgagcataagattattttccttggacttaaatgccttgaatgaaaatgagaatggatccaagaatcctgtgaaatttaccattccgccaaaaatagaacaaagaaaggaagcaagacaaagagagaaacgtttaaggagggtggcagtattacctgagaattctagaaactaccttgttgaaagtagtatggattctagtagggaatacagtcaaccattttttgactggaggcatgaaatggtagaacatggagaggagagtgtaaaaccgtgtggttgtcataaatctagaaaagcaaaatgcttcaaagaattagagatggagaatatagaaaagggcgatataaagaagagtctcttttacagagacataattgaatggtgcagagactatgaagtcaataaaactagggaagtctgtgttccgtctatacacgagttttacttgcatggaaatggaagtgacaacctcttttga

SEQ ID NO: 4445 - DNA, 1071 bp, Saccharomyces cerevisiae
atgtcagtatcttacaagggaacaatttctaagacacattctgtttttaaaccagaaaaaggaaggtattatatttacggggcccttgggtgtccattcactcatagagccattcttgccaggtctttgaagaaattagaacctgttctagggcttgtgttatctcactggcaattagactccaagggtgcccgtttcttacctgctccacaccggccggaaaaatataaagagagattctttactgccactggtggcattgcttcagctaaattagacgaatctgaggagttaggtgatgtgaacaatgactctgcaaggttgttcgtggatggcgctttcgacccggtggaaaatatatcaaggttaagcgagttgtactacttaaatgatcctaagtaccccggtacaaagttcactgtgcctgttctgtgggattctaaaacaaggaaaattgttaacaatgagagtggcgatatcataagaattttgaacagtggcgtgtttgatgaatttatccaaagcgaagaaacgaacgtgattgatctagttccgcatgatttaatagacgagattgataagaacatcaaatgggttcatccgaagattaatcttggtgtctataaagtcggattagcagaaaacggaaagatttacgaaactgaagtaaaaacactgtttgaaaacttgcagaagatggaatgtgtactaaaagaaaattataagcgcttagaggagcaattcagtggtaacaaacagaaaatcttggctaaatattttgttttaggacagaggttaactgaagcggatatcagattgtatccatcaataattagatttgacgtcgtgtacgtgcagcacttcaaatgcaatttgaaaactataagggatggtttcccgtaccttcatttgtggttgattaatctatactggaattacgcagagtttagatttactacagattttaatcatattaagctcttttacatcaggatggaagtaagtaggaacaagatcaatcagtttggtatagtgccattaggcccaaagcctgacatttctagattatga

SEQ ID NO: 4446 - DNA, 1071 bp, Artificial Sequence
  Description of Artificial Sequence: Synthetic polynucleotide
atgtctgtatcttacaagggaacaatttctaagacacattctgtttttaaaccagaaaaaggaaggtattatatttacggggcccttgggtgtccattcactcatagagccattcttgccaggtctttgaagaaattagaacctgttttggggcttgtgttatctcactggcaattagactccaagggtgcccgtttcttacctgctccacacaggccggaaaaatataaagagagattctttactgccactggtggcattgcttctgctaaattagacgaatctgaggagttaggtgatgtgaacaatgactctgcaaggttgttcgtggatggcgctttcgacccggtggaaaatatatctaggttaagcgagttgtactacttaaatgatcctaagtaccccggtacaaagttcactgtgcctgttttatgggattctaaaacaaggaaaattgttaacaatgagagtggcgatatcataagaattttgaacagtggcgtgtttgatgaatttatccaaagcgaagaaacgaacgtgattgatttggttccgcatgatttaatagacgagattgataagaacatcaaatgggttcatccgaagattaatcttggtgtctataaagtcggattagcagaaaacggaaagatttacgaaactgaagtaaaaacattatttgaaaacttgcagaagatggaatgtgtattgaaagaaaattataagcgcttagaggagcaattcagtggtaacaaacagaaaatcttggctaaatattttgttttaggacagaggttaactgaagcggatatcagattgtatccaagtataattagatttgacgtcgtgtacgtgcagcacttcaaatgcaatttgaaaactataagggatggtttcccgtaccttcatttgtggttgattaatctttactggaattacgcagagtttagatttactacagattttaatcatattaagctcttttacatcaggatggaagtaagtaggaacaagatcaatcagtttggtatagtgccattaggcccaaagcctgacatttctagattatga

SEQ ID NO: 4447 - DNA, 1524 bp, Saccharomyces cerevisiae
atgactaaatctgagcagcaagccgattcaagacataacgttatcgacttagttggtaacaccccattgatcgcactgaaaaaattgcctaaggctttgggtatcaaaccacaaatttatgctaagctggaactatacaatccaggtggttccatcaaagacagaattgccaagtctatggtggaagaagctgaagcttccggtagaattcatccttccagatctactctgatcgaacctacttctggtaacaccggtatcggtctagctttaatcggcgccatcaaaggttacagaactatcatcaccttgccggaaaaaatgtctaacgagaaagtttctgtcctaaaggctctgggtgctgaaatcatcagaactccaactgctgctgcctgggattctccagaatcacatattggtgttgctaagaagttggaaaaagagattcctggtgctgttatacttgaccaatataacaatatgatgaacccagaagctcattactttggtactggtcgcgaaatccaaagacagctagaagacttgaatttatttgataatctacgcgctgttgttgctggtgctggtactggtgggactattagcggtatttccaagtacttgaaagaacagaatgataagatccaaatcgttggtgctgacccattcggttcaattttagcccaacctgaaaacttgaataagactgatatcactgactacaaagttgagggtattggttatgattttgttcctcaggttttggacagaaaattaattgatgtttggtataagacagacgacaagccttctttcaaatacgccagacaattgatttctaacgaaggtgtcttggtgggtggttcttccggttctgccttcactgcggttgtgaaatactgtgaagaccaccctgaactgactgaagatgatgtcattgttgccatattcccagattccatcaggtcgtacctaaccaaattcgtcgatgacgaatggttgaaaaagaacaatttgtgggatgatgacgtgttggcccgttttgactcttcaaagctggaggcttcgacgacaaaatacgctgatgtgtttggtaacgctactgtaaaggatcttcacttgaaaccggttgtttccgttaaggaaaccgctaaggtcactgatgttatcaagatattaaaagacaatggctttgaccaattgcctgtgttgactgaagacggcaagttgtctggtttagttactctctctgagcttctaagaaaactatcaatcaataattcaaacaacgacaacactataaagggtaaatacttggacttcaagaaattaaacaatttcaatgatgtttcctcttacaacgaaaataaatccggtaagaagaagtttattaaattcgatgaaaactcaaagctatctgacttgaatcgtttctttgaaaaaaactcatctgccgttatcactgatggcttgaaaccaatccatatcgttactaagatggatttactgagctacttagcataa

SEQ ID NO: 4448 - DNA, 1524 bp, Artificial Sequence
  Description of Artificial Sequence: Synthetic polynucleotide
atgactaaatctgagcagcaagccgattccagacataacgttatcgacttagttggtaacaccccattgatcgcattgaaaaaattgcctaaggctttgggtatcaaaccacaaatttatgctaagttggaattatacaatccaggtggttccatcaaagacagaattgccaagtctatggtggaagaagctgaagcttccggtagaattcatccttccagatctactttgatcgaacctacttctggtaacaccggtatcggtttagctttaatcggcgccatcaaaggttacagaactatcatcaccttgccggaaaaaatgtctaacgagaaagtttctgtcttgaaggctttgggtgctgaaatcatcagaactccaactgctgctgcctgggattctccagaaagtcatattggtgttgctaagaagttggaaaaagagattcctggtgctgttatacttgaccaatataacaatatgatgaacccagaagctcattactttggtactggtcgcgaaatccaaagacagttagaagacttgaatttatttgataatttacgcgctgttgttgctggtgctggtactggtgggactattagcggtatttccaagtacttgaaagaacagaatgataagatccaaatcgttggtgctgacccattcggttccattttagcccaacctgaaaacttgaataagactgatatcactgactacaaagttgagggtattggttatgattttgttcctcaggttttggacagaaaattaattgatgtttggtataagacagacgacaagccttctttcaaatacgccagacaattgatttctaacgaaggtgtcttggtgggtggttcttccggttctgccttcactgcggttgtgaaatactgtgaagaccaccctgaattgactgaagatgatgtcattgttgccatattcccagattccatcaggtcttacttgaccaaattcgtcgatgacgaatggttgaaaaagaacaatttgtgggatgatgacgtgttggcccgttttgactcttccaagttggaggcttccacgacaaaatacgctgatgtgtttggtaacgctactgtaaaggatcttcacttgaaaccggttgtttccgttaaggaaaccgctaaggtcactgatgttatcaagatattaaaagacaatggctttgaccaattgcctgtgttgactgaagacggcaagttgtctggtttagttactctctctgagcttttgagaaaattatctatcaataatagcaacaacgacaacactataaagggtaaatacttggacttcaagaaattaaacaatttcaatgatgtttcctcttacaacgaaaataaatccggtaagaagaagtttattaaattcgatgaaaactccaagttatctgacttgaatcgtttctttgaaaaaaactcttctgccgttatcactgatggcttgaaaccaatccatatcgttactaagatggatttattaagctacttagcatga

SEQ ID NO: 4449 - DNA, 1278 bp, Saccharomyces cerevisiae
atgacagatcccagaagaagaacaggccgtcatttcttgacaccggagaatttatcctctacattacaaatcacaaacttacctccagaatggaaccaagatataattacttcggtcgtggccggttctggtccagttatagatataaaagctaagaatgacccgagaactggtaaactaaccggtgtactgttcgattatttgactagtaaagattgtaaacgcgcttgggaaattttaaatagaattgaaaactttcccgtaaagatagagcaaataatcccaccaaattataaggaccatcttagagaaacagcaaataaaaattctcaaaagcaggtattacaacttaatagagattcgtaccccttcgaggcgggtttggagctacctttcgaaatggtgacagaagtccccattcctaggcgaccaccgccaccacaggctgcaaataacacaaactctgtatcaaataacacaaacattcaattccccgacatactaagtaaagcatctaaacacttgccaagtttccaagatggctcgattattgcaccagacaaaatttcacaaaatttaagtaaaattccgccgttgcaacttattgaaattatatcaaatttgaaaatattatcaaaccaagaaaacatccaaaaatcgcaattagaatctttcttagatactaacagtgatatcacaatatcagtgacccaagccctactagaaatgggatttatagactacagcgtggtgactaaagtgttgaaatcccaagttggcgaggccccatctttgctttcgagtaataacacaagtaattcgaacacccccgtaagcgtaattagaaataacactccgttgcatgtaccttctaatgaagtcagcaacaatcctaacaatatgccactgaacgtagctatgccaatgcctatgtcgacaccaccatttatccctttacctctgcaacaacaaccgttcggttttgcgccaccgggccctttcatgcctccagctcaaggcccctccatgggacagcctgtgttggcaaatcaactcggccaggtccagcaacaaaatataagttctacagaaggaccctctaacgcgaataaagcgaatgacagcggcaccattaatatggcgaaactgcaattactacctgaaaaccaacaagatatgatcaaacaagttcttactttgacacctgcccagatccaaagtttaccaagtgaccagcaacttatggtggaaaactttagaaaagaatatataatctaa

SEQ ID NO: 4450 - DNA, 1278 bp, Artificial Sequence
  Description of Artificial Sequence: Synthetic polynucleotide
atgacagatcccagaagaagaacaggccgtcatttcttgacaccggagaatttatcctctacattacaaatcacaaacttacctccagaatggaaccaagatataattactagtgtcgtggccggttctggtccagttatagatataaaagctaagaatgacccgagaactggtaaattgaccggtgtattattcgattatttgactagtaaagattgtaaacgcgcttgggaaattttaaatagaattgaaaactttcccgtaaagatagagcaaataatcccaccaaattataaggaccatcttagagaaacagcaaataaaaattctcaaaagcaggtattacaacttaatagagattcttaccccttcgaggcgggtttggagcttcctttcgaaatggtgacagaagtccccattcctaggagaccaccgccaccacaggctgcaaataacacaaactctgtatctaataacacaaacattcaattccccgacatattgagtaaagcatctaaacacttgccaagtttccaagatggctccattattgcaccagacaaaatttctcaaaatttaagtaaaattccgccgttgcaacttattgaaattatatccaatttgaaaatattatctaaccaagaaaacatccaaaaatctcaattagaatctttcttagatactaacagtgatatcacaatatctgtgacccaagccttgttggaaatgggatttatagactacagcgtggtgactaaagtgttgaaatcccaagttggcgaggccccatctttgctttccagtaataacacaagtaatagcaacacccccgtaagcgtaattagaaataacactccgttgcatgtaccttctaatgaagtcagcaacaatcctaacaatatgccattgaacgtagctatgccaatgcctatgtctacaccaccatttatccctttacctttacaacaacaaccgttcggttttgcgccaccgggccctttcatgcctccagctcaaggcccctccatgggacagcctgtgttggcaaatcaactcggccaggtccagcaacaaaatataagttctacagaaggaccctctaacgcgaataaagcgaatgacagcggcaccattaatatggcgaaattacaattattgcctgaaaaccaacaagatatgatcaaacaagttcttactttgacacctgcccagatccaaagtttaccaagtgaccagcaacttatggtggaaaactttagaaaagaatatataatctga

SEQ ID NO: 4451 - DNA, 2610 bp, Saccharomyces cerevisiae
atgtccagttgtaaaaccactttgtctgaaatggttggttctgtgacaaaagataggggcactatcaacgtcgaagccagaacacgttcgagtaatgtaactttcaaaccacctgtaacccacgatatggtgcgttcgcttttcgatccaactttgaagaaatctctgctggaaaaatgcatcgcgctagctattatatcgaattttttcatttgttattgggtcttccaaaggtttggcttacagtttaccaaatacttttttctggtacagtatttattttggagaattgcttataatttaggtattggactggttctgcattaccagtcacattatgaaacactaacgaattgtgctaaaactcatgcgattttcagcaaaataccacagaataaagatgctaattcgaatttctcaacaaattccaattccttttcagaaaaattttggaattttattaggaagttctgtcaatatgagattaggtctaaaatgccaaaggagtatgatttatttgcctatccagaagagatcaacgtctggttgatatttcgccagtttgtcgatttaatcttgatgcaagattttgtgacttacattatttacgtttacctttctattccatatagctgggttcaaatcttcaactggagatctttgctaggtgttattttgattttatttaacatctgggtcaagttagatgcgcatcgcgtggttaaagattatgcttggtactggggtgatttcttctttttggaagaatctgaattgatttttgatggtgtcttcaacatctctccacatccaatgtattctattggttatttgggttattatggcctatcattgatttgtaatgactacaaggttcttctggtgtccgtatttggacattattctcaatttttgtttctgaaatacgtcgaaaatcctcatattgaaagaacgtatggtgatggcactgattccgattctcaaatgaatagcagaattgatgacttgatatcaaaagagaattacgattattcaagacctctaattaacatgggtctttcttttaacaacttcaataagctaagatttactgactatttcacaattggtaccgtagcggcacttatgttaggaacaatcatgaatgctaggtttatcaatttaaattacctctttattaccgtttttgtaacaaaactggtttcatggttatttatctcgacaatattgtacaagcaatctcagtctaaatggttcacgagattgtttttggagaatggttacacacaagtttattcctatgagcaatggcaatttatttacaattattatttggtattaacctacacacttatgataattcatacagggcttcaaatttggagtaatttttccaacataaacaacagtcaattaatttttggtttaattcttgtggctttacaaacatggtgtgataaggaaacgagactagcaatctctgattttggttggttttatggtgattttttcttgagcaactatatctcaactagaaagctgacttcccaaggtatctacagatatttgaatcacccagaagcggtattaggcgttgttggagtttggggtactgtattgatgacgaattttgccgttacaaatattatcttggctgttttatggacattgacaaattttattcttgtcaagtttattgaaacacctcatgttaataagatatatggtaaaactaaacgagttagtggtgttggaaaaactttactaggcttgaaacctctaagacaagtttcagatattgtcaatagaattgaaaatattataatcaaatcattagttgatgaaagcaagaactccaatggtggggcagaacttttgcccaaaaattatcaagataacaaagaatggaatattttaattcaggaagcaatggatagcgttgcaacaagattgagtccatactgtgaattgaaaattgaaaacgagcaggtagaaaccaattttgtcttgcctactccagtaactttgaattggaaaatgcccattgaactttataacggagatgattggattggtttgtataaagtcattgatacaagggcagatcgtgaaaaaacaagagttggatcaggtggtcattggagtgcgacttctaaagattcatatatgaaccatggattaagacataaagaatctgtaacagaaataaaggcgactgaaaagtacgttcaaggtaaagtgacattcgacacgtctttgctttattttgaaaatggtatctacgaatttaggtatcattctggtaactcccataaggtgttattgatttctacaccatttgaaatttcattgccggtactaaataccacgacacctgaactgtttgagaaggatttgactgagtttttgacgaaagtcaacgttttgaaggatggtaaatttcgtccattaggaaataagttcttcgggatggacagcttgaaacaattgattaagaactcaattggcgtcgaactttcgtctgagtatatgaggagagtcaatggtgacgctcacgttatttcgcatcgcgcttgggatataaaacaaacgcttgatagtcttgcttga

SEQ ID NO: 4452 - DNA, 2610 bp, Artificial Sequence
  Description of Artificial Sequence: Synthetic polynucleotide
atgtccagttgtaaaaccactttgtctgaaatggttggttctgtgacaaaagataggggcactatcaacgtcgaagccagaacacgttctagtaatgtaactttcaaaccacctgtaacccacgatatggtgcgttctcttttcgatccaactttgaagaaatctttattggaaaaatgcatcgcgttagctattatatccaattttttcatttgttattgggtcttccaaaggtttggcttacagtttaccaaatacttttttttggtacagtatttattttggagaattgcttataatttaggtattggattggttttgcattaccagtctcattatgaaacattaacgaattgtgctaaaactcatgcgattttcagcaaaataccacagaataaagatgctaatagtaatttcagtacaaattccaattccttttctgaaaaattttggaattttattaggaagttctgtcaatatgagattaggtctaaaatgccaaaggagtatgatttatttgcctatccagaagagatcaacgtctggttgatatttcgccagtttgtcgatttaatcttgatgcaagattttgtgacttacattatttacgtttacctttctattccatatagctgggttcaaatcttcaactggagatctttgttgggtgttattttgattttatttaacatctgggtcaagttagatgcgcatcgcgtggttaaagattatgcttggtactggggtgatttcttctttttggaagaatctgaattgatttttgatggtgtcttcaacatctctccacatccaatgtattctattggttatttgggttattatggcttatctttgatttgtaatgactacaaggttcttttagtgtccgtatttggacattattctcaatttttgtttttgaaatacgtcgaaaatcctcatattgaaagaacgtatggtgatggcactgattccgattctcaaatgaatagcagaattgatgacttgatatccaaagagaattacgattattctagacctttgattaacatgggtctttcttttaacaacttcaataagttgagatttactgactatttcacaattggtaccgtagcggcacttatgttaggaacaatcatgaatgctaggtttatcaatttaaattacctctttattaccgtttttgtaacaaaattggtttcctggttatttatcagtacaatattgtacaagcaatctcagtctaaatggttcacgagattgtttttggagaatggttacacacaagtttattcctatgagcaatggcaatttatttacaattattatttggtattaacctacacacttatgataattcatacagggcttcaaatttggagtaatttttccaacataaacaacagtcaattaatttttggtttaattcttgtggctttacaaacatggtgtgataaggaaacgagattagcaatctctgattttggttggttttatggtgattttttcttgagcaactatatctctactagaaagttgacttcccaaggtatctacagatatttgaatcacccagaagcggtattaggcgttgttggagtttggggtactgtattgatgacgaattttgccgttacaaatattatcttggctgttttatggacattgacaaattttattcttgtcaagtttattgaaacacctcatgttaataagatatatggtaaaactaaaagagttagtggtgttggaaaaactttattaggcttgaaacctttgagacaagtttctgatattgtcaatagaattgaaaatattataatcaaatctttagttgatgaaagcaagaactccaatggtggggcagaacttttgcccaaaaattatcaagataacaaagaatggaatattttaattcaggaagcaatggatagcgttgcaacaagattgagtccatactgtgaattgaaaattgaaaacgagcaggtagaaaccaattttgtcttgcctactccagtaactttgaattggaaaatgcccattgaactttataacggagatgattggattggtttgtataaagtcattgatacaagggcagatcgtgaaaaaacaagagttggatctggtggtcattggagtgcgacttctaaagattcttatatgaaccatggattaagacataaagaatctgtaacagaaataaaggcgactgaaaagtacgttcaaggtaaagtgacattcgacacgtctttgctttattttgaaaatggtatctacgaatttaggtatcattctggtaactcccataaggtgttattgatttctacaccatttgaaatttctttgccggtattgaataccacgacacctgaattatttgagaaggatttgactgagtttttgacgaaagtcaacgttttgaaggatggtaaatttcgtccattaggaaataagttcttcgggatggacagcttgaaacaattgattaagaactctattggcgtcgaactttcttctgagtatatgaggagagtcaatggtgacgctcacgttatttctcatcgcgcttgggatataaaacaaacgcttgatagtcttgcttga

SEQ ID NO: 4453 - DNA, 753 bp, Saccharomyces cerevisiae
atgaatgttcaagacagaaggaggttattaggccctgctgctgccaagccaatggcgtttagcaacactactactcatgtgccagaaaagaaatcaacagatttgacacctaaaggcaatgaaagtgaacaggaactttctctacataccggtttcatcgaaaactgcaatggatctgcattagtagaagctagaagcttaggacaccaaacatcgctcattaccgctgtctatggaccacgctccattagaggatccttcacatctcaaggtactatatctattcagttaaagaacggtcttctggaaaaatataacacaaatgaactgaaggaagttagcagctttttaatgggcattttcaattcagtagtaaacctatctcgctaccccaagtccggcatcgatatcttcgtttatttaacgtatgataaggatcttacaaataatcctcaggacgacgattcgcaaagcaaaatgatgtcttctcaaatatcatctctcataccacattgtatcactagtataacgctagccttagctgatgccggcatcgaattagtggatatggcaggtgccggtgaggccaatggcactgtcgtatcattcatcaaaaatggagaggaaattgtaggtttttggaaggatgatggtgacgatgaagatcttttggaatgccttgatcgttgcaaggagcaatataaccgttatagagatttaatgataagctgtttaatgaaccaggaaacttag

SEQ ID NO: 4454 - DNA, 753 bp, Artificial Sequence
  Description of Artificial Sequence: Synthetic polynucleotide
atgaatgttcaagacagaaggaggttattaggccctgctgctgccaagccaatggcgtttagcaacactactactcatgtgccagaaaagaaatctacagatttgacacctaaaggcaatgaaagtgaacaggaactttctttgcataccggtttcatcgaaaactgcaatggatctgcattagtagaagctagaagcttaggacaccaaacatctctcattaccgctgtctatggaccacgctccattagaggatccttcacatctcaaggtactatatctattcagttaaagaacggtcttttagaaaaatataacacaaatgaattgaaggaagttagcagctttttaatgggcattttcaattctgtagtaaacttatctcgctaccccaagtccggcatcgatatcttcgtttatttaacgtatgataaggatcttacaaataatcctcaggacgacgattctcaaagcaaaatgatgtcttctcaaatatcttctctcataccacattgtatcactagtataacgttggccttagctgatgccggcatcgaattagtggatatggcaggtgccggtgaggccaatggcactgtcgtatctttcatcaaaaatggagaggaaattgtaggtttttggaaggatgatggtgacgatgaagatcttttggaatgccttgatcgttgcaaggagcaatataaccgttatagagatttaatgataagctgtttaatgaaccaggaaacttga

SEQ ID NO: 4455 - DNA, 1245 bp, Saccharomyces cerevisiae
atggctaagactactaaagtaaaaggtaacaagaaggaagttaaggcttccaaacaagccaaagaagaaaaagctaaggccgtctcttcctcttcctccgaatcttcatcctcatcttcatcttcatctgaatctgaatctgagtctgagtctgaatctgaatcttcatcttcatcttcatcctctgattctgaatcctcttcttcatcgtcttctgacagcgaaagtgaagctgaaaccaagaaggaagaatccaaggattcctcttcctcttcctctgactcttcttccgacgaagaagaagaagaagaaaaagaagaaaccaagaaggaagaatcaaaagaatcttctagctctgattcatcctcatcttcatcttctgatagcgaaagcgaaaaggaagagtctaacgataagaaacgtaaatctgaggacgccgaagaagaagaagacgaagagtcttccaacaagaagcaaaaaaatgaagaaaccgaagaaccagctactattttcgttggtagactatcgtggtctattgatgacgaatggttgaagaaggaattcgaacacatcggtggtgtcattggtgccagagttatttatgaaagaggtaccgatagatctcgtggttatggttacgttgattttgaaaacaaatcttatgctgaaaaggccattcaagaaatgcaaggtaaggaaattgatggtagaccaatcaactgtgatatgtccacaagcaagccagctggtaacaacgatcgtgccaagaaattcggtgataccccatctgaaccatctgacactttgttcttgggtaacttatctttcaatgctgacagagacgctattttcgaattattcgctaaacacggtgaagttgtttccgtccgtatcccaacacatccagaaactgaacaaccaaaaggtttcggttatgttcaattctccaacatggaggacgccaagaaggctctagacgctttacaaggtgaatacattgacaacagaccagttagattagacttctcttctccaagaccaaacaacgatggtggtcgtggcggtagccgtggttttggtggtcgtggcggtggtcgtggcggtaaccgtggattcggtggtcgtggtggcgctcgcggtggccgtggcggtttcagaccatctggttctggtgctaatactgctccattgggcagatcaagaaataccgcttctttcgctggttcaaagaaaacatttgattaa

SEQ ID NO: 4456 - DNA, 1245 bp, Artificial Sequence
  Description of Artificial Sequence: Synthetic polynucleotide
atggctaagactactaaagtaaaaggtaacaagaaggaagttaaggcttccaaacaagccaaagaagaaaaagctaaggccgtctcttcctcttcctccgaatcttcttcctcttcttcttcttcttctgaatctgaatctgagtctgagtctgaatctgaatcttcttcttcttcttcttcctctgattctgaatcctcttcttcttcttcttctgacagcgaaagtgaagctgaaaccaagaaggaagaatccaaggattcctcttcctcttcctctgactcttcttccgacgaagaagaagaagaagaaaaagaagaaaccaagaaggaagaaagtaaagaatcttctagctctgattcttcctcttcttcttcttctgatagcgaaagcgaaaaggaagagtctaacgataagaaacgtaaatctgaggacgccgaagaagaagaagacgaagagtcttccaacaagaagcaaaaaaatgaagaaaccgaagaaccagctactattttcgttggtagattatcttggtctattgatgacgaatggttgaagaaggaattcgaacacatcggtggtgtcattggtgccagagttatttatgaaagaggtaccgatagatctcgtggttatggttacgttgattttgaaaacaaatcttatgctgaaaaggccattcaagaaatgcaaggtaaggaaattgatggtagaccaatcaactgtgatatgtccacaagcaagccagctggtaacaacgatcgtgccaagaaattcggtgataccccatctgaaccatctgacactttgttcttgggtaacttatctttcaatgctgacagagacgctattttcgaattattcgctaaacacggtgaagttgtttccgtccgtatcccaacacatccagaaactgaacaaccaaaaggtttcggttatgttcaattctccaacatggaggacgccaagaaggctttggacgctttacaaggtgaatacattgacaacagaccagttagattagacttctcttctccaagaccaaacaacgatggtggtcgtggcggtagccgtggttttggtggtcgtggcggtggtcgtggcggtaaccgtggattcggtggtcgtggtggcgctcgcggtggccgtggcggtttcagaccatctggttctggtgctaatactgctccattgggcagatctagaaataccgcttctttcgctggttccaagaaaacatttgattga

SEQ ID NO: 4457 - DNA, 792 bp, Saccharomyces cerevisiae
atgatcgctacctccagagccgtaaacatgaataaagaatcaaaacacaagaaggctgttgccaaaccatgcagagagagacaaacttcagttacaagagccatgagaccagctgtagcacgtgatcctcgcagactttcgacgtcgtcgtctccttcttcgtcaccaatgtcagcacagagaaggctttcgagggaagaaataataaacgaaatggaaaaggagcaagacgctattgtagtaagacttctacgggaaattgaaactttaaaagaagaaaactctaggttaaaaaatcaactgcaccatccggtcccggctagaaggtcgtctccatttttcgaaggcgagtctgccatcctagatgatgatgactgcaattatggttacaccctcgacactccaaagctaaagctcacagatggtgcatccagacacaccgtacttcccttaacacccaaggactccatgacccacatttcccattccgccagaaggtcaagccggaacgcttccatatctaacggaacaagcatctcagacacgattttccccattgagactaaaatccactcagcaccaacaacaaacagaaaccttccctccgccgatcttccacatcacactcttcttccacgttctctaagcggcatttcgtctagcgatttaaccgaatccggtgctcttcttcatgacaggagaaggcgttcttccaattacagtctcgatggctcaaactctttaaaggctgatctcatggcaaagagattccaaactggttcattgaaatag

SEQ ID NO: 4458 - DNA, 792 bp, Artificial Sequence
  Description of Artificial Sequence: Synthetic polynucleotide
atgatcgctacctccagagccgtaaacatgaataaagaaagtaaacacaagaaggctgttgccaaaccatgcagagagagacaaacttctgttacaagagccatgagaccagctgtagcacgtgatcctcgcagactttctacgtcttcttctccttcttcttctccaatgtctgcacagagaaggctttctagggaagaaataataaacgaaatggaaaaggagcaagacgctattgtagtaagacttttgagagaaattgaaactttaaaagaagaaaactctaggttaaaaaatcaattacaccatccggtcccggctagaaggtcttctccatttttcgaaggcgagtctgccatcttagatgatgatgactgcaattatggttacaccctcgacactccaaagttgaagctcacagatggtgcatccagacacaccgtacttcccttaacacccaaggactccatgacccacatttcccattccgccagaaggagcagcagaaacgcttccatatctaacggaacaagcatcagtgacacgattttccccattgagactaaaatccactctgcaccaacaacaaacagaaaccttccctccgccgatcttccacatcacactcttcttccacgttctttaagcggcatttcttctagcgatttaaccgaatccggtgctcttcttcatgacaggagaaggcgttcttccaattacagtctcgatggctctaactctttaaaggctgatctcatggcaaagagattccaaactggttctttgaaatga

SEQ ID NO: 4459 - DNA, 279 bp, Saccharomyces cerevisiae
atgtctggatacttcaaccatctttcttcgaatgcacatttcgcaaatattcaagccgatcagggcttcataggtgatgctactggcacaagcagcgatcatggcagtagtggcatggttgattttgccctacaactcggagaactgagcctagaagagaaaatacttaaagagttcaccttattccagagcaagaacatggacttattgcaagagacggcgacggcgtgtccgagtactaatccttccttgagacagagccgaattcaaggctggtga

SEQ ID NO: 4460 - DNA, 279 bp, Artificial Sequence
  Description of Artificial Sequence: Synthetic polynucleotide
atgtctggatacttcaaccatctttcttccaatgcacatttcgcaaatattcaagccgatcagggcttcataggtgatgctactggcacaagcagcgatcatggcagtagtggcatggttgattttgccttgcaactcggagaattgagcttggaagagaaaatacttaaagagttcaccttattccagagcaagaacatggacttattgcaagagacggcgacggcgtgtccgagtactaatccttccttgagacagagcagaattcaaggctggtga

SEQ ID NO: 4461 - DNA, 2859 bp, Saccharomyces cerevisiae
atgacagacgaaactgctcacccgacacaatctgcttcaaagcaggaatctgctgctctgaaacagacaggcgatgaccagcaggaatctcagcaacaacgtggctacaccaactacaacaatggtagcaactatacccaaaagaagccttacaacagcaacagacctcatcagcaaagaggtggtaaatttggaccaaacagatataacaaccgtggcaactataatggtggcggtagtttcagaggtggacacatgggagccaacagctcaaacgtgccatggactggttactataataactaccccgtttactaccagccccagcaaatggcggccgctggtagtgcccctgctaatccaattcctgtcgaagagaagtcacctgttccaactaagatagaaatcactaccaagtctggtgaacacttagatttgaaagaacagcataaagccaagctacagtctcaggaaagatctactgtgtctccgcaaccagagtcaaagttaaaagaaacttctgattctacttctacttctactccaactcctaccccttccactaatgactctaaggccagttctgaagaaaatatatctgaagctgaaaagacaagaagaaatttcatcgagcaagttaaacttcgtaaagctgctttagaaaagaagagaaaggagcaacttgaaggttctagtggcaacaataatattccaatgaagactaccccagaaaatgtggaagagaagggatcggacaaacctgaggtaaccgaaaaaaccaagcctgctgaagaaaaatctgctgagccagaagttaagcaagaaactccagctgaagaaggtgaacaaggagaaaagggccaaataaaggaagaatccactccaaaggtgttaacctttgctgaacgtttgaagttgaagaaacaacaaaaagaacgagaagaaaaaacggaggggaaggaaaacaaggaagtgccagtacaggaagagactaagagcgccatcgagtctgctcctgtgcctcccagtgaacaggttaaagaagaaactgaggtcgccgaaaccgaacagtcaaacattgatgaatctgcaacaactccggctatccctactaaatctgatgaagctgaagctgaagttgaggctgaagcaggtgatgctggaacaaagattggacttgaagctgaaatcgaaactacaactgatgaaactgatgatggtacaaacaccgtttctcacatattgaatgtattgaaagatgctacaccaattgaagatgtcttttcttttaactatccagaaggtattgaaggtcctgatatcaaatacaagaaagaacacgtcaaatatacatatggcccaactttcttgcttcaatttaaggacaaactaaacgtcaaagcggacgccgaatgggtccaaagcactgcttctaaaattgtcattccaccaggaatgggcagaggaaatagatctagagattctggcagattcggcaataattctagtcgtggccatgactttagaaatacctcagtgagaaatatggatgacagagctaattcaagaacttcatcaaagagaagatcaaagagaatgaatgacgacaggagatctaatagatcttatacatcaagaagagaccgcgagagaggctcctacagaaatgaagagaaaagagaggacgataaaccaaaggaagaagttgctccacttgttccaagtgctaataggtgggtgccaaaattcaagtctaaaaagactgaaaagaagctagcccctgacggaaagaccgaactattggacaaggatgaagttgaaagaaagatgaagtcactactgaataaacttactttggaaatgttcgatgctatttcatctgaaattttggctattgcaaacatatcagtatgggaaacaaatggtgaaacgttaaaggctgtgatagaacagattttcttaaaggcctgtgacgaaccccattggtcttctatgtacgcgcaattatgtggtaaagtagttaaagaattaaacccagatataacagatgaaactaatgaaggtaagacaggtccaaaattggttttgcattacttggttgctagatgtcatgccgaatttgacaagggttggaccgataaattacccacaaacgaagatggtactccattagaacctgagatgatgtcagaagagtactatgcagctgcttctgctaagagaagaggtttaggtttggttcgtttcatcggtttcctataccgtctgaatctgttgactggaaagatgatgttcgaatgtttccgtagactaatgaaggatttgacggattctccatctgaagaaactctagagtccgttgttgaattgttaaatactgttggtgaacaatttgagaccgatagtttcagaacgggtcaagcaacattggagggttcgcaattgctcgatagtttgttcggtattttagacaatattattcaaactgctaagatttctagtagaatcaagttcaagttgatcgacattaaagaattaaggcacgacaagaactggaacagtgataagaaggacaacggtcctaagaccattcaacagattcatgaggaagaggagagacaacgtcaattgaagaataattcaagatctaattcaagacgtacgaacaactccagtaatagacactctttcagaagggacgctcctcctgcatcaaaagatagctttatcacaaccagaacatattctcaaagaaatagccaaagggctcctcctccaaaggaagaaccagctgcaccaacttctaccgcaacaaatatgttcagtgcattaatgggagaaagtgatgacgaagagtaa

SEQ ID NO: 4462 - DNA, 2859 bp, Artificial Sequence
  Description of Artificial Sequence: Synthetic polynucleotide
atgacagacgaaactgctcacccgacacaatctgcttccaagcaggaatctgctgctttgaaacagacaggcgatgaccagcaggaatctcagcaacaacgtggctacaccaactacaacaatggtagcaactatacccaaaagaagccttacaacagcaacagacctcatcagcaaagaggtggtaaatttggaccaaacagatataacaaccgtggcaactataatggtggcggtagtttcagaggtggacacatgggagccaacagcagtaacgtgccatggactggttactataataactaccccgtttactaccagccccagcaaatggcggccgctggtagtgcccctgctaatccaattcctgtcgaagagaagtctcctgttccaactaagatagaaatcactaccaagtctggtgaacacttagatttgaaagaacagcataaagccaagttacagtctcaggaaagatctactgtgtctccgcaaccagagtctaagttaaaagaaacttctgattctacttctacttctactccaactcctaccccttccactaatgactctaaggccagttctgaagaaaatatatctgaagctgaaaagacaagaagaaatttcatcgagcaagttaaacttcgtaaagctgctttagaaaagaagagaaaggagcaacttgaaggttctagtggcaacaataatattccaatgaagactaccccagaaaatgtggaagagaagggatctgacaaacctgaggtaaccgaaaaaaccaagcctgctgaagaaaaatctgctgagccagaagttaagcaagaaactccagctgaagaaggtgaacaaggagaaaagggccaaataaaggaagaatccactccaaaggtgttaacctttgctgaacgtttgaagttgaagaaacaacaaaaagaaagagaagaaaaaacggaggggaaggaaaacaaggaagtgccagtacaggaagagactaagagcgccatcgagtctgctcctgtgcctcccagtgaacaggttaaagaagaaactgaggtcgccgaaaccgaacagtccaacattgatgaatctgcaacaactccggctatccctactaaatctgatgaagctgaagctgaagttgaggctgaagcaggtgatgctggaacaaagattggacttgaagctgaaatcgaaactacaactgatgaaactgatgatggtacaaacaccgtttctcacatattgaatgtattgaaagatgctacaccaattgaagatgtcttttcttttaactatccagaaggtattgaaggtcctgatatcaaatacaagaaagaacacgtcaaatatacatatggcccaactttcttgcttcaatttaaggacaaattgaacgtcaaagcggacgccgaatgggtccaaagcactgcttctaaaattgtcattccaccaggaatgggcagaggaaatagatctagagattctggcagattcggcaataattctagtcgtggccatgactttagaaatacctctgtgagaaatatggatgacagagctaattctagaacttcttccaagagaagatccaagagaatgaatgacgacaggagatctaatagatcttatacatctagaagagaccgcgagagaggctcctacagaaatgaagagaaaagagaggacgataaaccaaaggaagaagttgctccacttgttccaagtgctaataggtgggtgccaaaattcaagtctaaaaagactgaaaagaagttggcccctgacggaaagaccgaattattggacaaggatgaagttgaaagaaagatgaagtctttattgaataaacttactttggaaatgttcgatgctatttcttctgaaattttggctattgcaaacatatctgtatgggaaacaaatggtgaaacgttaaaggctgtgatagaacagattttcttaaaggcctgtgacgaaccccattggtcttctatgtacgcgcaattatgtggtaaagtagttaaagaattaaacccagatataacagatgaaactaatgaaggtaagacaggtccaaaattggttttgcattacttggttgctagatgtcatgccgaatttgacaagggttggaccgataaattacccacaaacgaagatggtactccattagaacctgagatgatgtctgaagagtactatgcagctgcttctgctaagagaagaggtttaggtttggttcgtttcatcggtttcttgtaccgtttgaatttattgactggaaagatgatgttcgaatgtttccgtagattaatgaaggatttgacggattctccatctgaagaaactttagagtccgttgttgaattgttaaatactgttggtgaacaatttgagaccgatagtttcagaacgggtcaagcaacattggagggttctcaattgctcgatagtttgttcggtattttagacaatattattcaaactgctaagatttctagtagaatcaagttcaagttgatcgacattaaagaattaaggcacgacaagaactggaacagtgataagaaggacaacggtcctaagaccattcaacagattcatgaggaagaggagagacaacgtcaattgaagaataattctagatctaattctagacgtacgaacaactccagtaatagacactctttcagaagggacgctcctcctgcatccaaagatagctttatcacaaccagaacatattctcaaagaaatagccaaagggctcctcctccaaaggaagaaccagctgcaccaacttctaccgcaacaaatatgttcagtgcattaatgggagaaagtgatgacgaagagtga

SEQ ID NO: 4463 - DNA, 1026 bp, Saccharomyces cerevisiae
atgagtttagaggctacagattccaaggccatggttttgttgatgggcgtaagaagatgtggaaaatcatccatttgtaaagttgtttttcataatatgcagcctttagatacattatatctagaatcaacctcaaatccttctcttgagcatttctctactctcattgacctggcggtgatggagcttcccgggcagctaaattactttgaaccgagttatgattctgaaagattattcaaaagcgttggggcactagtttatgtcattgattctcaagatgaatatatcaatgcgatcacaaatctggcgatgattattgagtatgcctataaggttaatccctccatcaatatagaggtcttgattcacaaggttgatggcctaagtgaagatttcaaagttgatgctcaacgtgatataatgcaacggacaggtgaagagttgcttgaactggggctggatggtgttcaggtttccttctatttaacttcaatttttgatcactcaatatatgaggcattttcgaggattgtgcagaaactgataccggagctgtcttttctggagaatatgctagataatttaattcaacattcaaaaattgagaaggccttcttatttgatgttaattccaaaatttatgtttccacagattctaaccctgttgatatacaaatgtatgaggtatgctccgagttcatagatgtgacgattgatttgtttgatttatataaagcgcctgttctaagaaatagccaaaagagctcggacaaagataatgtgataaatcctcgtaatgagctacagaatgtatcacaattagctaatggcgtcattatttatttgaggcagatgattagaggcttggcattggtggcgattataagacctaatggtacagacatggaaagctgcttaacggtcgcagattacaatattgacattttcaagaaggggttggaagatatttgggcaaacgcaagagccagtcaagctaaaaatagtattgaggacgatgtgtga

SEQ ID NO: 4464 - DNA, 1026 bp, Artificial Sequence
  Description of Artificial Sequence: Synthetic polynucleotide
atgagtttagaggctacagattccaaggccatggttttgttgatgggcgtaagaagatgtggaaaatcttccatttgtaaagttgtttttcataatatgcagcctttagatacattatatttggaaagtacctctaatccttctcttgagcatttctctactctcattgacttggcggtgatggagcttcccgggcagttgaattactttgaaccgagttatgattctgaaagattattcaaaagcgttggggcattggtttatgtcattgattctcaagatgaatatatcaatgcgatcacaaatttggcgatgattattgagtatgcctataaggttaatccctccatcaatatagaggtcttgattcacaaggttgatggcttaagtgaagatttcaaagttgatgctcaacgtgatataatgcaaagaacaggtgaagagttgcttgaattggggttagatggtgttcaggtttccttctatttaacttctatttttgatcactccatatatgaggcatttagcaggattgtgcagaaattgataccggagctttcttttttggagaatatgcttgataatttaattcaacattctaaaattgagaaggccttcttatttgatgttaattccaaaatttatgtttccacagattctaaccctgttgatatacaaatgtatgaggtatgctccgagttcatagatgtgacgattgatttgtttgatttatataaagcgcctgttttgagaaatagccaaaagagcagtgacaaagataatgtgataaatcctcgtaatgagttacagaatgtatctcaattagctaatggcgtcattatttatttgaggcagatgattagaggcttggcattggtggcgattataagacctaatggtacagacatggaaagctgcttaacggtcgcagattacaatattgacattttcaagaaggggttggaagatatttgggcaaacgcaagagccagtcaagctaaaaatagtattgaggacgatgtgtga

SEQ ID NO: 4465 - DNA, 336 bp, Saccharomyces cerevisiae
atgatagtagagccaatgaccaaaccaagaaagcctacagtacagaggtgccaaagtttttttactaatggggcaaatcatttttattgcaaaaaaagcactcacgatgggggtcgaacccataatcttctgattagaagtcagacgcgttgccattacgccacgcgagctactgtttgttggaagttttcaattattaataagtacataccaaccttagctaacattactataacgacgctgagaaagctatacaaaagatttatcgatcgagaatcattgtttcttatttttttcaggaaggatgaacacattgttcagaatattatcaattaa

SEQ ID NO: 4466 - DNA, 336 bp, Artificial Sequence
  Description of Artificial Sequence: Synthetic polynucleotide
atgatagtagagccaatgaccaaaccaagaaagcctacagtacagaggtgccaaagtttttttactaatggggcaaatcatttttattgcaaaaaaagcactcacgatgggggtagaacccataatcttttgattagaagtcagacgcgttgccattacgccacgagggctactgtttgttggaagttttctattattaataagtacataccaaccttagctaacattactataacgacgttgagaaagttgtacaaaagatttatcgatagagaatctttgtttcttatttttttcaggaaggatgaacacattgttcagaatattatcaattga

SEQ ID NO: 4467 - DNA, 1038 bp, Saccharomyces cerevisiae
atgagttacggcttaacaggtacctcttctaagctaagaggaactagttcaatattttcatggactcaggtgaggcacttttctcgtagaagaatagcctatccattttatccattcaagaaattgggaagacaacacccgaagaagcatgatacaaacttaaagactgctatgagacagtttttaggtccaaaaaattacaaaggagaatatgtcatgaacaagtattttacggttccgacgaatcatgtacctaactacattaagccagatttggaaaggggacaaagtttagaacacccggtaaccaagaagccattgcaactaaggtatgatgggacattaggtcctcctcctgtagaaaataaaaggttacaaaacattttcaaggatagattgttgcaacctttcccttcaaatccacattgtaagacgaattacgtattaagcccgcaattgaagcaaagcattttcgaagagattactgtggaaggactttctgcccaacaagtttctcaaaagtatggattaaaaattcctcgtgtagaggctattgttaaactggttagcgtggaaaacagctggaacagacggaatagagtatcttctgatttgaaaactatggacgagactttatatagaatgtttcccgtcttcgactcagatgcctcttttaaacgggagaatttaagcgaaattcctgttccgcaaaagactttggcgtcaagattcctcaccattgcagagtcagaaccttttgggcctgttgatgcagcccatgttttagaattagagcctgctgtagagaccttaaggaatttgtctactgtgggggaacattctagtggccatcaacaatccactaataagaatacgaaggttatatatggtgagcttgtcgaaggtgaaagatcacaatataaatttactaacgcaaaggttggaaaagtgggataccgttacggtagcggaaatagggataacaagaaagacagaagaattggctttaataaactgggccaaatggtatatatataa

SEQ ID NO: 4468 - DNA, 1038 bp, Artificial Sequence
  Description of Artificial Sequence: Synthetic polynucleotide
atgagttacggcttaacaggtacctcttctaagttgagaggaactagtagtatattttcttggactcaggtgaggcacttttctcgtagaagaatagcctatccattttatccattcaagaaattgggaagacaacacccgaagaagcatgatacaaacttaaagactgctatgagacagtttttaggtccaaaaaattacaaaggagaatatgtcatgaacaagtattttacggttccgacgaatcatgtacctaactacattaagccagatttggaaaggggacaaagtttagaacacccggtaaccaagaagccattgcaattaaggtatgatgggacattaggtcctcctcctgtagaaaataaaaggttacaaaacattttcaaggatagattgttgcaacctttcccttccaatccacattgtaagacgaattacgtattaagcccgcaattgaagcaaagcattttcgaagagattactgtggaaggactttctgcccaacaagtttctcaaaagtatggattaaaaattcctcgtgtagaggctattgttaaattggttagcgtggaaaacagctggaacagaagaaatagagtatcttctgatttgaaaactatggacgagactttatatagaatgtttcccgtcttcgacagtgatgcctcttttaaaagagagaatttaagcgaaattcctgttccgcaaaagactttggcgtccagattcctcaccattgcagagagtgaaccttttgggcctgttgatgcagcccatgttttagaattagagcctgctgtagagaccttaaggaatttgtctactgtgggggaacattctagtggccatcaacaatccactaataagaatacgaaggttatatatggtgagcttgtcgaaggtgaaagatctcaatataaatttactaacgcaaaggttggaaaagtgggataccgttacggtagcggaaatagggataacaagaaagacagaagaattggctttaataaattgggccaaatggtatatatatga

SEQ ID NO: 4469 - DNA, 1683 bp, Saccharomyces cerevisiae
atggaatgttttgtaccgctgcgttgcgacttagatggaagtaatatagaacagttacgtcaatcacacttaagccgtaaatttattatatttgatgagcaactgaatctttggctgtggtttcaaggtaattcgcaagagaacaagagatttgtactacagaatatgataatattaataaatgaagcgcaagttaccagaacaagcactatcgatgattattttacccaagttgagaacaatgaaaatctatggaggttgaaaaacgactgctgttcgaagattcttttcaaatcaaatgttgttatgaataatggttataataatcagatcaaatttgtctttgaatataaatctgtggatgcaaatttcaataaccaggattcattacaagatccacaggcaaagtatacattagataagtactctagcgaggagattttgccaagttttgagccagtttattcctggtcttctgcagccaccaaatcatccaaaaatactaataatcatctggagaaaaataacagggcgactcatcgagttagttctaaaaatagcgaagtccacgaagcggacgtttctagaaatccgaatacatttactcttaagctccaatacccaatattctcacttttgaatatgagattgagaaacatctccttgaaatctgagcattgcatattatcatcgttagactttcaaacttctaaagcatccgaacaactgaccaaaaaatttatttatccgcaagaacacaattcttttctcaaactgaactttcaagaaatatcgtataaactaatcgacggaacctctcaaattgaactagatccaatctgtcctttgaaagtgccactcactgcattttcatacgatagcattagcgctacttttaaactggttctgttacccaaatcaactcaaccacatcgtgtgaaaatcaccttagcgtacgaactcgagctgcatcccaatctgaagttacctgtgagaacatcatgggaaacagaagtcacattgaagcgttctatgccaatttcctcgacatcttctcaatactcgagtaacaacaataataccaatcatagcgcttcttttaatggtgcggccaacaacgttaattctggtggtttggccaatctaagattaggtggggtttcctcctcaagatttagtcttggagctgcttcgactacatcattggtgaatagcaaattaagcaatgtaaaattcaagtttattaatagcaatataaaagttattaagggcgaaaagtttactatgaggcttcagatcattaactcgtcatcatcccccctggatcttgttgtgtattataacaatacaataaacccaatcccttcagctaataacgtacgtaacagcaatggtataaacaactgtggcatgaataatgggactatccccaattcgcccttgacactggaaaatcagtaccaactgcataataaatatagaaaaattgcggaggggattatactattatccaacgattacaaaattccagttgtacctccgagagaaacatacttcgcggatttacgatttattggtattatgtccggatattatggcactctctccggacttaaggtattggatttaaatacaaatgaacttatagaagttggaaatggcgcatctgtgttaatccagtaa

SEQ ID NO: 4470 - DNA, 1683 bp, Artificial Sequence
  Description of Artificial Sequence: Synthetic polynucleotide
atggaatgttttgtaccgttacgttgcgacttagatggaagtaatatagaacagttacgtcaatctcacttaagccgtaaatttattatatttgatgagcaattgaatctttggttatggtttcaaggtaattctcaagagaacaagagatttgtattacagaatatgataatattaataaatgaagcgcaagttaccagaacaagcactatcgatgattattttacccaagttgagaacaatgaaaatttatggaggttgaaaaacgactgctgttccaagattcttttcaaatctaatgttgttatgaataatggttataataatcagatcaaatttgtctttgaatataaatctgtggatgcaaatttcaataaccaggattctttacaagatccacaggcaaagtatacattagataagtactctagcgaggagattttgccaagttttgagccagtttattcctggtcttctgcagccaccaaatcttccaaaaatactaataatcatttagagaaaaataacagggcgactcatagagttagttctaaaaatagcgaagtccacgaagcggacgtttctagaaatccgaatacatttactcttaagctccaatacccaatattctctcttttgaatatgagattgagaaacatctccttgaaatctgagcattgcatattatcttctttagactttcaaacttctaaagcatccgaacaattgaccaaaaaatttatttatccgcaagaacacaattcttttctcaaattgaactttcaagaaatatcttataaattaatcgacggaacctctcaaattgaattagatccaatctgtcctttgaaagtgccactcactgcattttcttacgatagcattagcgctacttttaaattggttttattacccaaatctactcaaccacatcgtgtgaaaatcaccttagcgtacgaactcgagttacatcccaatttgaagttacctgtgagaacatcttgggaaacagaagtcacattgaagcgttctatgccaatttcctctacatcttctcaatactctagtaacaacaataataccaatcatagcgcttcttttaatggtgcggccaacaacgttaattctggtggtttggccaatttaagattaggtggggtttcctccagcagatttagtcttggagctgcttccactacatctttggtgaatagcaaattaagcaatgtaaaattcaagtttattaatagcaatataaaagttattaagggcgaaaagtttactatgaggcttcagatcattaactcttcttcttcccccttagatcttgttgtgtattataacaatacaataaacccaatcccttctgctaataacgtacgtaacagcaatggtataaacaactgtggcatgaataatgggactatccccaattctcccttgacattagaaaatcagtaccaattgcataataaatatagaaaaattgcggaggggattatattattatccaacgattacaaaattccagttgtacctccgagagaaacatacttcgcggatttaagatttattggtattatgtccggatattatggcactctctccggacttaaggtattggatttaaatacaaatgaacttatagaagttggaaatggcgcatctgtgttaatccagtga

SEQ ID NO: 4471 - DNA, 702 bp, Saccharomyces cerevisiae
atgtcagagaaattccctcctttggaagatcaaaacattgatttcacacccaacgacaaaaaagatgacgacaccgattttttaaaaagagaagcagagatacttggagacgagttcaagactgaacaggatgacatattggaaacggaggcttcccccgccaaagatgatgacgaaattagggattttgaagagcaatttccagatatcaactccgcaaatggcgcagtctcgagcgatcaaaatggtagtgctactgtatctagtggtaatgacaatggcgaggcagatgatgatttttccacattcgaaggtgccaatcagagtacagaatccgttaaagaggatcgttctgaagttgtagaccaatggaaacaacgtcgtgctgtagagattcacgaaaaggatttaaaggacgaggagttaaaaaaggaattgcaggatgaagctatcaaacatattgacgatttttacgattcttacaataaaaagaaggaacaacaattggaagatgctgctaaggaagctgaggctttcttaaagaaaagagatgaattttttggtcaagacaatacgacctgggatcgtgcacttcaattaattaaccaagatgatgccgatatcattgggggtagagacaggtctaagcttaaagaaattcttttgagattgaaaggtaacgcgaaggctcccggtgcttaa

SEQ ID NO: 4472 - DNA, 702 bp, Artificial Sequence
  Description of Artificial Sequence: Synthetic polynucleotide
atgtctgagaaattccctcctttggaagatcaaaacattgatttcacacccaacgacaaaaaagatgacgacaccgattttttaaaaagagaagcagagatacttggagacgagttcaagactgaacaggatgacatattggaaacggaggcttcccccgccaaagatgatgacgaaattagggattttgaagagcaatttccagatatcaactccgcaaatggcgcagtctccagcgatcaaaatggtagtgctactgtatctagtggtaatgacaatggcgaggcagatgatgatttttccacattcgaaggtgccaatcagagtacagaatccgttaaagaggatcgttctgaagttgtagaccaatggaaacaacgtcgtgctgtagagattcacgaaaaggatttaaaggacgaggagttaaaaaaggaattgcaggatgaagctatcaaacatattgacgatttttacgattcttacaataaaaagaaggaacaacaattggaagatgctgctaaggaagctgaggctttcttaaagaaaagagatgaattttttggtcaagacaatacgacctgggatcgtgcacttcaattaattaaccaagatgatgccgatatcattgggggtagagacaggtctaagcttaaagaaattcttttgagattgaaaggtaacgcgaaggctcccggtgcttga

SEQ ID NO: 4473 - DNA, 1131 bp, Saccharomyces cerevisiae
atgaaacacaatcgtccaaatggtactgggaaagcagtttctggcttcaagcagataataagaaggcttctactcctcttgaacaagaagagaagaaaacaactcgtcatcatcttgaaaagaataacccaagtctatggaataaacctagtattttatgtcaaaaaatggaaattgaaaaaattacagggtgaaaatattcaaataaatgatatcatgccatggctaagagagtctactatattagtcttgctgaacatactatatccaactttgatgaagttcccatttttaaaaaatcattatattcactggtcttccattgtaggaatatcgttaatgcttaccaagggtgaggtaccttcgtggattatcgcacactttcttgtggaagctatagcctccaaattaaagatcgcaaaattaacacaatggttgaaaaaaaaaaatttttcccagggtacattaataaaattccagcaaattcttgtgtgtttagcgattattgtattatttgccaaactggacaggagttcgttaccattccgtgtgctttttgaccataggccatttttaatagatttcttcacaatcaatgccattttcacagttttggcagtatatcacagaacattaaaattcttttttacttcagggacgaaatcaaataagaatgtcggcggccacgaagtcaggaacttttctcaataccttggggtcaagaaccataatgattggcccatatcttcatcaaatttgaagcatgtaatggacagactaaatgaaatacatgaagttacaattgatgataattatgcaaatataaacgaaaagataataaattcatatttcaccaagggtttttttccaagtctaaaatggactatattaaggcagtgtatcgaatatttattcgtcacgaaaaggcgcagattaatgggcaacaaattgcggtgcatcgtgatgcttcttacattcaccttcgtggatccaacaagtaaaatgaaaatcagcccatttttcgcaaaattctttgcgaagtccttggttaatgtttacttgaaaaagtattggcattgcaactttgggaaatatatactattctttttgtttcagcttagtattatgtga

SEQ ID NO: 4474 - DNA, 1131 bp, Artificial Sequence
  Description of Artificial Sequence: Synthetic polynucleotide
atgaaacacaatcgtccaaatggtactgggaaagcagtttctggcttcaagcagataataagaaggcttttactcctcttgaacaagaagagaagaaaacaactcgtcatcatcttgaaaagaataacccaagtctatggaataaacttggtattttatgtcaaaaaatggaaattgaaaaaattacagggtgaaaatattcaaataaatgatatcatgccatggttgagagagtctactatattagtcttgttgaacatactttatccaactttgatgaagttcccatttttaaaaaatcattatattcactggtcttccattgtaggaatatctttaatgcttaccaagggtgaggtaccttcctggattatcgcacactttcttgtggaagctatagcctccaaattaaagatcgcaaaattaacacaatggttgaaaaaaaaaaatttttcccagggtacattaataaaattccagcaaattcttgtgtgtttagcgattattgtattatttgccaaattagacaggagttctttaccattccgtgtgctttttgaccataggccatttttaatagatttcttcacaatcaatgccattttcacagttttggcagtatatcacagaacattaaaattcttttttacttctgggacgaaatctaataagaatgtcggcggccacgaagtcaggaacttttctcaataccttggggtcaagaaccataatgattggcccatatcttcttccaatttgaagcatgtaatggacagattgaatgaaatacatgaagttacaattgatgataattatgcaaatataaacgaaaagataataaattcttatttcaccaagggtttttttccaagtttgaaatggactatattaaggcagtgtatcgaatatttattcgtcacgaaaaggcgcagattaatgggcaacaaattgagatgcatcgtgatgcttcttacattcaccttcgtggatccaacaagtaaaatgaaaatcagcccatttttcgcaaaattctttgcgaagtccttggttaatgtttacttgaaaaagtattggcattgcaactttgggaaatatatattattctttttgtttcagcttagtattatgtga

SEQ ID NO: 4475 - DNA, 1215 bp, Saccharomyces cerevisiae
atgtcaactatcaaagttattgaggtatatacacagaatggactgagaaaggtacggccctattataacagaagatcagcgttcgtgaaggggcgctggttgggtaagttactaatagacgttctcgttagtgaatttaaacttcgcccaagagcttattatttggaccaaataaggaaaggcacatataggttgatccgagatggtgtgccgctggtaccagatcatctcatgactaccataatcaagaatcatgatgttttagaaacaactacgcataagcacgaaccgccggtaaaacaatggtgtagccaggaagttgaagcggaggatttacctggcagaatagcgggattcaatattgtttttgaagatgagagtatcctcgtcattgataaacccagtggtataccagtgcatccaaccggtcagttttaccagaacacaattactgaattactgaagttacatggtgtagatgctcttccttgttatcggttagacaagatcacatcaggcttgttgatattggccaagaacagtcagagtgcgggggaaatccagaagagtattcgttcaagagatatgattaagatctacttggcaagggtcaagggaagatttcctcactccgaattgatattggacaatgaaaatgcggcggaaacgacttttgaggacacttccaaagttacagtggaaatgacacccatatattctatcgatccaaagagacagtttccagttggtttatcgacatcgaaggatgctattaccaagttctacccaataagatacttctctcatgctgatgaaactgtcgtcgcttgtaagccaataactggaagaacacaccaaattcgaatccatttagctaggctcggtcatcccatcgtcaacgatagtgtttattgttcgcatattacaaaataccccgaaaggcttaagtttataactcagtttcctagatgggagaatcagcaggatttagatgctgaggaattgaaagtgaggtttcaaaaatttgtcgatgagacaaaaaataattgtcggacaatggaaacattttgtcctgaatgtcatactgttgatttaaaggatcctgtgctatcagacctagaattatggttgcatgcttggaagtatgaggagattaatggcaaattcaagttcaaaacagatttaccaaaatgggcacaattggacaatagttaa

SEQ ID NO: 4476 - DNA, 1215 bp, Artificial Sequence
  Description of Artificial Sequence: Synthetic polynucleotide
atgtctactatcaaagttattgaggtatatacacagaatggattaagaaaggtaagaccctattataacagaagatctgcgttcgtgaaggggcgctggttgggtaagttattgatagacgttctcgttagtgaatttaaacttcgcccaagagcttattatttggaccaaataaggaaaggcacatataggttgatcagagatggtgtgccgttagtaccagatcatctcatgactaccataatcaagaatcatgatgttttagaaacaactacgcataagcacgaaccgccggtaaaacaatggtgtagccaggaagttgaagcggaggatttacctggcagaatagcgggattcaatattgtttttgaagatgagagtatcctcgtcattgataaacccagtggtataccagtgcatccaaccggtcagttttaccagaacacaattactgaattattgaagttacatggtgtagatgctcttccttgttatagattagacaagatcacaagtggcttgttgatattggccaagaacagtcagagtgcgggggaaatccagaagagtattcgttccagagatatgattaagatctacttggcaagggtcaagggaagatttcctcactccgaattgatattggacaatgaaaatgcggcggaaacgacttttgaggacacttccaaagttacagtggaaatgacacccatatattctatcgatccaaagagacagtttccagttggtttatctacatccaaggatgctattaccaagttctacccaataagatacttctctcatgctgatgaaactgtcgtcgcttgtaagccaataactggaagaacacaccaaattagaatccatttagctaggctcggtcatcccatcgtcaacgatagtgtttattgttctcatattacaaaataccccgaaaggcttaagtttataactcagtttcctagatgggagaatcagcaggatttagatgctgaggaattgaaagtgaggtttcaaaaatttgtcgatgagacaaaaaataattgtagaacaatggaaacattttgtcctgaatgtcatactgttgatttaaaggatcctgtgctttctgacttggaattatggttgcatgcttggaagtatgaggagattaatggcaaattcaagttcaaaacagatttaccaaaatgggcacaattggacaatagttga

SEQ ID NO: 4477 - DNA, 279 bp, Saccharomyces cerevisiae
atgggtaaaagattttcagaatccgccgcaaagaaagcagctggcttagcaagaaaaagagatcaggcacatgctaaacaaagagcacaaatggagcagctagaagcggaggaagcttctaaatgggaacaaggttcgaggaaagagaatgccaaaaaattagaggaagagcaaaaaagacaagaaaaagcaagagctaaaaaggagcgcgatgcgttgctaaccgcagaggaggagcaactgggcaagggtggcaagggtaaaagaaaaatgaaataa

SEQ ID NO: 4478 - DNA, 279 bp, Artificial Sequence
  Description of Artificial Sequence: Synthetic polynucleotide
atgggtaaaagattttctgaatccgccgcaaagaaagcagctggcttagcaagaaaaagagatcaggcacatgctaaacaaagagcacaaatggagcagttagaagcggaggaagcttctaaatgggaacaaggttctaggaaagagaatgccaaaaaattagaggaagagcaaaaaagacaagaaaaagcaagagctaaaaaggagcgcgatgcgttgttgaccgcagaggaggagcaattaggcaagggtggcaagggtaaaagaaaaatgaaatga

SEQ ID NO: 4479 - DNA, 3417 bp, Saccharomyces cerevisiae
atgaggattattaagggcagaaagcgaggcaagaacaagaagccaacgctaattttaaaaattcatgtcattcaagctgaaaatattgaagccttgaagacattcaattgtaacccggtatgttttgttaccactaatacattttatagtcaaaagacgaacaagctcaagaactcaaatacacactggaatcaaaccttgaggatcaaacttccgagaaatccaacatctgaatggttaaggattatagtatacgacgccctaccaaccggagctccccctactacccccagtagaccaaggacaaccactgcaaatacatcttcatcgacactgtcaaattcagggctaagttctcactctcattcgtcgagaaatttgaatgttacgtccaaaggtaatcaaacttcaacatcaattaattcagtatcatcttcagctacaccggccccttcacattcttcctcttctctctcaacaacaggtcccgggtccacacacaaaaataggattaatagctatctatatttgggtgaagcaaaaatttcattactggatttattcaagaggaaggacaccacgacgagctataaattttcaattgaagctcagcggtaccatctatacgatatgaaaggagggaaagaccaagattccttgaactgcaactttctagtgggcgatattttgcttggatttaagctagaatgtaacgttaaaagaaccccgacttttcaggctttcaatgcttggagaaatgagttgaacacttacttgggcagaatagatagaaataaggcccgcatgagatcttctagttctttgccacctccactagaagatatgttgagcaatagttcagctgttagtggaaatgaaatacgacgcgagaaaccatatagcgatactgatctagcccacgatgaagaggtcaatgccgaggatgaaatagatgctgaggaatctattgaagatatgaatagcagcggcagcatttgtacggagaggaggtacgatatagacaatgatactatattcgactctatatctgaggttgtttcgctaaatgatgaagaactagatattctaaatgattttgaagaagcagatcatccaaatgtgccagacataaatgtgcatgacatcgacgaagatacccgtatcagtctatcttcaatgataacagctttagatgaatatgatatcgtagaaccagaagatgttgcaaaattacctgcagtgtcggaaaatgacataacatcagtggatgacgaagaatctgaaaaccaacaggaaagtgatgaggagtttgatatatataatgaggatgagcgtgaagattctgattttcaatcaaaagaatacattgggagtcggcttttacacctgcaaaggggtaaacataataaatcatatgcaaattacttatacagaagagcaaaaagtaacttttttatatcgaaaaaggaacatgcgatgggggtagtatttatgcatattggggctatcaaaaatttacctgcattaaggaatcggttgtccaagactaattatgaaatggatccatttatcgttatttcgtttggtagaagagtattcaagacatcttggagaaaacatactttaaacccagaatttaatgaatatgccgctttcgaagtttttccccatgaaacgaattttgctttcagtatcaaagttgttgataaagactcattttcattcaatgatgacgttgcaaaatgcgaactggcttggtttgatatgctgcaacagcaacaacatgaaaacgaatggataccttatgagataccattggatctcactgttgagccagcacatgctcctaagcaaccggtattatattcgagcttcaaatatgtttcatatccgttcttaaaaaagagcttttggaaagaagctgttgacacatcagtcaacttagagagactcgacattattcaagtaatgctctatcttgaacgtcttggttcattcacgatggccgattcttttgaactctttcagcatttcaataaatctgcttgggccggccagagcattactagatcacaattagttgaagggctacagtcatggagaaaatccactaattttaaacgcatctggacatgtcctagatgcatgcgttcatgcaaaccaactagaaatgctagacgttctaaactggttctagaaaatgacttgataacccattttgccatatgtacgttttcaaaagaacacaaaactttaaagccgtcgtacgtctcatctgcatttgcatccaagagatggttctctaaggttttgataaaattaacttatggtaaatatgctttgggatctaacaatgcaaacatcttggttcaagaccgagacacagggataattattgaggaaaaaataagcgcacacgtaaagttgggaatgaggattatatacaatggtaaaagtcccgagtctaaaaaatttagatccctcttgaagactttatcaatcaggcaaggcaaaaaatttgacagcactgcatctgccaaacaaattgaacctttcataaagtttcactcgctagacctttcacaatgccgagataaagattttaaaacattcaatgaatttttttacaggaaactaaaaccaggaagccggctgcctgaaagtaataataaagaaatattgttttcaccagcagattcaagatgcacagtgttcccaactatacaagaatcgaaggaaatatgggtgaaaggaagaaaattttctattaagaaactagccaataactataatccggaaacatttaatgacaataactgcagtattggtatatttagactggcgccacaagattatcaccggtttcactcaccatgtaatggtacgattggaaaacctgtatatgtggatggagagtattatactgtaaatccaatggccgttcgtagtgagttagacgtctttggtgaaaatatcagagttattatccccatcgattctcctcaatttggcaaactactgtacatacctattggtgcaatgatggttggatccatactattgacctgcaaagaaaacgatgtagttgagagtggacaggagctgggctattttaaatttggaggttctactataataatcattatcccgcacaacaacttcatgtttgattccgaccttgtgaaaaactcttcagaacgcattgaaacgttagtcaaagtcgggatgagtataggacacacatcaaatgtgaatgaattgaagagaatccgtattaaagtagacgacccaaagaaaattgaacggatcaagagaacaattagtgttagcgatgaaaatgccaagagtacaggaaatgtaacatgggaatatcatactttacgggaaatgatgaataaagattttgctgggctatga

SEQ ID NO: 4480 - DNA, 3417 bp, Artificial Sequence
  Description of Artificial Sequence: Synthetic polynucleotide
atgaggattattaagggcagaaagagaggcaagaacaagaagccaacgttgattttaaaaattcatgtcattcaagctgaaaatattgaagccttgaagacattcaattgtaacccggtatgttttgttaccactaatacattttatagtcaaaagacgaacaagctcaagaacagtaatacacactggaatcaaaccttgaggatcaaacttccgagaaatccaacatctgaatggttaaggattatagtatacgacgccttaccaaccggagctccccctactacccccagtagaccaaggacaaccactgcaaatacatcttcttctacattatccaatagtgggttgagttctcactctcattcttctagaaatttgaatgttacgtccaaaggtaatcaaacttctacatccattaattctgtatcttcttctgctacaccggccccttctcattcttcctcttctctctccacaacaggtcccgggtccacacacaaaaataggattaatagctatttgtatttgggtgaagcaaaaatttctttattagatttattcaagaggaaggacaccacgacgagctataaattttctattgaagctcagagataccatctttacgatatgaaaggagggaaagaccaagattccttgaactgcaactttttagtgggcgatattttgcttggatttaagttggaatgtaacgttaaaagaaccccgacttttcaggctttcaatgcttggagaaatgagttgaacacttacttgggcagaatagatagaaataaggcccgcatgagatcttctagttctttgccacctccattggaagatatgttgagcaatagttctgctgttagtggaaatgaaataaggcgcgagaaaccatatagcgatactgatttggcccacgatgaagaggtcaatgccgaggatgaaatagatgctgaggaatctattgaagatatgaatagcagcggcagcatttgtacggagaggaggtacgatatagacaatgatactatattcgactctatatctgaggttgtttctttgaatgatgaagaattagatattttgaatgattttgaagaagcagatcatccaaatgtgccagacataaatgtgcatgacatcgacgaagatacccgtatcagtttatcttctatgataacagctttagatgaatatgatatcgtagaaccagaagatgttgcaaaattacctgcagtgtctgaaaatgacataacatctgtggatgacgaagaatctgaaaaccaacaggaaagtgatgaggagtttgatatatataatgaggatgagcgtgaagattctgattttcaaagtaaagaatacattgggagtagacttttacacttgcaaaggggtaaacataataaaagttatgcaaattacttatacagaagagcaaaaagtaacttttttatatccaaaaaggaacatgcgatgggggtagtatttatgcatattggggctatcaaaaatttacctgcattaaggaatagattgtccaagactaattatgaaatggatccatttatcgttatttcctttggtagaagagtattcaagacatcttggagaaaacatactttaaacccagaatttaatgaatatgccgctttcgaagtttttccccatgaaacgaattttgctttcagtatcaaagttgttgataaagactctttttctttcaatgatgacgttgcaaaatgcgaattggcttggtttgatatgttacaacagcaacaacatgaaaacgaatggataccttatgagataccattggatctcactgttgagccagcacatgctcctaagcaaccggtattatattctagcttcaaatatgtttcttatccgttcttaaaaaagagcttttggaaagaagctgttgacacatctgtcaacttagagagactcgacattattcaagtaatgctctatcttgaacgtcttggttctttcacgatggccgattcttttgaactctttcagcatttcaataaatctgcttgggccggccagagcattactagatctcaattagttgaagggttgcagagttggagaaaatccactaattttaaacgcatctggacatgtcctagatgcatgcgttcttgcaaaccaactagaaatgctagacgttctaaattggttttggaaaatgacttgataacccattttgccatatgtacgttttccaaagaacacaaaactttaaagccgagctacgtcagctctgcatttgcatccaagagatggttctctaaggttttgataaaattaacttatggtaaatatgctttgggatctaacaatgcaaacatcttggttcaagacagagacacagggataattattgaggaaaaaataagcgcacacgtaaagttgggaatgaggattatatacaatggtaaaagtcccgagtctaaaaaatttagatccctcttgaagactttatctatcaggcaaggcaaaaaatttgacagcactgcatctgccaaacaaattgaacctttcataaagtttcactctttggacctttctcaatgcagagataaagattttaaaacattcaatgaatttttttacaggaaattgaaaccaggaagcaggttgcctgaaagtaataataaagaaatattgttttctccagcagattccagatgcacagtgttcccaactatacaagaatccaaggaaatatgggtgaaaggaagaaaattttctattaagaaattggccaataactataatccggaaacatttaatgacaataactgcagtattggtatatttagattagcgccacaagattatcacagatttcactctccatgtaatggtacgattggaaaacctgtatatgtggatggagagtattatactgtaaatccaatggccgttcgtagtgagttagacgtctttggtgaaaatatcagagttattatccccatcgattctcctcaatttggcaaattattgtacatacctattggtgcaatgatggttggatccatattattgacctgcaaagaaaacgatgtagttgagagtggacaggagttgggctattttaaatttggaggttctactataataatcattatcccgcacaacaacttcatgtttgattccgaccttgtgaaaaactcttctgaacgcattgaaacgttagtcaaagtcgggatgagtataggacacacaagtaatgtgaatgaattgaagagaatccgtattaaagtagacgacccaaagaaaattgaaagaatcaagagaacaattagtgttagcgatgaaaatgccaagagtacaggaaatgtaacatgggaatatcatactttaagagaaatgatgaataaagattttgctgggctttga

SEQ ID NO: 4481 - DNA, 1728 bp, Saccharomyces cerevisiae
atgcaatgtcgatcaattgtgcatcgtctgtactctaaggtctcccacgtaacgacgccaattttctatcccaatgccaaaccgcacctcggccatctttactccagcttattaagtgacgtttaccatcgatggcaattatttaaaggtaatctatccttctttaccacaggtactgatgaacatggattgaaaatccagtgtgctagtgaaagcaatggcttcgatcagccaaaaaagttcgtcgataagctatacccagagtttgttcaattagacaaaatatatggcattaattatacaagatttataaggactacggatcctgaccacattgaaaacgtgatgaaattatgggaactttgtttgaaaaatggctatatttacatgggcgaacataagggttggtattccatttctgatgaaacattctatcctgaatccaaggttattaaagaccccaaaaatgatggtaagtatctgaatacagaatcgaaaaacgaagtagtttatcagtcagagacaaattacttctttaggctatccttatttaacaagaaaatagttgaccatataagaaagaatccagatttcatttttcctgcttctaaaagagaccaaattctaaaagaactagaaaccggtgggacattgccagatttatcgatatcgagaccctctgcgagacttaaatggggtataccgactcctaatgatccgtcccaaaaagtttatgtgtggtttgatgccttgtgtaactacctctcctccatcggtggcataccgtccatcttgagtaatgctactgaagtagtttcaagacattatagcgacaaatcaaacgtaaaaggccaattgttaataccatacccaaaagaagtgcagcgaaacaccattcacgtgataggaaaggatatcgcgaaattccataccgtatattggccttcttttttactggctgctggactgcctttaccaagacaaattgttgttcatggacactggctctgcaatggaatgaaaatgtccaaaagtttgggtaatgttgtagatccgattgatatggcacgttattatggagccgatattgtgcgttggttcttgttagaaaattctaaactggaagaggacggcgattttcaagaagccaaattatacgagacaagagagcttttagtatccaaatggggcaatctgattaacagatgttgtggctcgaaattcaatattgaaagagctgttatgaaatttagcgacaaggcaaattttcaatttcaggagattttccaaaatgaaccaatagtctccgaacgaattgagaatctggctaaactactcaacaaatcacaagaggtttttgacgaaaaaatagccatattccagtatcctcaactgctaaggcatgtttggagtattatcaacgatgcaaatactttggttcaaaatagtaaaccttgggagagggaattagatcaacaagacaatataatatttttggctatggaaacgtctagaatcctctccattttatgccaatccattataccatctctctcacaaagtttcctagatcgtattgatgtttcaaaggagaaaaggactataaattatgctagattgggttccgataaaacatatggaaagcaatctaacaagaaaggccgagaagtacctttgaaaaaaattccattcaggttgcaagaggaacaaacgaatatgaggtcatga

SEQ ID NO: 4482 - DNA, 1728 bp, Artificial Sequence
  Description of Artificial Sequence: Synthetic polynucleotide
atgcaatgtagatctattgtgcatcgtctttactctaaggtctcccacgtaacgacgccaattttctatcccaatgccaaaccgcacctcggccatctttactccagcttattaagtgacgtttaccatcgttggcaattatttaaaggtaatttatccttctttaccacaggtactgatgaacatggattgaaaatccagtgtgctagtgaaagcaatggcttcgatcagccaaaaaagttcgtcgataagttgtacccagagtttgttcaattagacaaaatatatggcattaattatacaagatttataaggactacggatcctgaccacattgaaaacgtgatgaaattatgggaactttgtttgaaaaatggctatatttacatgggcgaacataagggttggtattccatttctgatgaaacattctatcctgaatccaaggttattaaagaccccaaaaatgatggtaagtatttgaatacagaaagtaaaaacgaagtagtttatcagtctgagacaaattacttctttaggctttccttatttaacaagaaaatagttgaccatataagaaagaatccagatttcatttttcctgcttctaaaagagaccaaattttgaaagaattggaaaccggtgggacattgccagatttatctatatctagaccctctgcgagacttaaatggggtataccgactcctaatgatccgtcccaaaaagtttatgtgtggtttgatgccttgtgtaactacctctcctccatcggtggcataccgtccatcttgagtaatgctactgaagtagtttctagacattatagcgacaaaagtaacgtaaaaggccaattgttaataccatacccaaaagaagtgcagagaaacaccattcacgtgataggaaaggatatcgcgaaattccataccgtatattggccttcttttttattagctgctggattgcctttaccaagacaaattgttgttcatggacactggctctgcaatggaatgaaaatgtccaaaagtttgggtaatgttgtagatccgattgatatggcacgttattatggagccgatattgtgcgttggttcttgttagaaaattctaaattagaagaggacggcgattttcaagaagccaaattatacgagacaagagagcttttagtatccaaatggggcaatttaattaacagatgttgtggctctaaattcaatattgaaagagctgttatgaaatttagcgacaaggcaaattttcaatttcaggagattttccaaaatgaaccaatagtctccgaaagaattgagaatttggctaaattactcaacaaatctcaagaggtttttgacgaaaaaatagccatattccagtatcctcaattattgaggcatgtttggagtattatcaacgatgcaaatactttggttcaaaatagtaaaccttgggagagggaattagatcaacaagacaatataatatttttggctatggaaacgtctagaatcctctccattttatgccaatccattataccatctctctctcaaagtttcttggatcgtattgatgtttccaaggagaaaaggactataaattatgctagattgggttccgataaaacatatggaaagcaatctaacaagaaaggcagagaagtacctttgaaaaaaattccattcaggttgcaagaggaacaaacgaatatgaggtcttga

SEQ ID NO: 4483 - DNA, 747 bp, Saccharomyces cerevisiae
atgtctttctacaatactagtaacaatgctaataatggcggtggcttttatcagccttctgcacaatttgccgttccccaagggtcaatgagttttcaaaataccgtcggttcttctaatactggcaacgataacaatttgggtgttgcccccgaccctttgcctgtaggtattttacatgctctttcaactaagggatatccacatgaacctccattactggaggaaattggaataaatttcgatcatatcataacgaaaactaaaatggttcttataccaatacgttttggtagtggtgtgccacaagaaattctaaacgattcagatttggctgggcctttgatattctttttgttattcggactttttctattgatggctggaaaggttcattttggatatatctatggtgtcgctttgtttggtaccatttctttgcacaatctatcgaaattaatgagcaataacgatacttccactcaaacgaacctacaatttttcaatacagcgtccatcttaggatactgctttttgcctctgtgtttcctttctttactgggcattttccatggtttgaacaacactacaggttatgttgtatcagtactatttgtaatttggagtacttggacctcgtctggatttttaaattctttgctccaattgcaaaatgcaagattgctaattgcctacccactgttgattttctacagtgtttttgccctcatggtaatttttgtctga

SEQ ID NO: 4484 - DNA, 747 bp, Artificial Sequence
  Description of Artificial Sequence: Synthetic polynucleotide
atgtctttctacaatactagtaacaatgctaataatggcggtggcttttatcagccttctgcacaatttgccgttccccaagggtccatgagttttcaaaataccgtcggttcttctaatactggcaacgataacaatttgggtgttgcccccgaccctttgcctgtaggtattttacatgctctttctactaagggatatccacatgaacctccattattggaggaaattggaataaatttcgatcatatcataacgaaaactaaaatggttcttataccaatacgttttggtagtggtgtgccacaagaaattttgaacgattctgatttggctgggcctttgatattctttttgttattcggactttttttattgatggctggaaaggttcattttggatatatctatggtgtcgctttgtttggtaccatttctttgcacaatttatccaaattaatgagcaataacgatacttccactcaaacgaacttacaatttttcaatacagcgtccatcttaggatactgctttttgcctctttgtttcctttctttattaggcattttccatggtttgaacaacactacaggttatgttgtatctgtattatttgtaatttggagtacttggacctcttctggatttttaaattctttgctccaattgcaaaatgcaagattgttaattgcctacccattgttgattttctacagtgtttttgccctcatggtaatttttgtctga

SEQ ID NO: 4485 - DNA, 1107 bp, Saccharomyces cerevisiae
atgggtattatcgacaaaatcaaagccatcgaagaagaaatggccagaacccaaaaaaataaggccacagaacatcatctgggtcttttgaaggggaaattggctagatacagacaacaactgctagctgatgaagctggtagtggtggtggaggagggtctggttttgaagtggcaaaatcaggtgacgctagagtagttttaataggttacccctccgtcggtaagtcctccttattgggtaaaattaccaccaccaagtctgagatcgctcattatgctttcacgacattgacatccgttcctggtgtattgaagtaccaaggtgcagaaatccaaattgtggatcttccaggtattatttatggtgcttcgcagggtaaaggtcgtggtaggcaagttgttgcaacagcaaggaccgcagatctagtattaatggttttagatgccacaaagagtgaacatcaaagagcatctttggagaaggagctggaaaatgtaggcatcaggcttaataaagagaaaccaaatatttactataagaaaaaagaaactggtggcgtgaaagttacgtttacctcccctccaaagaccaatttaaccgaacaggcaatcaaaatgatcttgagagattatcgtatccataatgcagaagttctggtaagagatgaccaatgtacgattgatgattttatcgatgttattaacgaacaacatagaaattatgtcaaatgtctttatgtgtataataagatagatgcagtatcattagaagaggtggataaacttgccagagagccaaacaccgttgttatgtcctgtgaaatggatttgggattacaagacgtcgttgaagaaatttggtaccagctgaacttgagtcgtgtgtatacaaagaagagaggtgttagaccagtatttgatgatcctctagtggtaagaaataattccactattggtgacttatgtcatggtatccacagggatttcaaagataagttcaaatacgcattggtttggggttcttctgccaaacattctcctcagaagtgcggcttaaaccacaggattgatgatgaagatgtagtttctttattcgcgaaatag

SEQ ID NO: 4486 - DNA, 1107 bp, Artificial Sequence
  Description of Artificial Sequence: Synthetic polynucleotide
atgggtattatcgacaaaatcaaagccatcgaagaagaaatggccagaacccaaaaaaataaggccacagaacatcatttaggtcttttgaaggggaaattggctagatacagacaacaattattagctgatgaagctggtagtggtggtggaggagggtctggttttgaagtggcaaaatctggtgacgctagagtagttttaataggttacccctccgtcggtaagtcctccttattgggtaaaattaccaccaccaagtctgagatcgctcattatgctttcacgacattgacatccgttcctggtgtattgaagtaccaaggtgcagaaatccaaattgtggatcttccaggtattatttatggtgcttctcagggtaaaggtcgtggtaggcaagttgttgcaacagcaaggaccgcagatttagtattaatggttttagatgccacaaagagtgaacatcaaagagcatctttggagaaggagttagaaaatgtaggcatcaggcttaataaagagaaaccaaatatttactataagaaaaaagaaactggtggcgtgaaagttacgtttacctcccctccaaagaccaatttaaccgaacaggcaatcaaaatgatcttgagagattatcgtatccataatgcagaagttttggtaagagatgaccaatgtacgattgatgattttatcgatgttattaacgaacaacatagaaattatgtcaaatgtctttatgtgtataataagatagatgcagtatctttagaagaggtggataaacttgccagagagccaaacaccgttgttatgtcctgtgaaatggatttgggattacaagacgtcgttgaagaaatttggtaccagttgaacttgagtcgtgtgtatacaaagaagagaggtgttagaccagtatttgatgatcctttagtggtaagaaataattccactattggtgacttatgtcatggtatccacagggatttcaaagataagttcaaatacgcattggtttggggttcttctgccaaacattctcctcagaagtgcggcttaaaccacaggattgatgatgaagatgtagtttctttattcgcgaaatga

SEQ ID NO: 4487 - DNA, 513 bp, Saccharomyces cerevisiae
atgcagtgcgcgataactcctagagaggcagtaatagcaaaacaaagacagtataagcattatttgggtatggaaagaccattgtgggtacgttggttgaaagtctatgcaattggtggcgctattattggaagcgggtttctgcttttcaagtacacaacgccaacagatcaacagttaatcagccagctttccccagaattacgtttacaatatgagagggagaaaaaactacgtcagtcggagcagcaggctttgatgaaaattgttaaggaaacttctcaaagtgacgatccaatttggaagacgggcccccttcaatcaccttgggaaaggaacggtgataacgttcaaagcagagatcactttgctaaggtgagggcggaggaggtgcaaaaagaagagttggctaggatcagaaatgaactgtctcagctaagatctgaaacggaggagaaaacaaaggaaatagtccaggataagcaggttaaaagctggtggcgcttctggtag

SEQ ID NO: 4488 - DNA, 513 bp, Artificial Sequence
  Description of Artificial Sequence: Synthetic polynucleotide
atgcagtgcgcgataactcctagagaggcagtaatagcaaaacaaagacagtataagcattatttgggtatggaaagaccattgtgggtacgttggttgaaagtctatgcaattggtggcgctattattggaagcgggtttttacttttcaagtacacaacgccaacagatcaacagttaatcagccagctttccccagaattacgtttacaatatgagagggagaaaaaattacgtcagtctgagcagcaggctttgatgaaaattgttaaggaaacttctcaaagtgacgatccaatttggaagacgggcccccttcaaagtccttgggaaaggaacggtgataacgttcaaagcagagatcactttgctaaggtgagggcggaggaggtgcaaaaagaagagttggctaggatcagaaatgaattatctcagttaagatctgaaacggaggagaaaacaaaggaaatagtccaggataagcaggttaaaagctggtggcgcttctggtga

SEQ ID NO: 4489 - DNA, 87 bp, Saccharomyces cerevisiae
atgaatctcaatgcatattttgaagcatatcaagccatttttccttttctgttggaggcatttttaaggaaagaacaaaaagtataa

SEQ ID NO: 4490 - DNA, 87 bp, Artificial Sequence
  Description of Artificial Sequence: Synthetic oligonucleotide
atgaatctcaatgcatattttgaagcatatcaagccatttttccttttttattggaggcatttttaaggaaagaacaaaaagtatga

SEQ ID NO: 4491 - DNA, 1491 bp, Saccharomyces cerevisiae
atgtctgctgttaacgttgcacctgaattgattaatgccgacaacacaattacctacgatgcgattgtcatcggtgctggtgttatcggtccatgtgttgctactggtctagcaagaaagggtaagaaagttcttatcgtagaacgtgactgggctatgcctgatagaattgttggtgaattgatgcaaccaggtggtgttagagcattgagaagtctgggtatgattcaatctatcaacaacatcgaagcatatcctgttaccggttataccgtctttttcaacggcgaacaagttgatattccatacccttacaaggccgatatccctaaagttgaaaaattgaaggacttggtcaaagatggtaatgacaaggtcttggaagacagcactattcacatcaaggattacgaagatgatgaaagagaaaggggtgttgcttttgttcatggtagattcttgaacaacttgagaaacattactgctcaagagccaaatgttactagagtgcaaggtaactgtattgagatattgaaggatgaaaagaatgaggttgttggtgccaaggttgacattgatggccgtggcaaggtggaattcaaagcccacttgacatttatctgtgacggtatcttttcacgtttcagaaaggaattgcacccagaccatgttccaactgtcggttcttcgtttgtcggtatgtctttgttcaatgctaagaatcctgctcctatgcacggtcacgttattcttggtagtgatcatatgccaatcttggtttaccaaatcagtccagaagaaacaagaatcctttgtgcttacaactctccaaaggtcccagctgatatcaagagttggatgattaaggatgtccaacctttcattccaaagagtctacgtccttcatttgatgaagccgtcagccaaggtaaatttagagctatgccaaactcctacttgccagctagacaaaacgacgtcactggtatgtgtgttatcggtgacgctctaaatatgagacatccattgactggtggtggtatgactgtcggtttgcatgatgttgtcttgttgattaagaaaataggtgacctagacttcagcgaccgtgaaaaggttttggatgaattactagactaccatttcgaaagaaagagttacgattccgttattaacgttttgtcagtggctttgtattctttgttcgctgctgacagcgataacttgaaggcattacaaaaaggttgtttcaaatatttccaaagaggtggcgattgtgtcaacaaacccgttgaatttctgtctggtgtcttgccaaagcctttgcaattgaccagggttttcttcgctgtcgctttttacaccatttacttgaacatggaagaacgtggtttcttgggattaccaatggctttattggaaggtattatgattttgatcacagctattagagtattcaccccatttttgtttggtgagttgattggttaa

SEQ ID NO: 4492 - DNA, 1491 bp, Artificial Sequence
  Description of Artificial Sequence: Synthetic polynucleotide
atgtctgctgttaacgttgcacctgaattgattaatgccgacaacacaattacctacgatgcgattgtcatcggtgctggtgttatcggtccatgtgttgctactggtttggcaagaaagggtaagaaagttcttatcgtagaacgtgactgggctatgcctgatagaattgttggtgaattgatgcaaccaggtggtgttagagcattgagaagtttgggtatgattcaatctatcaacaacatcgaagcatatcctgttaccggttataccgtctttttcaacggcgaacaagttgatattccatacccttacaaggccgatatccctaaagttgaaaaattgaaggacttggtcaaagatggtaatgacaaggtcttggaagacagcactattcacatcaaggattacgaagatgatgaaagagaaaggggtgttgcttttgttcatggtagattcttgaacaacttgagaaacattactgctcaagagccaaatgttactagagtgcaaggtaactgtattgagatattgaaggatgaaaagaatgaggttgttggtgccaaggttgacattgatggccgtggcaaggtggaattcaaagcccacttgacatttatctgtgacggtatcttttctcgtttcagaaaggaattgcacccagaccatgttccaactgtcggttcttcttttgtcggtatgtctttgttcaatgctaagaatcctgctcctatgcacggtcacgttattcttggtagtgatcatatgccaatcttggtttaccaaatcagtccagaagaaacaagaatcctttgtgcttacaactctccaaaggtcccagctgatatcaagagttggatgattaaggatgtccaacctttcattccaaagagtttacgtccttcttttgatgaagccgtcagccaaggtaaatttagagctatgccaaactcctacttgccagctagacaaaacgacgtcactggtatgtgtgttatcggtgacgctttgaatatgagacatccattgactggtggtggtatgactgtcggtttgcatgatgttgtcttgttgattaagaaaataggtgacttggacttcagcgaccgtgaaaaggttttggatgaattattagactaccatttcgaaagaaagagttacgattccgttattaacgttttgtctgtggctttgtattctttgttcgctgctgacagcgataacttgaaggcattacaaaaaggttgtttcaaatatttccaaagaggtggcgattgtgtcaacaaacccgttgaatttttatctggtgtcttgccaaagcctttgcaattgaccagggttttcttcgctgtcgctttttacaccatttacttgaacatggaagaacgtggtttcttgggattaccaatggctttattggaaggtattatgattttgatcacagctattagagtattcaccccatttttgtttggtgagttgattggttga

SEQ ID NO: 4493 - DNA, 1608 bp, Saccharomyces cerevisiae
atggaagatatagaaggatacgaaccacatatcactcaagagttgatagaccgtggccatgcaagacgtatgggccacttggaaaactactttgctgttttgagtaggcagaaaatgtactcgaattttactgtttacgcggaattgaataaaggtgttaataagagacaactaatgcttgtcttgaaagtattacttcaaaaatactcaactcttgcgcatacaatcattcctaagcattatcctcatcatgaagcgtactactctagcgaagagtaccttagtaaaccttttccacagcatgatttcataaaggtgatttctcatcttgaattcgatgacttgattatgaataatcaaccagaatacagagaagtcatggagaaaatctcagaacagttcaaaaaggatgatttcaaagtcaccaataggttaatcgaattgattagccctgtaatcatacctctgggtaatccgaagaggcctaattggagattgatttgtttaccaggtaaggatactgatgggtttgaaacgtggaaaaacttcgtttatgtcactaaccactgcggctccgacggtgtcagtggatcgaattttttcaaagatttagctctactcttttgtaaaatcgaagaaaaagggtttgattatgatgaagagttcatcgaagatcaagtcatcattgactatgatcgagactacactgaaatttctaaattgccaaaaccgattacggatcgtattgactacaagccagcattgacttcattacccaaattctttttaacaaccttcatttatgaacattgtaattttaaaacctccagcgaatctacacttacagctagatatagcccctctagtaatgctaatgctagttacaattacttgttgcatttcagtactaagcaagtagaacaaatcagagctcagatcaagaaaaatgttcacgatgggtgcaccctaacacccttcattcaagcgtgctttcttgtagccctgtatagactggataagctgttcacaaaatctcttctcgagtatgggttcgatgtggctattccaagcaacgcaagaaggtttttaccaaacgatgaagagttaagagattcttataaatacggctccaacgttggaggttcgcattacgcctatctaatctcctcattcgacattcccgaaggtgacaatgacaagttttggagtcttgtcgaatactactatgaccgctttttagaatcgtacgacaacggtgaccacttgattggtctgggggtcctacaacttgattttatcgttgaaaacaagaatatagacagccttcttgccaactcttatttgcaccagcaaagaggcggtgcaatcatcagtaatacaggacttgtctcgcaagatacgaccaagccgtactacgttcgggatttaatcttctcgcagtctgcaggcgccttgagatttgcgttcggcctaaacgtttgctccacaaacgtgaatggtatgaacatggacatgagcgtggttcagggcactctacgggatcgtggcgaatgggaatcgttctgcaagctcttctaccaaaccatcggcgaatttgcgtcgctttaa

SEQ ID NO: 4494 - DNA, 1608 bp, Artificial Sequence
  Description of Artificial Sequence: Synthetic polynucleotide
atggaagatatagaaggatacgaaccacatatcactcaagagttgatagaccgtggccatgcaagacgtatgggccacttggaaaactactttgctgttttgagtaggcagaaaatgtactctaattttactgtttacgcggaattgaataaaggtgttaataagagacaattgatgcttgtcttgaaagtattacttcaaaaatactccactcttgcgcatacaatcattcctaagcattatcctcatcatgaagcgtactactctagcgaagagtaccttagtaaaccttttccacagcatgatttcataaaggtgatttctcatcttgaattcgatgacttgattatgaataatcaaccagaatacagagaagtcatggagaaaatcagtgaacagttcaaaaaggatgatttcaaagtcaccaataggttaatcgaattgattagccctgtaatcatacctttaggtaatccgaagaggcctaattggagattgatttgtttaccaggtaaggatactgatgggtttgaaacgtggaaaaacttcgtttatgtcactaaccactgcggctccgacggtgtcagtggaagtaattttttcaaagatttagctttactcttttgtaaaatcgaagaaaaagggtttgattatgatgaagagttcatcgaagatcaagtcatcattgactatgatagagactacactgaaatttctaaattgccaaaaccgattacggatcgtattgactacaagccagcattgacttctttacccaaattctttttaacaaccttcatttatgaacattgtaattttaaaacctccagcgaatctacacttacagctagatatagcccctctagtaatgctaatgctagttacaattacttgttgcatttcagtactaagcaagtagaacaaatcagagctcagatcaagaaaaatgttcacgatgggtgcaccttaacacccttcattcaagcgtgctttcttgtagccttatatagattagataagcttttcacaaaatctcttctcgagtatgggttcgatgtggctattccaagcaacgcaagaaggtttttaccaaacgatgaagagttaagagattcttataaatacggctccaacgttggaggttctcattacgcctatttgatctccagtttcgacattcccgaaggtgacaatgacaagttttggagtcttgtcgaatactactatgaccgctttttagaatcttacgacaacggtgaccacttgattggtttgggggtcttacaacttgattttatcgttgaaaacaagaatatagacagccttcttgccaactcttatttgcaccagcaaagaggcggtgcaatcatcagtaatacaggacttgtctctcaagatacgaccaagccgtactacgttagagatttaatcttctctcagtctgcaggcgccttgagatttgcgttcggcttgaacgtttgctccacaaacgtgaatggtatgaacatggacatgagcgtggttcagggcactttgagagatcgtggcgaatgggaatctttctgcaagctcttctaccaaaccatcggcgaatttgcgtccctttga

SEQ ID NO: 4495 - DNA, 2169 bp, Saccharomyces cerevisiae
atgaagggaaactttaggaaaagagatagctccaccaactcaagaaagggtggtaattctgacagcaattatacgaatggaggcgtccctaatcaaaacaacagttcaatgttctatgagaaccctgaaattacgagaaactttgatgaccgtcaagattatttgttagccaatagtataggctctgatgtaacagtaactgttacttcaggtgtgaaatataccggtttattagtatcttgtaatttggaatctactaatggtatcgatgttgtattaagatttcccagggttgctgattcaggagttagtgattctgtggatgacttggctaagactttgggagaaaccttgctgattcacggtgaagatgtcgctgagttggaactgaagaatattgatttgtctcttgatgagaaatgggaaaattccaaagcccaagaaacaacgcccgccagaacaaatattgaaaaggaaagggtaaatggagaatcgaatgaagttacgaaattcaggactgatgttgatatttctggttctggtagagaaattaaggagcgtaagttagaaaaatggacacccgaagaaggcgcggaacattttgatatcaacaagggtaaagctttggaagacgattctgccagttgggatcaatttgctgtgaacgagaaaaagtttggcgtaaagtcaacttttgatgaacatttgtatacaacaaagattaacaaggatgaccctaattacagtaagaggttgcaagaagccgaaagaatcgctaaggaaattgaatcgcaaggaacttccggtaatattcatattgcagaggacagaggtatcataattgatgattctggtctagatgaagaagacttatactctggtgttgatagaagaggagatgagttgttggccgctttaaaaagcaattctaagcctaattccaacaaggggaataggtatgtcccacctactttaagacagcaacctcatcatatggatccagcaattatctcttcgagtaattctaacaaaaatgaaaatgccgtttccacggatacctctactcccgcagcagcaggtgcgccagagggaaaacccccacaaaagacttctaagaataagaaaagtttgagtagcaaagaagcccagattgaagagttgaagaaattttccgagaaatttaaagttccatatgatattccaaaagacatgctagaagtcttaaaaaggtcaagctctacattaaaatctaattcttcgttgcctccaaaaccgatcagcaaaaccccttcggccaagactgtttctcctactacacagatttctgcagggaaatcagaatctagaagaagtggcagcaacatatctcaaggccaatcatctaccggccataccacgagatctagtacttcattgagaagacgtaatcatggttccttttttggtgccaagaaccctcatactaatgacgccaagagagtgttgttcggaaaaagttttaatatgttcatcaaatccaaggaggcccacgatgaaaagaagaaaggcgatgatgcctcggagaatatggaacccttctttattgaaaaaccttattttactgcgccaacctggttaaatacaattgaagaatcgtataagacatttttcccagatgaggatacggcgattcaagaagctcaaactaggttccaacaacgccaattgaactccatgggcaatgctgtgcctggtatgaatccagctatgggcatgaatatgggcgggatgatgggctttccgatgggaggtccatcggcatcaccaaatccgatgatgaatggctttgctgctgggtcaatgggtatgtacatgccatttcaacctcagccaatgttttatcacccatctatgcctcaaatgatgccagttatgggtagcaatggggctgaagaaggaggaggaaatatttcgccccatgtccctgcaggttttatggcagctggccctggcgctcctatgggtgccttcgggtatccaggagggatacccttccaaggaatgatgggatcaggtccatctggcatgccagcgaacgggtcggcaatgcacagtcatggccatagtagaaattaccatcaaactagccaccatggccaccataatagtagtaccagtggccataaatag

SEQ ID NO: 4496 - DNA, 2169 bp, Artificial Sequence
  Description of Artificial Sequence: Synthetic polynucleotide
atgaagggaaactttaggaaaagagatagctccaccaactctagaaagggtggtaattctgacagcaattatacgaatggaggcgtccctaatcaaaacaacagttctatgttctatgagaaccctgaaattacgagaaactttgatgaccgtcaagattatttgttagccaatagtataggctctgatgtaacagtaactgttacttctggtgtgaaatataccggtttattagtatcttgtaatttggaatctactaatggtatcgatgttgtattaagatttcccagggttgctgattctggagttagtgattctgtggatgacttggctaagactttgggagaaaccttgttaattcacggtgaagatgtcgctgagttggaattgaagaatattgatttgtctcttgatgagaaatgggaaaattccaaagcccaagaaacaacgcccgccagaacaaatattgaaaaggaaagggtaaatggagaaagtaatgaagttacgaaattcaggactgatgttgatatttctggttctggtagagaaattaaggagcgtaagttagaaaaatggacacccgaagaaggcgcggaacattttgatatcaacaagggtaaagctttggaagacgattctgccagttgggatcaatttgctgtgaacgagaaaaagtttggcgtaaagtctacttttgatgaacatttgtatacaacaaagattaacaaggatgaccctaattacagtaagaggttgcaagaagccgaaagaatcgctaaggaaattgaatctcaaggaacttccggtaatattcatattgcagaggacagaggtatcataattgatgattctggtttggatgaagaagacttatactctggtgttgatagaagaggagatgagttgttggccgctttaaaaagcaattctaagcctaattccaacaaggggaataggtatgtcccacctactttaagacagcaacctcatcatatggatccagcaattatctcttccagtaattctaacaaaaatgaaaatgccgtttccacggatacctctactcccgcagcagcaggtgcgccagagggaaaacccccacaaaagacttctaagaataagaaaagtttgagtagcaaagaagcccagattgaagagttgaagaaattttccgagaaatttaaagttccatatgatattccaaaagacatgttggaagtcttaaaaaggagcagctctacattaaaatctaattcttctttgcctccaaaaccgatcagcaaaaccccttctgccaagactgtttctcctactacacagatttctgcagggaaaagtgaatctagaagaagtggcagcaacatatctcaaggccaatcttctaccggccataccacgagatctagtacttctttgagaagacgtaatcatggttccttttttggtgccaagaaccctcatactaatgacgccaagagagtgttgttcggaaaaagttttaatatgttcatcaaatccaaggaggcccacgatgaaaagaagaaaggcgatgatgcctctgagaatatggaacccttctttattgaaaaaccttattttactgcgccaacctggttaaatacaattgaagaaagttataagacatttttcccagatgaggatacggcgattcaagaagctcaaactaggttccaacaacgccaattgaactccatgggcaatgctgtgcctggtatgaatccagctatgggcatgaatatgggcgggatgatgggctttccgatgggaggtccatctgcatctccaaatccgatgatgaatggctttgctgctgggtccatgggtatgtacatgccatttcaacctcagccaatgttttatcacccatctatgcctcaaatgatgccagttatgggtagcaatggggctgaagaaggaggaggaaatatttctccccatgtccctgcaggttttatggcagctggccctggcgctcctatgggtgccttcgggtatccaggagggatacccttccaaggaatgatgggatctggtccatctggcatgccagcgaacgggtctgcaatgcacagtcatggccatagtagaaattaccatcaaactagccaccatggccaccataatagtagtaccagtggccataaatga

SEQ ID NO: 4497 - DNA, 1221 bp, Saccharomyces cerevisiae
atggcagctgatagagataattttttacaaaatattgaaaatgattcaattaacaatggccaggccatggatctgtcacccaaccgaagttcctctgaaagcgatagcagcattctcatgaatgtgaatgatattaaaactttacgtctggacgtagcaccagaagctaaaagcacccaatcaaagaagtcgcttttttatgagaactctgatgatgctgaagaaggagaaatagaagagcgcacgaacaaagaagaaggacaataccatcataaaggatctaaacaacttcgatttgaggttggcaaggaaagtacaggtaaattgcaatctcatctatcggatggaagcgcaacaagtggagagggcaatgtacgaccttgggaattcaggaaggtaatacaagctgagtatagagaaaggttgccgcgcaattatgaattaaagcattggaaaaagccttctaaaataatgataggatccatacttcgtttattagagactaacactgtaagcgctcttgattctgtctttgagaagtacgaaaaggaaatgaaccaaatgacgcatggcgataataatgaggttaaaagaatatattctaagaaggaacgtttgcttgaaataatcctcacaaagataaagaagaagctaagacaggccaaatttccctctaggatatcggaaagagatctagacatcgagtatatttattctaagcgacaatttattcaaaaccggtattcacaagaactacaaaataatgagagattggaagcaattctttcacgtgaacaaaaccttttggaggaaactaggaagttgtgcatgaatttaaaaacaaacaacaagaaacgactcactgagaagctaatacaaaaagatctgcatccagtacttaacaaagcaatggaatatacatatggcttagaatctactaatggatttatgcatcctgatggcccagtaacttttagaaatgatagccacgaattgaacctgatgttgaacgaccccataaaaagtacagccgatgtgaggcttgataaggaggaagtactgtcgttgttaccttctttgaaagaatatacgaagaaatcaaaggaacttaaggaaacaatgggtcaaatgatttcggattcacatgaagaagaaatcaaagaggtttttgtaccgcaccatgagtcgcaccaagataagaccgaagaagatatacactag

SEQ ID NO: 4498 - DNA, 1221 bp, Artificial Sequence
  Description of Artificial Sequence: Synthetic polynucleotide
atggcagctgatagagataattttttacaaaatattgaaaatgattctattaacaatggccaggccatggatttatctcccaacagaagttcctctgaaagcgatagcagcattctcatgaatgtgaatgatattaaaactttacgtttagacgtagcaccagaagctaaaagcacccaatccaagaagtctcttttttatgagaactctgatgatgctgaagaaggagaaatagaagagcgcacgaacaaagaagaaggacaataccatcataaaggatctaaacaacttagatttgaggttggcaaggaaagtacaggtaaattgcaatctcatttaagtgatggaagcgcaacaagtggagagggcaatgtaagaccttgggaattcaggaaggtaatacaagctgagtatagagaaaggttgccgcgcaattatgaattaaagcattggaaaaagccttctaaaataatgataggatccatacttcgtttattagagactaacactgtaagcgctcttgattctgtctttgagaagtacgaaaaggaaatgaaccaaatgacgcatggcgataataatgaggttaaaagaatatattctaagaaggaacgtttgcttgaaataatcctcacaaagataaagaagaagttgagacaggccaaatttccctctaggatatctgaaagagatttggacatcgagtatatttattctaagagacaatttattcaaaacagatattctcaagaattacaaaataatgagagattggaagcaattctttctcgtgaacaaaaccttttggaggaaactaggaagttgtgcatgaatttaaaaacaaacaacaagaaaaggctcactgagaagttaatacaaaaagatttgcatccagtacttaacaaagcaatggaatatacatatggcttagaatctactaatggatttatgcatcctgatggcccagtaacttttagaaatgatagccacgaattgaacttgatgttgaacgaccccataaaaagtacagccgatgtgaggcttgataaggaggaagtattatctttgttaccttctttgaaagaatatacgaagaaatccaaggaacttaaggaaacaatgggtcaaatgatttctgattctcatgaagaagaaatcaaagaggtttttgtaccgcaccatgagtctcaccaagataagaccgaagaagatatacactga

SEQ ID NO: 4499 - DNA, 1038 bp, Saccharomyces cerevisiae
atggaagcacataaccaatttttgaagactttccaaaaagaacgtcatgatatgaaagaagctgaaaaggatgaaatccttttgatggaaaacagccgtagattcgtgatgttccctatcaaataccacgaaatctgggctgcttacaagaaggttgaagcctctttctggactgcggaagaaatcgaattggctaaggacactgaagatttccaaaaattgactgatgaccagaagacctacatcggtaacttgttagccttgtccatttcttctgacaaccttgtcaacaagtacttgatcgaaaacttttctgcccaattgcaaaaccctgaaggtaagagtttctacgggttccagattatgatggaaaacatctactctgaagtttactccatgatggttgatgccttcttcaaggaccctaagaacatccctctattcaaggaaattgccaatttgcctgaagtcaagcataaggctgctttcatcgagagatggatttccaacgatgacagcttgtatgctgaaagactagtagcatttgctgcaaaggaaggtattttccaagctggtaactatgcttctatgttctggttgactgacaaaaagattatgccaggtttagcaatggccaacagaaacatctgtagagacagaggtgcctacactgacttttcatgcttgctatttgcccatttgagaaccaagccaaaccccaagatcattgaaaaaatcattaccgaagccgtggaaattgaaaaggaatactactcaaactctttgccagtagaaaaatttggtatggatttgaagagcattcacacctacatagaatttgtcgctgacggtctattacaaggtttcggtaacgaaaaatactacaacgccgtcaacccattcgaattcatggaggatgtcgctaccgctggtaagaccaccttctttgaaaagaaggtttccgactaccaaaaggccagtgacatgtctaagtccgctaccccatccaaggaaattaactttgatgatgacttctaa

SEQ ID NO: 4500 - DNA, 1038 bp, Artificial Sequence
  Description of Artificial Sequence: Synthetic polynucleotide
atggaagcacataaccaatttttgaagactttccaaaaagaacgtcatgatatgaaagaagctgaaaaggatgaaatccttttgatggaaaacagccgtagattcgtgatgttccctatcaaataccacgaaatctgggctgcttacaagaaggttgaagcctctttctggactgcggaagaaatcgaattggctaaggacactgaagatttccaaaaattgactgatgaccagaagacctacatcggtaacttgttagccttgtccatttcttctgacaaccttgtcaacaagtacttgatcgaaaacttttctgcccaattgcaaaaccctgaaggtaagagtttctacgggttccagattatgatggaaaacatctactctgaagtttactccatgatggttgatgccttcttcaaggaccctaagaacatccctcttttcaaggaaattgccaatttgcctgaagtcaagcataaggctgctttcatcgagagatggatttccaacgatgacagcttgtatgctgaaagattggtagcatttgctgcaaaggaaggtattttccaagctggtaactatgcttctatgttctggttgactgacaaaaagattatgccaggtttagcaatggccaacagaaacatctgtagagacagaggtgcctacactgacttttcttgcttgttatttgcccatttgagaaccaagccaaaccccaagatcattgaaaaaatcattaccgaagccgtggaaattgaaaaggaatactactctaactctttgccagtagaaaaatttggtatggatttgaagagcattcacacctacatagaatttgtcgctgacggtttattacaaggtttcggtaacgaaaaatactacaacgccgtcaacccattcgaattcatggaggatgtcgctaccgctggtaagaccaccttctttgaaaagaaggtttccgactaccaaaaggccagtgacatgtctaagtccgctaccccatccaaggaaattaactttgatgatgacttctga

SEQ ID NO: 4501 - DNA, 318 bp, Saccharomyces cerevisiae
atgggtctatcatctatctttggcggcggtgcaccatcacaacaaaaggaagcagccactactgcaaagacaaccccaaaccctatagccaaggagctgaaaaaccaaattgctcaagaactggctgtggctaatgcgactgaattagtgaacaaaatttctgagaactgctttgaaaaatgcttaacttcgccatacgctaccagaaacgatgcgtgcattgaccagtgtttggctaaatatatgagaagttggaatgtcatatcaaaggcttacatctccagaatccagaacgcctccgcttctggcgaaatctaa

SEQ ID NO: 4502 - DNA, 318 bp, Artificial Sequence
  Description of Artificial Sequence: Synthetic polynucleotide
atgggtttatcttctatctttggcggcggtgcaccatctcaacaaaaggaagcagccactactgcaaagacaaccccaaaccctatagccaaggagttgaaaaaccaaattgctcaagaattggctgtggctaatgcgactgaattagtgaacaaaatttctgagaactgctttgaaaaatgcttaacttctccatacgctaccagaaacgatgcgtgcattgaccagtgtttggctaaatatatgagaagttggaatgtcatatccaaggcttacatctccagaatccagaacgcctccgcttctggcgaaatctga

SEQ ID NO: 4503 - DNA, 201 bp, Saccharomyces cerevisiae
atgtctttttcatcactatataaaacctttttcaaacgaaacgctgtttttgttggtactatctttgcaggtgcctttgttttccaaactgtatttgatactgctattacttcatggtacgagaatcacaacaaaggaaaattatggaaagatgtcaaggctcgaatagctgcaggcgatggagacgacgatgatgagtaa

SEQ ID NO: 4504 - DNA, 201 bp, Artificial Sequence
  Description of Artificial Sequence: Synthetic polynucleotide
atgtctttttcttctttgtataaaacctttttcaaaagaaacgctgtttttgttggtactatctttgcaggtgcctttgttttccaaactgtatttgatactgctattacttcttggtacgagaatcacaacaaaggaaaattatggaaagatgtcaaggctagaatagctgcaggcgatggagacgacgatgatgagtga

SEQ ID NO: 4505 - DNA, 5853 bp, Saccharomyces cerevisiae
atgtccgttgctgatgatgatttaggatctttacaaggtcacattaggagaacactgaggtctattcataacctcccctattttaggtatacgagaggtcctactgaaagggctgacatgagcagagcccttaaagagttcatttacagatatctatactttgtcatttctaacagcggagagaacttacctactttattcaatgctcatccaaaacaaaaattatctaacccagagcttactgtttttcctgacagtttagaagatgctgtggatattgataagataacatctcaacaaactattccgttttataagatagatgaatccagaataggagacgtccataaacataccggaagaaattgtgggaggaaattcaaaataggggaacccttgtataggtgtcatgagtgtggttgcgatgatacttgtgtgctttgtattcattgttttaatccaaaagatcatgtgaatcatcatgtttgtaccgatatatgtactgaattcactagtggaatttgtgactgtggagatgaagaagcttggaattctccacttcattgcaaagctgaagaacaagaaaacgatatatcggaagatcccgccacaaatgccgacataaaggaagaagatgtatggaatgattcagtgaatatagcattagtggagttggttcttgcagaagtgtttgactattttatcgatgtttttaaccagaatatcgaacctctacccacaatacagaaagatatcactatcaaattaagagagatgacacaacagggaaaaatgtatgaaagagcgcagtttttaaacgatttaaaatatgaaaacgattatatgtttgacggaacaacaacagcaaagacgagcccctctaatagccctgaggcatctccatcgcttgcgaaaatcgatcccgaaaattacacggtaataatatataacgatgaatatcataactattcgcaggctacgactgccttgagacagggggttccagataacgtacacattgatctattaacatccaggattgacggagaaggtcgagcaatgttgaaatgttcacaagatttatcatctgtcttaggtggtttttttgctgttcaaacgaatggattaagtgccactttaacatcgtggtcagaatatcttcatcaagaaacatgcaagtatatcatcctttggattacacactgtttaaacataccaaactcctccttccaaaccacttttaggaacatgatgggtaaaaccctgtgttcagaatacttaaatgcaacagaatgtcgtgatatgacaccggtggtggagaaatatttcagcaacaagttcgataagaatgatccctacagatacatcgatttatctatccttgcagatggcaatcaaattcctttgggtcatcacaaaattctacccgaatcaagcacccattcactttcaccattgataaatgatgtagaaactccaacatcaagaacatattctaatacaagattacaacatattctttattttgataacagatattggaaaagactgagaaaagatattcagaatgtgatcattccaacgttggcctcttcaaatttatacaagcccattttctgtcaacaggtagtcgaaatattcaaccacatcacaagatctgtggcatatatggatagagaacctcagctaacagctataagagagtgtgtcgtacagttatttacatgccctacgaatgccaaaaatattttcgaaaaccaaagttttttggatattgtgtggtcaattatagacatttttaaggagttttgtaaggtggaaggtggtgtattgatctggcagagagttcaaaaaagcaatttaacaaagagttacagtatatcattcaagcaagggttgtatacagttgaaactttattgagtaaggtacatgatcctaatattccattgagacctaaggaaataatatctctattaactctttgcaagctcttcaatggagcgtggaagataaagcgtaaagaaggtgaacatgttcttcacgaagatcaaaatttcatctcctatttagaatataccacctccatttacagtattattcaaacagcggaaaaagttagcgaaaaatcaaaagattccattgattcaaagctttttttaaatgcaataagaattatcagttcatttctaggcaatagatcactaacatacaagttaatatatgattctcatgaagtcattaagtttagcgtaagccacgaaagagttgcatttatgaatcctttacaaacaatgctttcattccttatcgaaaaagtgtctttaaaggatgcatacgaagcgttagaagactgttcagattttctgaaaatatcggatttctctttgagatcagttgtattgtgctctcaaattgacgtcgggttttgggtaagaaatggtatgtctgtgttacatcaagcatcgtattataaaaacaatcccgaattaggttcctattccagagatatacatttgaatcagttagctatcctttgggaacgtgatgacattccgagaataatatacaatattcttgatagatgggaattactagactggtttacaggtgaagttgactatcaacacactgtctatgaggataaaatttcattcatcattcaacaattcattgcctttatttatcaaatattgaccgaaagacaatattttaaaactttctcttctctaaaggatagaagaatggatcaaatcaaaaattcaatcatttataacctttacatgaaacccctttcgtattcaaagctactaagatcagttcctgactacctaactgaagatactaccgagtttgacgaagcacttgaagaagtctctgttttcgttgagcctaagggcttggccgacaatggtgtttttaaattaaaagcaagcttgtatgcaaaggttgatccgttaaagttgctgaatttggaaaacgaattcgaaagtagtgcaactattattaaatcacatttggctaaggataaggatgaaatagcaaaagttgtactaataccccaagtctcaataaaacagttagataaagacgctctcaatctgggtgcttttacaaggaatacggtatttgccaaagtggtctataaactactccaggtatgtctggatatggaggatagcactttcctgaatgagctactacatttagttcatggtatattcagggatgatgaattgataaatggtaaggactctataccagaagcttatttgtcaaagcctatatgtaatttactcttgagcatagccaatgctaaatcagacgtattttccgagagtattgtccgtaaagccgactatttgttagagaagatgataatgaaaaaaccaaatgaactttttgagtcattaattgccagttttggcaaccaatacgttaatgattataaggataagaaactacgccaaggagttaacttacaagagacagagaaggaacgaaaaagaagattggccaagaaacatcaagcaaggcttctagccaagtttaacaatcaacaaacgaaattcatgaaagaacatgagtctgaatttgatgagcaggataacgatgttgacatggtcggtgaaaaagtatatgaatcggaggattttacctgcgcactatgtcaagattccagttcgaccgatttttttgtgatacctgcgtaccatgatcattccccgatatttagacctggtaatatttttaacccaaatgaatttatgcccatgtgggatggtttctacaacgatgatgaaaaacaagcttatattgacgatgatgttttagaggctttgaaggaaaacggtagttgtggatctaggaaagtatttgtatcctgtaatcatcacattcatcataactgcttcaagaggtacgttcaaaaaaagagattttcatcaaacgcgtttatatgtcctttatgccaaacattttcgaattgtactttacctctttgtcaaacctcaaaggcaaatactggtttgtcgctagatatgtttttggaatcagaactttctttggatacattgtcaaggctcttcaaaccttttactgaggaaaattatcgtacaataaactctatattttcgttgatgatatctcagtgtcaaggttttgataaagcggtaagaaagcgggccaacttttcgcataaggacgtttctttaatattaagtgtgcactgggcaaataccatttcaatgttagaaattgcttctaggttagaaaagccatacagtatttcatttttcagaagcagggaacagaaatacaaaactttaaaaaatatattagtctgcattatgctgttcacctttgtcataggcaagccaagtatggagtttgaaccgtacccgcagcagcccgatactgtttggaaccaaaatcaactcttccaatatattgttcgaagcgctttattttctccagtttcacttcgtcagactgttacagaggcgttaacaacgttctctagacagtttctaagagattttcttcagggtctttctgatgcagaacaggttaccaaattgtatgctaaagcgtccaaaattggggatgttcttaaagtaagtgagcagatgctcttcgccctaaggaccatatctgatgtacgaatggagggattggactccgaaagtattatttatgatctagcttataccttcctgttgaagagtcttcttcctacgataagaaggtgcttagtctttatcaaagtgctacacgaattagtgaaagattctgaaaatgaaacgctggtcatcaacggtcatgaggttgaagaagaactggaattcgaagataccgccgagtttgtcaataaggcattgaaaatgattactgaaaaagaatccttagtcgatcttttgacaacgcaggagtccattgtatcgcatccatatttggagaacatcccatatgaatattgtgggattataaaactgatagatttatcaaaatatttgaatacttacgttacccaatctaaggaaatcaagctacgtgaagagcgttctcagcatatgaagaatgcggataatcgattagatttcaaaatatgtttgacatgtggtgtcaaagtgcatttaagagcggaccgccatgaaatgaccaagcatttgaataaaaattgttttaaaccatttggcgccttcctgatgcccaattcaagtgaagtttgtctccatttgacacagcctccttctaatatttttatatctgcaccatatctaaattcgcatggtgaagttggtagaaatgccatgagaagaggtgatttaaccaccttgaatttgaaaagatatgagcacttaaacagattatggattaacaatgaaattccaggttatattagtagagtaatgggtgacgaatttcgagtgactatactttccaatggtttcttgtttgcatttaatagagaaccaaggccaagaagaatacctccaacagatgaagatgatgaagatatggaagagggagaagacgggttttttacggagggaaatgacgaaatggatgttgatgatgaaactggacaggccgccaacttatttggggttggcgcagaaggtattgctggtggcggagtacgtgattttttccaattcttcgaaaactttaggaacactctacaaccgcagggaaatggcgatgatgatgcacctcagaatcccccaccaatattgcagttcttaggacctcaatttgatggagctactatcataagaaatacaaatccaagaaacctcgatgaggatgactctgatgataatgatgactctgatgagcgagagatttggtag

SEQ ID NO: 4506 - DNA, 5853 bp, Artificial Sequence
  Description of Artificial Sequence: Synthetic polynucleotide
atgtccgttgctgatgatgatttaggatctttacaaggtcacattaggagaacattaaggtctattcataacctcccctattttaggtatacgagaggtcctactgaaagggctgacatgagcagagcccttaaagagttcatttacagatatttgtactttgtcatttctaacagcggagagaacttacctactttattcaatgctcatccaaaacaaaaattatctaacccagagcttactgtttttcctgacagtttagaagatgctgtggatattgataagataacatctcaacaaactattccgttttataagatagatgaatccagaataggagacgtccataaacataccggaagaaattgtgggaggaaattcaaaataggggaacccttgtataggtgtcatgagtgtggttgcgatgatacttgtgtgctttgtattcattgttttaatccaaaagatcatgtgaatcatcatgtttgtaccgatatatgtactgaattcactagtggaatttgtgactgtggagatgaagaagcttggaattctccacttcattgcaaagctgaagaacaagaaaacgatatatctgaagatcccgccacaaatgccgacataaaggaagaagatgtatggaatgattctgtgaatatagcattagtggagttggttcttgcagaagtgtttgactattttatcgatgtttttaaccagaatatcgaacctttgcccacaatacagaaagatatcactatcaaattaagagagatgacacaacagggaaaaatgtatgaaagagcgcagtttttaaacgatttaaaatatgaaaacgattatatgtttgacggaacaacaacagcaaagacgagcccctctaatagccctgaggcatctccaagtcttgcgaaaatcgatcccgaaaattacacggtaataatatataacgatgaatatcataactattctcaggctacgactgccttgagacagggggttccagataacgtacacattgatttattaacatccaggattgacggagaaggtagagcaatgttgaaatgttctcaagatttatcttctgtcttaggtggtttttttgctgttcaaacgaatggattaagtgccactttaacatcttggtctgaatatcttcatcaagaaacatgcaagtatatcatcctttggattacacactgtttaaacataccaaactcctccttccaaaccacttttaggaacatgatgggtaaaaccttatgttctgaatacttaaatgcaacagaatgtcgtgatatgacaccggtggtggagaaatatttcagcaacaagttcgataagaatgatccctacagatacatcgatttatctatccttgcagatggcaatcaaattcctttgggtcatcacaaaattttgcccgaaagtagcacccattctctttctccattgataaatgatgtagaaactccaacatctagaacatattctaatacaagattacaacatattctttattttgataacagatattggaaaagattgagaaaagatattcagaatgtgatcattccaacgttggcctcttccaatttatacaagcccattttctgtcaacaggtagtcgaaatattcaaccacatcacaagatctgtggcatatatggatagagaacctcagttgacagctataagagagtgtgtcgtacagttatttacatgccctacgaatgccaaaaatattttcgaaaaccaaagttttttggatattgtgtggtctattatagacatttttaaggagttttgtaaggtggaaggtggtgtattgatctggcagagagttcaaaaaagcaatttaacaaagagttacagtatatctttcaagcaagggttgtatacagttgaaactttattgagtaaggtacatgatcctaatattccattgagacctaaggaaataatatctttattaactctttgcaagctcttcaatggagcgtggaagataaagcgtaaagaaggtgaacatgttcttcacgaagatcaaaatttcatctcctatttagaatataccacctccatttacagtattattcaaacagcggaaaaagttagcgaaaaatctaaagattccattgattctaagctttttttaaatgcaataagaattatcagttcttttttgggcaatagatccttaacatacaagttaatatatgattctcatgaagtcattaagtttagcgtaagccacgaaagagttgcatttatgaatcctttacaaacaatgctttctttccttatcgaaaaagtgtctttaaaggatgcatacgaagcgttagaagactgttctgattttttgaaaatatctgatttctctttgagatctgttgtattgtgctctcaaattgacgtcgggttttgggtaagaaatggtatgtctgtgttacatcaagcaagttattataaaaacaatcccgaattaggttcctattccagagatatacatttgaatcagttagctatcctttgggaacgtgatgacattccgagaataatatacaatattcttgatagatgggaattattagactggtttacaggtgaagttgactatcaacacactgtctatgaggataaaatttctttcatcattcaacaattcattgcctttatttatcaaatattgaccgaaagacaatattttaaaactttctcttctttgaaggatagaagaatggatcaaatcaaaaattccatcatttataacctttacatgaaacccctttcctattccaagttattaagatctgttcctgactacttgactgaagatactaccgagtttgacgaagcacttgaagaagtctctgttttcgttgagcctaagggcttggccgacaatggtgtttttaaattaaaagcaagcttgtatgcaaaggttgatccgttaaagttgttgaatttggaaaacgaattcgaaagtagtgcaactattattaaatctcatttggctaaggataaggatgaaatagcaaaagttgtattaataccccaagtcagtataaaacagttagataaagacgctctcaatttgggtgcttttacaaggaatacggtatttgccaaagtggtctataaattactccaggtatgtttggatatggaggatagcactttcttgaatgagttattacatttagttcatggtatattcagggatgatgaattgataaatggtaaggactctataccagaagcttatttgtccaagcctatatgtaatttactcttgagcatagccaatgctaaaagtgacgtattttccgagagtattgtccgtaaagccgactatttgttagagaagatgataatgaaaaaaccaaatgaactttttgagtctttaattgccagttttggcaaccaatacgttaatgattataaggataagaaattgcgccaaggagttaacttacaagagacagagaaggaaagaaaaagaagattggccaagaaacatcaagcaaggcttttagccaagtttaacaatcaacaaacgaaattcatgaaagaacatgagtctgaatttgatgagcaggataacgatgttgacatggtcggtgaaaaagtatatgaaagtgaggattttacctgcgcattatgtcaagattccagttctaccgatttttttgtgatacctgcgtaccatgatcattccccgatatttagacctggtaatatttttaacccaaatgaatttatgcccatgtgggatggtttctacaacgatgatgaaaaacaagcttatattgacgatgatgttttagaggctttgaaggaaaacggtagttgtggatctaggaaagtatttgtatcctgtaatcatcacattcatcataactgcttcaagaggtacgttcaaaaaaagagattttcttccaacgcgtttatatgtcctttatgccaaacattttctaattgtactttacctctttgtcaaacctccaaggcaaatactggtttgtccttggatatgtttttggaaagtgaactttctttggatacattgagtaggctcttcaaaccttttactgaggaaaattatcgtacaataaactctatattttctttgatgatatctcagtgtcaaggttttgataaagcggtaagaaagagagccaacttttctcataaggacgtttctttaatattaagtgtgcactgggcaaataccatttccatgttagaaattgcttctaggttagaaaagccatacagtatttcctttttcagaagcagggaacagaaatacaaaactttaaaaaatatattagtctgcattatgcttttcacctttgtcataggcaagccaagtatggagtttgaaccgtacccgcagcagcccgatactgtttggaaccaaaatcaactcttccaatatattgttaggagcgctttattttctccagtttcccttcgtcagactgttacagaggcgttaacaacgttctctagacagtttttaagagattttcttcagggtctttctgatgcagaacaggttaccaaattgtatgctaaagcgtccaaaattggggatgttcttaaagtaagtgagcagatgctcttcgccttaaggaccatatctgatgtaagaatggagggattggactccgaaagtattatttatgatttggcttataccttcttgttgaagagtcttcttcctacgataagaaggtgcttagtctttatcaaagtgttacacgaattagtgaaagattctgaaaatgaaacgttagtcatcaacggtcatgaggttgaagaagaattggaattcgaagataccgccgagtttgtcaataaggcattgaaaatgattactgaaaaagaatccttagtcgatcttttgacaacgcaggagtccattgtatctcatccatatttggagaacatcccatatgaatattgtgggattataaaattgatagatttatccaaatatttgaatacttacgttacccaatctaaggaaatcaagttgcgtgaagagcgttctcagcatatgaagaatgcggataatagattagatttcaaaatatgtttgacatgtggtgtcaaagtgcatttaagagcggaccgccatgaaatgaccaagcatttgaataaaaattgttttaaaccatttggcgccttcttaatgcccaatagtagtgaagtttgtctccatttgacacagcctccttctaatatttttatatctgcaccatatttgaattctcatggtgaagttggtagaaatgccatgagaagaggtgatttaaccaccttgaatttgaaaagatatgagcacttaaacagattatggattaacaatgaaattccaggttatattagtagagtaatgggtgacgaatttagggtgactatactttccaatggtttcttgtttgcatttaatagagaaccaaggccaagaagaatacctccaacagatgaagatgatgaagatatggaagagggagaagacgggttttttacggagggaaatgacgaaatggatgttgatgatgaaactggacaggccgccaacttatttggggttggcgcagaaggtattgctggtggcggagtacgtgattttttccaattcttcgaaaactttaggaacactttacaaccgcagggaaatggcgatgatgatgcacctcagaatcccccaccaatattgcagttcttaggacctcaatttgatggagctactatcataagaaatacaaatccaagaaacctcgatgaggatgactctgatgataatgatgactctgatgagagagagatttggtga

SEQ ID NO: 4507 - DNA, 1185 bp, Saccharomyces cerevisiae
atgtcctctgctgccacggttgaccctaatgaggcgttcggtctcattaccaagaacttgcaagaagtcttgaacccacaaatcatcaaagatgttctcgaagtacaaaagagacatttgaaattatactggggtaccgcgcccactggaagacctcattgtggttattttgttcctatgaccaagcttgctgatttcttgaaagcaggttgtgaagtgactgttcttttagcagacttgcacgcctttttggacaacatgaaggcgccattggaagtggtgaactatagggccaaatactatgaattgaccatcaaagctatcttgagaagcatcaatgttccaattgaaaagctaaaatttgttgttggctcttcttaccagctaactccagactataccatggatatctttagattatccaacattgtttcacaaaacgatgctaaaagggcaggcgctgatgttgtcaagcaagtcgccaatccattattgagtgggcttatctatcctttaatgcaagcgttggacgaacaattcttagatgttgattgccaatttggtggtgtcgaccagagaaaaatttttgtcttagcggaagaaaatttaccaagtttgggctacaagaaaagagcacatttaatgaaccctatggttccaggtttggctcaaggtggtaaaatgtctgcctctgatccgaattcaaaaatcgaccttttggaagaaccaaagcaagttaagaaaaagatcaatagtgcattttgtagccccggtaacgtcgaagagaatggtttactgtcatttgtccaatatgtcattgcaccaatccaagaattgaagtttggtacaaatcacttcgaattcttcattgatagaccagaaaagttcggtggtccaattacctacaaatccttcgaagaaatgaaattggcttttaaagaagaaaaattgtccccacctgatctaaaaattggtgttgctgacgctatcaacgagctattggagccaatcagacaagaatttgccaacaacaaggaatttcaagaggcctccgaaaagggttatccagttgccacaccacaaaagtcgaaaaaggctaagaaaccaaagaataagggtactaagtacccaggcgctactaagaccaacgagattgccacgaaactagaggaaaccaaattgtaa

SEQ ID NO: 4508 - DNA, 1185 bp, Artificial Sequence
  Description of Artificial Sequence: Synthetic polynucleotide
atgtcctctgctgccacggttgaccctaatgaggcgttcggtctcattaccaagaacttgcaagaagtcttgaacccacaaatcatcaaagatgttctcgaagtacaaaagagacatttgaaattatactggggtaccgcgcccactggaagacctcattgtggttattttgttcctatgaccaagcttgctgatttcttgaaagcaggttgtgaagtgactgttcttttagcagacttgcacgcctttttggacaacatgaaggcgccattggaagtggtgaactatagggccaaatactatgaattgaccatcaaagctatcttgagaagcatcaatgttccaattgaaaagttgaaatttgttgttggctcttcttaccagttgactccagactataccatggatatctttagattatccaacattgtttctcaaaacgatgctaaaagggcaggcgctgatgttgtcaagcaagtcgccaatccattattgagtgggcttatctatcctttaatgcaagcgttggacgaacaattcttagatgttgattgccaatttggtggtgtcgaccagagaaaaatttttgtcttagcggaagaaaatttaccaagtttgggctacaagaaaagagcacatttaatgaaccctatggttccaggtttggctcaaggtggtaaaatgtctgcctctgatccgaattctaaaatcgaccttttggaagaaccaaagcaagttaagaaaaagatcaatagtgcattttgtagccccggtaacgtcgaagagaatggtttattatcttttgtccaatatgtcattgcaccaatccaagaattgaagtttggtacaaatcacttcgaattcttcattgatagaccagaaaagttcggtggtccaattacctacaaatccttcgaagaaatgaaattggcttttaaagaagaaaaattgtccccacctgatttgaaaattggtgttgctgacgctatcaacgagttattggagccaatcagacaagaatttgccaacaacaaggaatttcaagaggcctccgaaaagggttatccagttgccacaccacaaaagagtaaaaaggctaagaaaccaaagaataagggtactaagtacccaggcgctactaagaccaacgagattgccacgaaattagaggaaaccaaattgtga

SEQ ID NO: 4509 - DNA, 2208 bp, Saccharomyces cerevisiae
atgtccagacgcaatccaccaggcagtagaaacgggggaggtccgacgaatgcctctcccttcattaaaagagacagaatgagaagaaatttcctgaggatgagaatgggtcaaaacggcagcaattctagttccccaggcgtaccaaatggagacaacagcaggggatctcttgtcaaaaaggatgatcctgagtatgctgaagagagagagaaaatgcttttgcaaatcggtgtcgaggccgatgctggcaggagcaatgttaaagtaaaggacgaagatcctaatgaatataatgaatttcccttaagagctattccaaaggaggatttagaaaacatgaggacacatcttttgaagtttcagagtaaaaaaaagataaaccctgtaacagacttccatcttcccgtaagactgcataggaaggatacgagaaacttgcagtttcagctaacaagagcagaaattgttcaaaggcaaaaagaaatttctgagtataaaaaaaaagcagagcaagaaagaagtactcctaactcgggtggtatgaataaatcaggaacggtctcgctcaataatactgttaaagatgggtctcagacacctactgttgattcagttactaaagacaacacggccaacggtgtgaactcctccattcctactgtaactggctcttctgtccctcctgctagtcctactactgtatccgccgttgaaagtaatggactgtcaaatggttcaactagtgcagctaacggtttggatggcaatgcatctacagcgaatctagctaacggaaggccgttagtgacaaaactagaggatgcaggcccagctgaagaccctactaaagttggaatggtcaagtacgacggaaaagaagtgactaacgaaccggaatttgaagaaggaactatggatccactagcagatgtggcaccagatggaggcggtagggccaaacgaggaaatttgagaaggaaaactcgtcaattaaaagttcttgatgagaacgccaaaaagctgagatttgaggaattttatccatgggttatggaagattttgatgggtacaatacatgggtgggttcttatgaagcaggtaactcagattcttatgtcttgttaagtgtagaagatgatggaagttttaccatgattcctgctgataaggtttataagtttaccgcaagaaataaatatgctactttgaccattgacgaagcagaaaaaagaatggacaaaaaaagtggtgaagtgccacgttggttgatgaagcatttggataatataggtacaactacaactagatatgacagaacaagaagaaagcttaaagccgtcgctgatcaacaagctatggatgaagatgatcgtgatgacaattcagaagtagagttagattatgatgaagagtttgccgatgatgaggaggcacctattatagatggtaatgaacaagaaaataaagaatcagaacaaagaatcaagaaggagatgctgcaagctaatgcgatggggcttcgtgatgaagaagctccttccgaaaacgaagaagatgagttatttggggaaaagaagattgatgaggatggtgaaagaattaagaaggcattacaaaagacagaacttgcagcactatactcatcggatgaaaatgagatcaacccatacttatctgaatccgatattgaaaacaaagagaatgaatcgcccgttaaaaaggaagaagattcggacactctatccaaatccaagagatcttctccaaagaaacagcaaaagaaagctacaaatgcgcatgtgcataaagagccaactttgagggtgaaaagtattaaaaactgtgtcattatcttgaagggggataagaaaatactgaaaagcttcccagagggagaatggaatccacagacgacaaaagctgtagatagtagtaataatgcatcgaatacagtgccttcgccaatcaaacaagaggaaggcttgaattctacagtggcagaaagggaagaaactccagcgcctacaataacagaaaaagatatcatcgaggctattggtgatggcaaagtcaatatcaaagagtttggaaagttcatcagaagaaaatatcctggcgcagagaataaaaagctaatgtttgccattgtaaaaaaattgtgtcgaaaggttggcaatgaccacatggaattaaagaaagagtag

SEQ ID NO: 4510 - DNA, 2208 bp, Artificial Sequence
  Description of Artificial Sequence: Synthetic polynucleotide
atgtccagacgcaatccaccaggcagtagaaacgggggaggtccgacgaatgcctctcccttcattaaaagagacagaatgagaagaaatttcttgaggatgagaatgggtcaaaacggcagcaattctagttccccaggcgtaccaaatggagacaacagcaggggatctcttgtcaaaaaggatgatcctgagtatgctgaagagagagagaaaatgcttttgcaaatcggtgtcgaggccgatgctggcaggagcaatgttaaagtaaaggacgaagatcctaatgaatataatgaatttcccttaagagctattccaaaggaggatttagaaaacatgaggacacatcttttgaagtttcagagtaaaaaaaagataaaccctgtaacagacttccatcttcccgtaagattacataggaaggatacgagaaacttgcagtttcagttgacaagagcagaaattgttcaaaggcaaaaagaaatttctgagtataaaaaaaaagcagagcaagaaagaagtactcctaacagtggtggtatgaataaaagtggaacggtctctctcaataatactgttaaagatgggtctcagacacctactgttgattctgttactaaagacaacacggccaacggtgtgaactcctccattcctactgtaactggctcttctgtccctcctgctagtcctactactgtatccgccgttgaaagtaatggattatccaatggttctactagtgcagctaacggtttggatggcaatgcatctacagcgaatttggctaacggaaggccgttagtgacaaaattagaggatgcaggcccagctgaagaccctactaaagttggaatggtcaagtacgacggaaaagaagtgactaacgaaccggaatttgaagaaggaactatggatccattggcagatgtggcaccagatggaggcggtagggccaaaagaggaaatttgagaaggaaaactcgtcaattaaaagttcttgatgagaacgccaaaaagttgagatttgaggaattttatccatgggttatggaagattttgatgggtacaatacatgggtgggttcttatgaagcaggtaacagtgattcttatgtcttgttaagtgtagaagatgatggaagttttaccatgattcctgctgataaggtttataagtttaccgcaagaaataaatatgctactttgaccattgacgaagcagaaaaaagaatggacaaaaaaagtggtgaagtgccacgttggttgatgaagcatttggataatataggtacaactacaactagatatgacagaacaagaagaaagcttaaagccgtcgctgatcaacaagctatggatgaagatgatcgtgatgacaattctgaagtagagttagattatgatgaagagtttgccgatgatgaggaggcacctattatagatggtaatgaacaagaaaataaagaaagtgaacaaagaatcaagaaggagatgttacaagctaatgcgatggggcttcgtgatgaagaagctccttccgaaaacgaagaagatgagttatttggggaaaagaagattgatgaggatggtgaaagaattaagaaggcattacaaaagacagaacttgcagcattgtactcttctgatgaaaatgagatcaacccatacttatctgaatccgatattgaaaacaaagagaatgaaagtcccgttaaaaaggaagaagattctgacactttatccaaatccaagagatcttctccaaagaaacagcaaaagaaagctacaaatgcgcatgtgcataaagagccaactttgagggtgaaaagtattaaaaactgtgtcattatcttgaagggggataagaaaatattgaaaagcttcccagagggagaatggaatccacagacgacaaaagctgtagatagtagtaataatgcatctaatacagtgccttctccaatcaaacaagaggaaggcttgaattctacagtggcagaaagggaagaaactccagcgcctacaataacagaaaaagatatcatcgaggctattggtgatggcaaagtcaatatcaaagagtttggaaagttcatcagaagaaaatatcctggcgcagagaataaaaagttgatgtttgccattgtaaaaaaattgtgtagaaaggttggcaatgaccacatggaattaaagaaagagtga

SEQ ID NO: 4511 - DNA, 1185 bp, Saccharomyces cerevisiae
atgacttcacaattgaatgaattagtggaatttctgcattcaccacaacctgccgtaagacagattgccattgataatctagttggatttagtgctggtcccacttcaaaagttttcaaaaatgatagctacagacccattaaggatataataaaaatgatcatggatccagaacacggcacccgtgttattattcagcaaggtgtcactatattggtcaatttatctgaagacaagttagtaagaaatattatattgagcgatgacaagaagttcttaaaatttttggtttggaaaattgtcgatttaaccaatccaaatgccgatataatgtgtatcttattaagcaacttagccaaggatgacggcattcttgctgttctgaatatcaaaaggaattcaagcggtgaggaggtcgatgatggtttgaagttagcagctttaaataaagaagttttcaaaagtttgagagccatggattgtttaatggattgctttgttaagggttatgataaaaaattaacaaaatatgccagtttcaattatttagcctttttttttgcggatatctcgaggtttaaattgggcaggatgtattttattgaagagcaggaatacgatggggttgttcctatttcaaaattgctagtatttaccgaaaaatatgatgcaaaggtaagaagagaaggtgtcgcttccacaattaaaaattccctatttgattctgaaactcatgaaaggttactcaaagatgaaaaaataaacttgttgccttacatcctgctacctattgctagtgctaaagattctgaaattgatgaggaagatatgttcaatttaccagatgaacttcaattattaccagaggacaaggaaagagacccgattcctgcaattatatgctgtcatttagaaagtattcttttgctatgtacaacgcatgctggaagagaatacttaagagacaagtccgtttatccactagtgagggagctgcataaaaacgttgagaatgaagatattggtgaattatgttacagaattgttaatatgttaatgagaggcgagccaggtgcgggagcagtggaagagatgccatcaaagaatgcggaagaggaagaagaggaggagagtgaagaagaagaagatgacgacgaagaagatgaaattgtcgaagtggcctag

SEQ ID NO: 4512 - DNA, 1185 bp, Artificial Sequence
  Description of Artificial Sequence: Synthetic polynucleotide
atgacttctcaattgaatgaattagtggaatttttacattctccacaacctgccgtaagacagattgccattgataatttggttggatttagtgctggtcccacttctaaagttttcaaaaatgatagctacagacccattaaggatataataaaaatgatcatggatccagaacacggcacccgtgttattattcagcaaggtgtcactatattggtcaatttatctgaagacaagttagtaagaaatattatattgagcgatgacaagaagttcttaaaatttttggtttggaaaattgtcgatttaaccaatccaaatgccgatataatgtgtatcttattaagcaacttagccaaggatgacggcattcttgctgttttgaatatcaaaaggaatagtagcggtgaggaggtcgatgatggtttgaagttagcagctttaaataaagaagttttcaaaagtttgagagccatggattgtttaatggattgctttgttaagggttatgataaaaaattaacaaaatatgccagtttcaattatttagcctttttttttgcggatatctccaggtttaaattgggcaggatgtattttattgaagagcaggaatacgatggggttgttcctatttccaaattgttagtatttaccgaaaaatatgatgcaaaggtaagaagagaaggtgtcgcttccacaattaaaaattccttatttgattctgaaactcatgaaaggttactcaaagatgaaaaaataaacttgttgccttacatcttattgcctattgctagtgctaaagattctgaaattgatgaggaagatatgttcaatttaccagatgaacttcaattattaccagaggacaaggaaagagacccgattcctgcaattatatgctgtcatttagaaagtattcttttgttatgtacaacgcatgctggaagagaatacttaagagacaagtccgtttatccattggtgagggagttacataaaaacgttgagaatgaagatattggtgaattatgttacagaattgttaatatgttaatgagaggcgagccaggtgcgggagcagtggaagagatgccatctaagaatgcggaagaggaagaagaggaggagagtgaagaagaagaagatgacgacgaagaagatgaaattgtcgaagtggcctga

SEQ ID NO: 4513 - DNA, 3066 bp, Saccharomyces cerevisiae
atgaatttagatttaggttctactgtacgaggctatgaatcagataaagacacatttccgcaatcgaaaggcgttagctcatctcaaaaagagcagcatagtcaactgaatcagacaaaaatagcttatgaacagagacttctaaatgatttagaggatatggatgatcctttagatttgtttttagattatatgatatggattagcaccagctatattgaagtagattctgaatcaggtcaagaagttctccgaagtacaatggaaagatgcttgatttacatacaagatatggaaacctataggaacgatcccagatttttaaaaatttggatttggtatataaatttgtttcttagcaacaacttccacgagagtgaaaatacttttaaatatatgtttaacaagggaatcggaacaaagctttcgttattttatgaagagttctccaagctactagaaaatgctcaattttttctagaagcaaaggtgttattagaactaggggctgaaaacaattgcaggccttacaacagactattaaggtcattaagcaattatgaagacagactccgagaaatgaacatcgtagaaaaccagaacagtgtacctgattcaagggaaagattgaagggaaggttaatttatagaacagcaccatttttcattcgtaaatttttaacctcatcattgatgactgatgacaaggaaaatcgtgcgaacctgaactctaatgttggagttggtaagtctgctcctaacgtatatcaagattctatagtggttgctgactttaagtcagaaacagagaggcttaatttgaatagctctaaacagccctctaaccaacgcttgaagaatggaaataaaaaaacttcaatatatgcagatcaaaagcaatctaacaatccagtctacaaactaatcaatactccgggacggaaacctgaacggatagtttttaattttaatctaatatatccagaaaatgatgaggagttcaacaccgaagaaatattggcaatgattaagggactttacaaggtacagcgcagaggtaagaagcacaccgaagattatacaagtgacaaaaataggaagaaacgtaagctcgatgtgctggtagagagacggcaagacttaccttcatcacagccacccgttgtccccaaatctacgcgaattgaggtgtttaaagatgacgataatcccagccagagcacacaccataaaaatacacaggtacaagtgcaaacgacaacgtctattttacctttgaagcctgtggttgatggaaacctcgcgcatgagacaccagtgaagccctcactaacatccaacgcttcccgttcacctacagtaacagctttttcaaaagacgctataaatgaggtcttttccatgttcaatcaacattattcaaccccgggtgcgctattagatggtgatgataccactacaagtaaattcaacgtcttcgaaaattttacccaagaatttacagcaaagaatattgaagatttaactgaagttaaagatcctaaacaagagacggtgtcacaacaaactacctcaacaaatgaaaccaacgatcgatatgaaagattgtcgaatagtagcacacggccagaaaaggcagactacatgacgcctataaaagaaactactgaaacagatgtggtacctataatccagacacctaaggaacaaataaggacagaagataagaaatcgggggataatacagaaacacaaactcaattaacaagcacaaccattcaaagttctccatttctcacacaacctgaaccacaagcagaaaagcttttacaaactgcagaacattcggaaaagagtaaagagcattacccaacgatcatacctcccttcactaaaataaaaaatcaaccgcctgtcattattgaaaacccacttagtaataatttaagagcgaagtttttatccgaaatttcgcccccattattccaatataacaccttttataactacaaccaagaattgaaaatgagttctctattgaaaaaaatccatagggtatcccgcaacgaaaacaagaacccaattgttgacttcaagaagacgggtgatttatattgtatacgcggagaattaggcgaaggaggttatgccactgtatatctagcagaatctagtcaaggacatctgcgagcgttgaaagtagaaaaacctgcaagtgtatgggaatattacataatgagccaagtggagtttaggttgaggaagagcacaatattaaagtcaataatcaacgctagtgctttacacttgttccttgatgagagctaccttgttttaaactacgccagtcaaggtacggtcttggatttaattaatttacaacgggaaaaggcaattgacggcaacggaataatggatgaatatttgtgcatgtttatcactgtcgagctaatgaaagtacttgaaaagatacatgaagtgggaataatacatggcgatttgaaaccagataactgcatgatcagattagaaaaaccaggcgaacccctgggtgctcattatatgcgcaatggagaggatggctgggaaaacaagggaatctatttaatagatttcggtagatcatttgatatgacactgttaccacctggaacgaaattcaaatcaaattggaaggctgatcagcaagattgctgggaaatgcgtgcgggcaagccatggagttatgaagcggattattatggattagcaggcgtcatacattcgatgctttttggaaaattcatagaaacaatccagctgcagaatggacgatgcaaattgaagaacccattcaaaaggtattggaaaaaagaaatatggggcgttatatttgatttactgttaaatagcggtcaagcttccaatcaagctttgccgatgactgaaaagattgttgaaataaggaatttgatagaaagccatctggaacagcacgcagaaaatcacttaagaaacgtaattctaagcattgaagaggagttatcacattttcaatataaggggaaaccgtcaaggagattttag

SEQ ID NO: 4514 - DNA, 3066 bp, Artificial Sequence
  Description of Artificial Sequence: Synthetic polynucleotide
atgaatttagatttaggttctactgtaagaggctatgaaagtgataaagacacatttccgcaaagtaaaggcgttagctcttctcaaaaagagcagcatagtcaattgaatcagacaaaaatagcttatgaacagagacttttgaatgatttagaggatatggatgatcctttagatttgtttttagattatatgatatggattagcaccagctatattgaagtagattctgaaagtggtcaagaagttctcagaagtacaatggaaagatgcttgatttacatacaagatatggaaacctataggaacgatcccagatttttaaaaatttggatttggtatataaatttgtttcttagcaacaacttccacgagagtgaaaatacttttaaatatatgtttaacaagggaatcggaacaaagctttctttattttatgaagagttctccaagttattggaaaatgctcaattttttttggaagcaaaggtgttattagaattgggggctgaaaacaattgcaggccttacaacagattattaaggtctttaagcaattatgaagacagactcagagaaatgaacatcgtagaaaaccagaacagtgtacctgatagtagggaaagattgaagggaaggttaatttatagaacagcaccatttttcattcgtaaatttttaacctcttctttgatgactgatgacaaggaaaatcgtgcgaacttgaactctaatgttggagttggtaagtctgctcctaacgtatatcaagattctatagtggttgctgactttaagtctgaaacagagaggcttaatttgaatagctctaaacagccctctaaccaacgcttgaagaatggaaataaaaaaacttccatatatgcagatcaaaagcaatctaacaatccagtctacaaattaatcaatactccgggaagaaaacctgaaagaatagtttttaattttaatttgatatatccagaaaatgatgaggagttcaacaccgaagaaatattggcaatgattaagggactttacaaggtacagcgcagaggtaagaagcacaccgaagattatacaagtgacaaaaataggaagaaacgtaagctcgatgtgttagtagagagaagacaagacttaccttcttctcagccacccgttgtccccaaatctacgagaattgaggtgtttaaagatgacgataatcccagccagagcacacaccataaaaatacacaggtacaagtgcaaacgacaacgtctattttacctttgaagcctgtggttgatggaaacctcgcgcatgagacaccagtgaagccctctttaacatccaacgcttcccgtagtcctacagtaacagctttttccaaagacgctataaatgaggtcttttccatgttcaatcaacattattctaccccgggtgcgttattagatggtgatgataccactacaagtaaattcaacgtcttcgaaaattttacccaagaatttacagcaaagaatattgaagatttaactgaagttaaagatcctaaacaagagacggtgagtcaacaaactacctctacaaatgaaaccaacgatagatatgaaagattgagcaatagtagcacaagaccagaaaaggcagactacatgacgcctataaaagaaactactgaaacagatgtggtacctataatccagacacctaaggaacaaataaggacagaagataagaaaagtggggataatacagaaacacaaactcaattaacaagcacaaccattcaaagttctccatttctcacacaacctgaaccacaagcagaaaagcttttacaaactgcagaacattctgaaaagagtaaagagcattacccaacgatcatacctcccttcactaaaataaaaaatcaaccgcctgtcattattgaaaacccacttagtaataatttaagagcgaagtttttatccgaaatttctcccccattattccaatataacaccttttataactacaaccaagaattgaaaatgagttctttgttgaaaaaaatccatagggtatcccgcaacgaaaacaagaacccaattgttgacttcaagaagacgggtgatttatattgtatacgcggagaattaggcgaaggaggttatgccactgtatatttggcagaatctagtcaaggacatttgagggcgttgaaagtagaaaaacctgcaagtgtatgggaatattacataatgagccaagtggagtttaggttgaggaagagcacaatattaaagagtataatcaacgctagtgctttacacttgttccttgatgagagctaccttgttttaaactacgccagtcaaggtacggtcttggatttaattaatttacaaagagaaaaggcaattgacggcaacggaataatggatgaatatttgtgcatgtttatcactgtcgagttgatgaaagtacttgaaaagatacatgaagtgggaataatacatggcgatttgaaaccagataactgcatgatcagattagaaaaaccaggcgaacccttaggtgctcattatatgcgcaatggagaggatggctgggaaaacaagggaatctatttaatagatttcggtagatcttttgatatgacattattaccacctggaacgaaattcaaatctaattggaaggctgatcagcaagattgctgggaaatgcgtgcgggcaagccatggagttatgaagcggattattatggattagcaggcgtcatacattctatgctttttggaaaattcatagaaacaatccagttacagaatggaaggtgcaaattgaagaacccattcaaaaggtattggaaaaaagaaatatggggcgttatatttgatttattattaaatagcggtcaagcttccaatcaagctttgccgatgactgaaaagattgttgaaataaggaatttgatagaaagccatttggaacagcacgcagaaaatcacttaagaaacgtaattttgagcattgaagaggagttatctcattttcaatataaggggaaaccgtctaggagattttga

SEQ ID NO: 4515 - DNA, 1524 bp, Saccharomyces cerevisiae
atgaaagtgcttgacctactaacggtactcagtgcctcttcattattatctacattcgcggctgccgaaagtactgctactgcagacagtacaactgcagcttctagcactgcttcgtgtaacccgttaaaaactacaggttgtacgccggatacagctttggcaactagttttagcgaagatttctcatcttcatccaaatggtttaccgacttgaagcacgcaggtgaaatcaagtacggttcagacggtttgtcaatgacactggcgaaaagatacgataatccaagtttgaagtctaacttttatatcatgtatggtaaattggaagttatcttaaaagctgccaatggtaccggtattgtttcatcattctatttacaaagtgatgatttggatgaaattgatattgaatgggtgggtggtgacaacactcagttccaatctaacttcttttctaaaggtgataccacaacatacgacagaggcgaatttcacggtgtcgacactcctaccgacaaatttcataactacactttagattgggcgatggacaagacgacttggtacctcgatggagagtctgtcagagtattatcaaacacatcaagtgagggttacccacaatctcctatgtacctaatgatgggtatctgggccggtggtgacccagacaatgctgctggtaccattgaatgggctggtggtgaaaccaactacaatgacgctccattcactatgtacattgaaaaggtcattgtaactgattattctaccggtaaaaagtacacatatggtgaccaatctggttcttgggaatctattgaagctgacggtggttctatttacggcaggtatgaccaagcccaagaagatttcgcagttttagccaacggtggtagtatttccagcagctctacatcctcttctactgtatcttcctcggcgtcttccactgtatcttcctcggtttcttccactgtgtcctcctcggcttcttccactgtgtcttcctcggtttcttccactgtatcttcttcgtcttctgtatcttcctcttcatccacatctccatcttcttcgaccgctacttcatctaaaacacttgcttcctcatcagtcaccacatctagttccattagttcattcgaaaagcaatcctcctcttcatccaagaaaacagtggcttcctcttctacaagtgagtccattatttcctccactaagaccccagccactgtttcctctaccactaggtctacagttgccccaactactcaacaatcttccgtatcatcggacagtcctgtacaagataagggtggtgtcgcaacatcaagtaatgacgtgaccagttctactacccagatatcaagcaaatacacatctacaatccaaagttcttcctccgaagccagctcgacaaactctgttcaaatttctaacggtgctgatttagctcagagtttaccaagagagggaaaacttttttccgtactcgtagctttactagccttgctataa

SEQ ID NO: 4516 - DNA, 1524 bp, Artificial Sequence
  Description of Artificial Sequence: Synthetic polynucleotide
atgaaagtgcttgacttattgacggtactcagtgcctcttctttattatctacattcgcggctgccgaaagtactgctactgcagacagtacaactgcagcttctagcactgcttcttgtaacccgttaaaaactacaggttgtacgccggatacagctttggcaactagttttagcgaagatttcagttcttcttccaaatggtttaccgacttgaagcacgcaggtgaaatcaagtacggttctgacggtttgtccatgacattagcgaaaagatacgataatccaagtttgaagtctaacttttatatcatgtatggtaaattggaagttatcttaaaagctgccaatggtaccggtattgtttcttctttctatttacaaagtgatgatttggatgaaattgatattgaatgggtgggtggtgacaacactcagttccaatctaacttcttttctaaaggtgataccacaacatacgacagaggcgaatttcacggtgtcgacactcctaccgacaaatttcataactacactttagattgggcgatggacaagacgacttggtacctcgatggagagtctgtcagagtattatctaacacatctagtgagggttacccacaatctcctatgtacttgatgatgggtatctgggccggtggtgacccagacaatgctgctggtaccattgaatgggctggtggtgaaaccaactacaatgacgctccattcactatgtacattgaaaaggtcattgtaactgattattctaccggtaaaaagtacacatatggtgaccaatctggttcttgggaatctattgaagctgacggtggttctatttacggcaggtatgaccaagcccaagaagatttcgcagttttagccaacggtggtagtatttccagcagctctacatcctcttctactgtatcttcctctgcgtcttccactgtatcttcctctgtttcttccactgtgtcctcctctgcttcttccactgtgtcttcctctgtttcttccactgtatcttcttcttcttctgtatcttcctcttcttccacatctccatcttcttccaccgctacttcttctaaaacacttgcttcctcttctgtcaccacatctagttccattagttctttcgaaaagcaatcctcctcttcttccaagaaaacagtggcttcctcttctacaagtgagtccattatttcctccactaagaccccagccactgtttcctctaccactaggtctacagttgccccaactactcaacaatcttccgtatcttctgacagtcctgtacaagataagggtggtgtcgcaacatctagtaatgacgtgaccagttctactacccagatatctagcaaatacacatctacaatccaaagttcttcctccgaagccagctctacaaactctgttcaaatttctaacggtgctgatttagctcagagtttaccaagagagggaaaacttttttccgtactcgtagctttattagccttgttatga

SEQ ID NO: 4517 - DNA, 1812 bp, Saccharomyces cerevisiae
atgcctagaaacccattgaaaaaggaatattgggcagatgtagttgacggattcaagccggctacttctccagccttcgagaatgaaaaagaatctactacatttgttaccgaactaacttccaaaaccgattctgcatttccattaagtagcaaggattcacctggcataaaccaaaccacaaacgatattacctcttcagatcgcttccgtcgtaatgaagacacagagcaggaagacatcaacaacaccaacctgagtaaagatctatccgtgagacatcttttaactctagctgtcgggggtgcaataggtactggtttatatgtgaatacgggtgctgctttatctacaggtggtccggccagtttagttattgattgggttattatcagtacatgtctttttactgtgattaactctcttggtgagctgtccgctgcttttcccgttgttggtgggttcaatgtttacagtatgcgttttattgagccttcatttgcattcgcagtgaacttaaactatttagcacaatggctagttcttctacccttggaattagtggccgcatctattactataaaatactggaatgataaaattaattccgacgcctgggttgctatcttttatgccaccattgcactggctaatatgttggatgttaagtcatttggtgagaccgaatttgtattgtccatgattaaaatcctctccatcattggctttactatcttaggtattgttttgtcctgtggtggtgggcctcacggcggttacattggtggtaaatactggcatgacccaggcgcttttgtagggcacagctcgggaactcagtttaaaggtttatgttcagtttttgttaccgctgccttttcttattccggtattgaaatgactgctgtctccgctgctgaaagtaaaaatccaagagaaaccattcccaaggcagcaaagagaactttttggctgattaccgcctcttatgtgactatattgactttgattggttgcttggttccatccaatgaccctaggttactaaacggttcaagttcagtggacgctgcctcatctcctctggttatcgcaattgaaaacgggggtattaaaggtctaccatcattaatgaacgccattattttgattgctgttgtttccgtggctaacagtgctgtttatgcatgttcaaggtgtatggtcgccatggctcatattggtaatttaccaaaatttttgaaccgtgttgacaaaaggggtagaccaatgaatgctatcttgttaactttgttttttggtttgctttcctttgtggcagcaagtgataagcaagctgaagtctttacatggttgagtgccttatctggtttatcgacaattttctgctggatggccattaatctttcccatattagatttcgccaagccatgaaagttcaagaaaggtctttagacgaattacccttcatttctcaaactggcgtcaagggatcctggtatggttttatcgttttatttctggttcttatagcatcgttttggacttctctgttcccattaggcggttcaggagccagcgcagaatcattctttgaaggatacttatcctttccaattttgattgtctgttacgttggacataaactgtatactagaaattggactttgatggtgaaactagaagatatggatcttgataccggcagaaaacaagtagatttgactcttcgtagggaagaaatgaggattgagcgagaaacattagcaaaaagatccttcgtaacaagatttttacatttctggtgttga

SEQ ID NO: 4518 - DNA, 1812 bp, Artificial Sequence
  Description of Artificial Sequence: Synthetic polynucleotide
atgcctagaaacccattgaaaaaggaatattgggcagatgtagttgacggattcaagccggctacttctccagccttcgagaatgaaaaagaatctactacatttgttaccgaattgacttccaaaaccgattctgcatttccattaagtagcaaggattctcctggcataaaccaaaccacaaacgatattacctcttctgatcgcttccgtcgtaatgaagacacagagcaggaagacatcaacaacaccaacttgagtaaagatttatccgtgagacatcttttaactttggctgtcgggggtgcaataggtactggtttatatgtgaatacgggtgctgctttatctacaggtggtccggccagtttagttattgattgggttattatcagtacatgtctttttactgtgattaactctcttggtgagctttccgctgcttttcccgttgttggtgggttcaatgtttacagtatgcgttttattgagccttcttttgcattcgcagtgaacttaaactatttagcacaatggttagttcttttgcccttggaattagtggccgcatctattactataaaatactggaatgataaaattaattccgacgcctgggttgctatcttttatgccaccattgcattggctaatatgttggatgttaagagctttggtgagaccgaatttgtattgtccatgattaaaatcctctccatcattggctttactatcttaggtattgttttgtcctgtggtggtgggcctcacggcggttacattggtggtaaatactggcatgacccaggcgcttttgtagggcacagcagtggaactcagtttaaaggtttatgttctgtttttgttaccgctgccttttcttattccggtattgaaatgactgctgtctccgctgctgaaagtaaaaatccaagagaaaccattcccaaggcagcaaagagaactttttggttgattaccgcctcttatgtgactatattgactttgattggttgcttggttccatccaatgaccctaggttattaaacggtagtagttctgtggacgctgcctcttctcctttggttatcgcaattgaaaacgggggtattaaaggtttgccatctttaatgaacgccattattttgattgctgttgtttccgtggctaacagtgctgtttatgcatgttctaggtgtatggtcgccatggctcatattggtaatttaccaaaatttttgaaccgtgttgacaaaaggggtagaccaatgaatgctatcttgttaactttgttttttggtttgctttcctttgtggcagcaagtgataagcaagctgaagtctttacatggttgagtgccttatctggtttatctacaattttctgctggatggccattaatctttcccatattagatttcgccaagccatgaaagttcaagaaaggtctttagacgaattacccttcatttctcaaactggcgtcaagggatcctggtatggttttatcgttttatttttggttcttatagcaagtttttggacttctttattcccattaggcggttctggagccagcgcagaatctttctttgaaggatacttatcctttccaattttgattgtctgttacgttggacataaactttatactagaaattggactttgatggtgaaattagaagatatggatcttgataccggcagaaaacaagtagatttgactcttcgtagggaagaaatgaggattgagagagaaacattagcaaaaagatccttcgtaacaagatttttacatttctggtgttga

SEQ ID NO: 4519 - DNA, 999 bp, Saccharomyces cerevisiae
atggttagagttgctattaacggtttcggtagaatcggtagattggtcatgagaattgctttgtctagaccaaacgtcgaagttgttgctttgaacgacccattcatcaccaacgactacgctgcttacatgttcaagtacgactccactcacggtagatacgctggtgaagtttcccacgatgacaagcacatcattgtcgatggtaagaagattgctacttaccaagaaagagacccagctaacttgccatggggttcttccaacgttgacatcgccattgactccactggtgttttcaaggaattagacactgctcaaaagcacattgacgctggtgccaagaaggttgttatcactgctccatcttccaccgccccaatgttcgtcatgggtgttaacgaagaaaaatacacttctgacttgaagattgtttccaacgcttcttgtaccaccaactgtttggctccattggccaaggttatcaacgatgctttcggtattgaagaaggtttgatgaccactgtccactctttgactgctactcaaaagactgttgacggtccatcccacaaggactggagaggtggtagaaccgcttccggtaacatcatcccatcctccaccggtgctgctaaggctgtcggtaaggtcttgccagaattgcaaggtaagttgaccggtatggctttcagagtcccaaccgtcgatgtctccgttgttgacttgactgtcaagttgaacaaggaaaccacctacgatgaaatcaagaaggttgttaaggctgccgctgaaggtaagttgaagggtgttttgggttacaccgaagacgctgttgtctcctctgacttcttgggtgactctcactcttccatcttcgatgcttccgctggtatccaattgtctccaaagttcgtcaagttggtctcctggtacgacaacgaatacggttactctaccagagttgtcgacttggttgaacacgttgccaaggcttaa

SEQ ID NO: 4520 - DNA, 999 bp, Artificial Sequence
  Description of Artificial Sequence: Synthetic polynucleotide
atggttagagttgctattaacggtttcggtagaatcggtagattggtcatgagaattgctttgtctagaccaaacgtcgaagttgttgctttgaacgacccattcatcaccaacgactacgctgcttacatgttcaagtacgactccactcacggtagatacgctggtgaagtttcccacgatgacaagcacatcattgtcgatggtaagaagattgctacttaccaagaaagagacccagctaacttgccatggggttcttccaacgttgacatcgccattgactccactggtgttttcaaggaattagacactgctcaaaagcacattgacgctggtgccaagaaggttgttatcactgctccatcttccaccgccccaatgttcgtcatgggtgttaacgaagaaaaatacacttctgacttgaagattgtttccaacgcttcttgtaccaccaactgtttggctccattggccaaggttatcaacgatgctttcggtattgaagaaggtttgatgaccactgtccactctttgactgctactcaaaagactgttgacggtccatcccacaaggactggagaggtggtagaaccgcttccggtaacatcatcccatcctccaccggtgctgctaaggctgtcggtaaggtcttgccagaattgcaaggtaagttgaccggtatggctttcagagtcccaaccgtcgatgtctccgttgttgacttgactgtcaagttgaacaaggaaaccacctacgatgaaatcaagaaggttgttaaggctgccgctgaaggtaagttgaagggtgttttgggttacaccgaagacgctgttgtctcctctgacttcttgggtgactctcactcttccatcttcgatgcttccgctggtatccaattgtctccaaagttcgtcaagttggtctcctggtacgacaacgaatacggttactctaccagagttgtcgacttggttgaacacgttgccaaggcttga

SEQ ID NO: 4521 - DNA, 1233 bp, Saccharomyces cerevisiae
atgctaagtgcaatttccaaagtctccactttaaaatcatgtacaagatatttaaccaaatgcaactatcatgcatcagctaaattacttgctgtaaagacattttcaatgcctgcaatgtctcctactatggagaaaggggggattgtgtcttggaaatataaagttggcgaaccattcagcgcgggcgatgtgatattagaagtggaaacagataaatctcaaattgatgtggaagcactggacgatggtaaactagctaagatcctgaaagatgaaggctctaaagatgttgatgttggtgaacctattgcttatattgctgatgttgatgatgatttagctactataaagttaccccaagaggccaacaccgcaaatgcgaaatctattgaaattaagaagccatccgcagatagtactgaagcaacacaacaacatttaaaaaaagccacagttacaccaataaaaaccgttgacggcagccaagccaatcttgaacagacgctattaccatccgtgtcattactactggctgagaacaatatatccaaacaaaaggctttgaaggaaattgcgccatctggttccaacggtagactattaaagggtgatgtgctagcatacctagggaaaataccacaagattcggttaacaaggtaacagaatttatcaagaagaacgaacgtctcgatttatcgaacattaaacctatacagctcaaaccaaaaatagccgagcaagctcaaacaaaagctgccgacaagccaaagattactcctgtagaatttgaagagcaattagtgttccatgctcccgcctctattccgtttgacaaactgagtgaatcattgaactctttcatgaaagaagcttaccagttctcacacggaacaccactaatggacacaaattcgaaatactttgaccctattttcgaggaccttgtcaccttgagcccaagagagccaagatttaaattttcctatgacttgatgcaaattcccaaagctaataacatgcaagacacgtacggtcaagaagacatatttgacctcttaacaggttcagacgcgactgcctcatcagtaagacccgttgaaaagaacttacctgaaaaaaacgaatatatactagcgttgaatgttagcgtcaacaacaagaagtttaatgacgcggaggccaaggcaaaaagattccttgattacgtaagggagttagaatcattttga

SEQ ID NO: 4522 - DNA, 1233 bp, Artificial Sequence
  Description of Artificial Sequence: Synthetic polynucleotide
atgttaagtgcaatttccaaagtctccactttaaaaagttgtacaagatatttaaccaaatgcaactatcatgcatctgctaaattacttgctgtaaagacattttccatgcctgcaatgtctcctactatggagaaaggggggattgtgtcttggaaatataaagttggcgaaccattcagcgcgggcgatgtgatattagaagtggaaacagataaatctcaaattgatgtggaagcattggacgatggtaaattggctaagatcttgaaagatgaaggctctaaagatgttgatgttggtgaacctattgcttatattgctgatgttgatgatgatttagctactataaagttaccccaagaggccaacaccgcaaatgcgaaatctattgaaattaagaagccatccgcagatagtactgaagcaacacaacaacatttaaaaaaagccacagttacaccaataaaaaccgttgacggcagccaagccaatcttgaacagacgttattaccatccgtgtctttattattagctgagaacaatatatccaaacaaaaggctttgaaggaaattgcgccatctggttccaacggtagattattaaagggtgatgtgttggcatacttggggaaaataccacaagattctgttaacaaggtaacagaatttatcaagaagaacgaacgtctcgatttatctaacattaaacctatacagctcaaaccaaaaatagccgagcaagctcaaacaaaagctgccgacaagccaaagattactcctgtagaatttgaagagcaattagtgttccatgctcccgcctctattccgtttgacaaattaagtgaatctttgaactctttcatgaaagaagcttaccagttctctcacggaacaccattaatggacacaaattctaaatactttgaccctattttcgaggaccttgtcaccttgagcccaagagagccaagatttaaattttcctatgacttgatgcaaattcccaaagctaataacatgcaagacacgtacggtcaagaagacatatttgacctcttaacaggttctgacgcgactgcctcttctgtaagacccgttgaaaagaacttacctgaaaaaaacgaatatatattggcgttgaatgttagcgtcaacaacaagaagtttaatgacgcggaggccaaggcaaaaagattccttgattacgtaagggagttagaaagtttttga

SEQ ID NO: 4523 - DNA, 1803 bp, Saccharomyces cerevisiae
atgttgtgttcagtaattcagagacagacaagagaggtttccaacacaatgtctttagactcatactatcttgggtttgatctttcgacccaacaactgaaatgtctcgccattaaccaggacctaaaaattgtccattcagaaacagtggaatttgaaaaggatcttccgcattatcacacaaagaagggtgtctatatacacggcgacactatcgaatgtcccgtagccatgtggttagaggctctagatctggttctctcgaaatatcgcgaggctaaatttccattgaacaaagttatggccgtctcagggtcctgccagcagcacgggtctgtctactggtcctcccaagccgaatctctgttagagcaattgaataagaaaccggaaaaagatttattgcactacgtgagctctgtagcatttgcaaggcaaaccgcccccaattggcaagaccacagtactgcaaagcaatgtcaagagtttgaagagtgcataggtgggcctgaaaaaatggctcaattaacagggtccagagcccattttagatttactggtcctcaaattctgaaaattgcacaattagaaccagaagcttacgaaaaaacaaagaccatttctttagtgtctaattttttgacttctatcttagtgggccatcttgttgaattagaggaggcagatgcctgtggtatgaacctttatgatatacgtgaaagaaaattcagtgatgagctactacatctaattgatagttcttctaaggataaaactatcagacaaaaattaatgagagcacccatgaaaaatttgatagcgggtaccatctgtaaatattttattgagaagtacggtttcaatacaaactgcaaggtctctcccatgactggggataatttagccactatatgttctttacccctgcggaagaatgacgttctcgtttccctaggaacaagtactacagttcttctggtcaccgataagtatcacccctctccgaactatcatcttttcattcatccaactctgccaaaccattatatgggtatgatttgttattgtaatggttctttggcaagggagaggataagagacgagttaaacaaagaacgggaaaataattatgagaagactaacgattggactctttttaatcaagctgtgctagatgactcagaaagtagtgaaaatgaattaggtgtatattttcctctgggggagatcgttcctagcgtaaaagccataaacaaaagggttatcttcaatccaaaaacgggtatgattgaaagagaggtggccaagttcaaagacaagaggcacgatgccaaaaatattgtagaatcacaggctttaagttgcagggtaagaatatctcccctgctttcggattcaaacgcaagctcacaacagagactgaacgaagatacaatcgtgaagtttgattacgatgaatctccgctgcgggactacctaaataaaaggccagaaaggactttttttgtaggtggggcttctaaaaacgatgctattgtgaagaagtttgctcaagtcattggtgctacaaagggtaattttaggctagaaacaccaaactcatgtgcccttggtggttgttataaggccatgtggtcattgttatatgactctaataaaattgcagttccttttgataaatttctgaatgacaattttccatggcatgtaatggaaagcatatccgatgtggataatgaaaattgggatcgctataattccaagattgtccccttaagcgaactggaaaagactctcatctaa

SEQ ID NO: 4524 - DNA, 1803 bp, Artificial Sequence
  Description of Artificial Sequence: Synthetic polynucleotide
atgttgtgttctgtaattcagagacagacaagagaggtttccaacacaatgtctttagactcttactatcttgggtttgatctttctacccaacaattgaaatgtctcgccattaaccaggacttgaaaattgtccattctgaaacagtggaatttgaaaaggatcttccgcattatcacacaaagaagggtgtctatatacacggcgacactatcgaatgtcccgtagccatgtggttagaggctttagatttggttctctctaaatatcgcgaggctaaatttccattgaacaaagttatggccgtcagtgggtcctgccagcagcacgggtctgtctactggtcctcccaagccgaatctttattagagcaattgaataagaaaccggaaaaagatttattgcactacgtgagctctgtagcatttgcaaggcaaaccgcccccaattggcaagaccacagtactgcaaagcaatgtcaagagtttgaagagtgcataggtgggcctgaaaaaatggctcaattaacagggtccagagcccattttagatttactggtcctcaaattttgaaaattgcacaattagaaccagaagcttacgaaaaaacaaagaccatttctttagtgtctaattttttgacttctatcttagtgggccatcttgttgaattagaggaggcagatgcctgtggtatgaacctttatgatatacgtgaaagaaaattcagtgatgagttattacatttgattgatagttcttctaaggataaaactatcagacaaaaattaatgagagcacccatgaaaaatttgatagcgggtaccatctgtaaatattttattgagaagtacggtttcaatacaaactgcaaggtctctcccatgactggggataatttagccactatatgttctttacccttgagaaagaatgacgttctcgtttccttgggaacaagtactacagttcttttggtcaccgataagtatcacccctctccgaactatcatcttttcattcatccaactttaccaaaccattatatgggtatgatttgttattgtaatggttctttggcaagggagaggataagagacgagttaaacaaagaaagagaaaataattatgagaagactaacgattggactctttttaatcaagctgtgttggatgactctgaaagtagtgaaaatgaattaggtgtatattttcctttaggggagatcgttcctagcgtaaaagccataaacaaaagggttatcttcaatccaaaaacgggtatgattgaaagagaggtggccaagttcaaagacaagaggcacgatgccaaaaatattgtagaatctcaggctttaagttgcagggtaagaatatctcccttgctttctgattccaacgcaagctctcaacagagattgaacgaagatacaatcgtgaagtttgattacgatgaatctccgttgagagactacttgaataaaaggccagaaaggactttttttgtaggtggggcttctaaaaacgatgctattgtgaagaagtttgctcaagtcattggtgctacaaagggtaattttaggttagaaacaccaaactcttgtgcccttggtggttgttataaggccatgtggtctttgttatatgactctaataaaattgcagttccttttgataaatttttgaatgacaattttccatggcatgtaatggaaagcatatccgatgtggataatgaaaattgggatcgctataattccaagattgtccccttaagcgaattggaaaagactctcatctga

SEQ ID NO: 4525 - DNA, 741 bp, Saccharomyces cerevisiae
atgtcaagactagaaatatactcgccagaagggctacgtctcgatggacgtcgatggaatgaactccgccgttttgaaagttccatcaacacacatccgcacgctgcagacggttcatcctacatggaacaaggtaacaacaaaattatcactcttgttaaaggtccaaaagagccaagattgaaatctcaaatggatacctcaaaggctttattgaacgtatcggtaaacattacaaaattctccaaattcgaaagaagtaaatcaagccacaagaatgaaaggcgtgttcttgagatacaaacctccctggtgaggatgtttgagaagaatgtcatgctgaatatctaccccagaacagttatcgatatcgagatccatgtccttgagcaagatggcggtattatgggatctttaatcaacggtattaccctcgctttaatagatgccggtatatcaatgttcgattacataagtggtatatccgtcgggctgtacgatactaccccattattagataccaattcattagaagaaaatgctatgagtacagtgacactaggtgtggtagggaagtcagaaaaactttctcttttattggtggaagacaaaattccgttagataggttagagaacgttcttgccatcggcatcgcaggtgctcatagggtaagagatttgatggatgaagaactgaggaaacatgctcagaaaagagtcagtaacgcctctgctaggtag

SEQ ID NO: 4526 - DNA, 741 bp, Artificial Sequence
  Description of Artificial Sequence: Synthetic polynucleotide
atgagtagattagaaatatactctccagaagggttacgtctcgatggacgtcgttggaatgaactccgccgttttgaaagttccatcaacacacatccgcacgctgcagacggttcttcctacatggaacaaggtaacaacaaaattatcactcttgttaaaggtccaaaagagccaagattgaaatctcaaatggatacctccaaggctttattgaacgtatctgtaaacattacaaaattctccaaattcgaaagaagtaaaagtagccacaagaatgaaaggcgtgttcttgagatacaaacctccttagtgaggatgtttgagaagaatgtcatgttgaatatctaccccagaacagttatcgatatcgagatccatgtccttgagcaagatggcggtattatgggatctttaatcaacggtattaccctcgctttaatagatgccggtatatccatgttcgattacataagtggtatatccgtcgggttatacgatactaccccattattagataccaattctttagaagaaaatgctatgagtacagtgacattaggtgtggtagggaagtctgaaaaactttctcttttattggtggaagacaaaattccgttagataggttagagaacgttcttgccatcggcatcgcaggtgctcatagggtaagagatttgatggatgaagaattgaggaaacatgctcagaaaagagtcagtaacgcctctgctaggtga

SEQ ID NO: 4527 - DNA, 2454 bp, Saccharomyces cerevisiae
atgagcactgaacaggtcggtagaaagaaatcgtatagatgggttagcgcatctcaagcaagttatgacggcgctggatgggacagtagtgacgaatatgactactcttccgaggatggcacaaaaggttcagaaattcacaagcaaaaaatatctaatttgcctagtttacccaagctcaattatacagatgttaatggtgagcatgatgaaaatacgggtgaaaataaagacagcaatgataataacgtcagtaagagtgatattagtcctagtgacaaggaagtaggctatctctcagatggggtgcctaaacttatggcttcaagagagtctgtggaattacaagcgaaaaaatccagcgagcactccaaatcagattatctttcgtcgacagcatctttgaaaagtccaagtgaaaacaaaaaatcaccacatacaaatagggctgtaaacgaagacctagacaatttgatagagcaaatatcaagggagatgacaccagaaattaggcaaacatctgattttcggcgtgattcagacagttgtgacgaaatccaaaacgaagcaccattaggggaagcggtaccctcttcatcatctcctgtagaagaagatgaaaaatcacattccttaggggtttcaatggatactaatgaagctgataccactttcaatacgccaacaaggaatggaaatgaacatttgagtagtgatggcgatgtttctgagcagaaagacgacgagtttaaagtttccgaaagaggctaccttgcagatattctgcctgcggagaaagaggagaatttacaacaagaagatgatggtgaagtcgagagctcaggagctttggaaaagaaagaaaaaagtgaagaaaagactagtattaggaataggaactctacatctagtgggcaagataaagtagcaaagccgaaacccgtagcaaatgaaacaaaaactagtgataatggatatcgaaattcttttttcaatgattatcagcattcgtcagactctgaagaagatgataacaacgaaggcaacagtggtagtagtgatgatgataatcgatcttcggttagtgataaacatgctgatattaaccggcaatcgaaacaacttgatacaactgacgatgatgcattgtcgtataccgaatcaataaaatattcgacaaatgagacagaagaagaagataatgaagataatgaatccatagaagacaaaaacgaagataatgaatccatagaagacgaaaatgaagatacagatagctataaattttctaatagggaaaaaggttccattctacttacgagtgatgaagaggaggaggaaaaaggtatgagctctgattcagatgaaggcagtctcaaggcgcccaaatcaggttatttctccaaaatgattggtaatgatgataaaggtgattcagcattgcaacctaatcaaatagacaccattgaaaataccaatttgtcaaatagcggttctgaattggaaaacagcgatggcagcgatgaggaagaccacataaatgaagacaaagttttggaagaaagttcagttaaagactccactgatgttgattcttggaagccggacagtgaggccttacgatcagggttcgtacaggatacagccaataagaaagcgccaccaggttacgtgatcgattctaacgggaagctagtagatttaacacctgctagtatgaaaccacgtgttgtatcgacttattcagagatggagagtacttgggatgcattcccttccaaaggcgaagatgacgatttggagacaatcagggacactaagactatatacgacaacaatacgatttataatgttcccggtttgattggtaaccaatcgaatttgccacctctaccgatggacgcacaggaacaattaaatgcaggaaacgataatagtacaacagataatgataatagtaacaatactgccaatgatttggcagcgcgcagtgcatctttcaaaagtgaaaacagaacagtatctcaaggcgaaatgacaagcgtccatgaacccagtactgaagaaatggcgaaattggggcagcagaataacttaccgaaattagatatgaataaactactgaacagtaagacttcgcacgccggtaagatagaacagttgagaaattataagcgtgagctagatgaatatgatacggggatacaaacatggataaattatacgctaaaatcatcctctaataaggataaggatttcatagctgaggagtataagcagcatagtcacgttagggaagcatatgcgaacgcggacgatttgagtaagaagcatactgtcattaacacggttgctagtgtcaaccaaaatgtaacgcacttaaggagaaaagttttccagcattctatgaaaccaaaggatttattcgcatcaataggtaagaaaaaactgtaa

SEQ ID NO: 4528 - DNA, 2454 bp, Artificial Sequence
  Description of Artificial Sequence: Synthetic polynucleotide
atgagcactgaacaggtcggtagaaagaaaagttatagatgggttagcgcatctcaagcaagttatgacggcgctggatgggacagtagtgacgaatatgactactcttccgaggatggcacaaaaggttctgaaattcacaagcaaaaaatatctaatttgcctagtttacccaagctcaattatacagatgttaatggtgagcatgatgaaaatacgggtgaaaataaagacagcaatgataataacgtcagtaagagtgatattagtcctagtgacaaggaagtaggctatctctctgatggggtgcctaaacttatggcttccagagagtctgtggaattacaagcgaaaaaatccagcgagcactccaaatctgattatctttcttctacagcatctttgaaaagtccaagtgaaaacaaaaaatctccacatacaaatagggctgtaaacgaagacttggacaatttgatagagcaaatatctagggagatgacaccagaaattaggcaaacatctgattttagacgtgattctgacagttgtgacgaaatccaaaacgaagcaccattaggggaagcggtaccctcttcttcttctcctgtagaagaagatgaaaaatctcattccttaggggtttctatggatactaatgaagctgataccactttcaatacgccaacaaggaatggaaatgaacatttgagtagtgatggcgatgtttctgagcagaaagacgacgagtttaaagtttccgaaagaggctaccttgcagatattttacctgcggagaaagaggagaatttacaacaagaagatgatggtgaagtcgagagcagtggagctttggaaaagaaagaaaaaagtgaagaaaagactagtattaggaataggaactctacatctagtgggcaagataaagtagcaaagccgaaacccgtagcaaatgaaacaaaaactagtgataatggatatagaaattcttttttcaatgattatcagcattcttctgactctgaagaagatgataacaacgaaggcaacagtggtagtagtgatgatgataatagatcttctgttagtgataaacatgctgatattaacagacaaagtaaacaacttgatacaactgacgatgatgcattgagttataccgaaagtataaaatattctacaaatgagacagaagaagaagataatgaagataatgaatccatagaagacaaaaacgaagataatgaatccatagaagacgaaaatgaagatacagatagctataaattttctaatagggaaaaaggttccattttacttacgagtgatgaagaggaggaggaaaaaggtatgagctctgattctgatgaaggcagtctcaaggcgcccaaatctggttatttctccaaaatgattggtaatgatgataaaggtgattctgcattgcaacctaatcaaatagacaccattgaaaataccaatttgagcaatagcggttctgaattggaaaacagcgatggcagcgatgaggaagaccacataaatgaagacaaagttttggaagaaagttctgttaaagactccactgatgttgattcttggaagccggacagtgaggccttaagaagcgggttcgtacaggatacagccaataagaaagcgccaccaggttacgtgatcgattctaacgggaagttggtagatttaacacctgctagtatgaaaccacgtgttgtatccacttattctgagatggagagtacttgggatgcattcccttccaaaggcgaagatgacgatttggagacaatcagggacactaagactatatacgacaacaatacgatttataatgttcccggtttgattggtaaccaaagcaatttgccacctttgccgatggacgcacaggaacaattaaatgcaggaaacgataatagtacaacagataatgataatagtaacaatactgccaatgatttggcagcgcgcagtgcatctttcaaaagtgaaaacagaacagtatctcaaggcgaaatgacaagcgtccatgaacccagtactgaagaaatggcgaaattggggcagcagaataacttaccgaaattagatatgaataaattattaaacagtaagacttctcacgccggtaagatagaacagttgagaaattataagcgtgagttagatgaatatgatacggggatacaaacatggataaattatacgttgaaatcttcctctaataaggataaggatttcatagctgaggagtataagcagcatagtcacgttagggaagcatatgcgaacgcggacgatttgagtaagaagcatactgtcattaacacggttgctagtgtcaaccaaaatgtaacgcacttaaggagaaaagttttccagcattctatgaaaccaaaggatttattcgcatctataggtaagaaaaaattgtga

SEQ ID NO: 4529 - DNA, 1644 bp, Saccharomyces cerevisiae
atgactaaatcggttggtgatgaagagtcacagtacattgaggaccctagttttgcagcagcagctgcatttactggcggcagggacggggtttcgtacagtaatcagcgatttgctgagggttccggccattcttctgacttagcaaagtcattagaagactatcggcctcctgatgaaaagccgtcctcattgtcatctgtgggggaaggtggcgctaatgaggaagagaagggcggtaacgacggcggtcccttggcaagaattcaaacagggcttttttctccaagactgcgaaatcataggaaaaagattctctcgaagtttgttttgaacaacttcttcattgcttgtgtgtgtgtatcgctcatatcgatttactggggtgcctgttacggaacagatcgttactttttcaaagtgaaaaatattgttgtattgcaggatgcgccatctaatacttcagttcaatctatttccgcgatcataccctcattgttagcgtctgtccccgggacatggcatatatacaacgcaacatcatttcataggaaatttggtacgacgaactccaccgaaattgacagaaagatagtcgatttaatttacgatgagagatactggctggcgttaaacgttaaacctaatgctacagacactttgtataattctttgattagccaagacgcaaactcggagttcaattcatcaattttttttgaatccgtgtttgaaagtggtcgtgacccatcgagtgttaaatcgaccattctaccactcatgcaacaattggaggtccgccttcagaaatattacgtcaaggaatatcttccctcattgatgagcaacatcacttctaatgacagagatcttaatataaacatggagaactgggcgattgcaggacagttgttgttcacctacaacgattatcgtccctttgctgatcgtattctaatggcccctctgcaggtcggtctgatttattgtattttgttaaccgttttacaactgtcattatatggtaagttgcacggagaaatggccagagttctgaagccaaagcatattttaatctacaggcttctaatttcctgggcaacttattttcttctttccattggattctgtaccgtatctgcaatttttaggatcgatttcacccccgcctttggcagaggaggattcgtagtatattggatgtctacgtggttggtaatgatggctgttggtggtgccaatgaaaacgttctcagcttagttatagcttactgccctccatacctgagtatttggttgatgacgtggatcatattaaatatttctgcttcattctacccaatggttttgaacaacgaattttacaggtacggctacataatgccaatccataatgccgtggatatctataaagtgatttttttgaatttaaccaaaagaaaaatgggaagaaattacggtattctcgtggcatgggttgccctcaatacatccttgatgccattttgtatgaagtttgcaggtaaaaaaatgcaaaaaaatgctatgcaagcagcagaagccgctgtcgcagcagctacccagcgtgctagccgcccggcagaggccaatactgataaaaataacaacccgcccggaaattaa

SEQ ID NO: 4530 - DNA, 1644 bp, Artificial Sequence
  Description of Artificial Sequence: Synthetic polynucleotide
atgactaaatctgttggtgatgaagagagccagtacattgaggaccctagttttgcagcagcagctgcatttactggcggcagggacggggtttcttacagtaatcagagatttgctgagggttccggccattcttctgacttagcaaagtctttagaagactataggcctcctgatgaaaagccgtcctctttgtcttctgtgggggaaggtggcgctaatgaggaagagaagggcggtaacgacggcggtcccttggcaagaattcaaacagggcttttttctccaagattaagaaatcataggaaaaagattctctctaagtttgttttgaacaacttcttcattgcttgtgtgtgtgtatctctcatatctatttactggggtgcctgttacggaacagatcgttactttttcaaagtgaaaaatattgttgtattgcaggatgcgccatctaatacttctgttcaatctatttccgcgatcataccctctttgttagcgtctgtccccgggacatggcatatatacaacgcaacatcttttcataggaaatttggtacgacgaactccaccgaaattgacagaaagatagtcgatttaatttacgatgagagatactggttagcgttaaacgttaaacctaatgctacagacactttgtataattctttgattagccaagacgcaaacagtgagttcaattcttccattttttttgaatccgtgtttgaaagtggtcgtgacccatctagtgttaaatctaccattttaccactcatgcaacaattggaggtccgccttcagaaatattacgtcaaggaatatcttccctctttgatgagcaacatcacttctaatgacagagatcttaatataaacatggagaactgggcgattgcaggacagttgttgttcacctacaacgattatcgtccctttgctgatcgtattttgatggcccctttgcaggtcggtttgatttattgtattttgttaaccgttttacaattatctttatatggtaagttgcacggagaaatggccagagttttgaagccaaagcatattttaatctacaggcttttgatttcctgggcaacttattttcttctttccattggattctgtaccgtatctgcaatttttaggatcgatttcacccccgcctttggcagaggaggattcgtagtatattggatgtctacgtggttggtaatgatggctgttggtggtgccaatgaaaacgttctcagcttagttatagcttactgccctccatacttgagtatttggttgatgacgtggatcatattaaatatttctgcttctttctacccaatggttttgaacaacgaattttacaggtacggctacataatgccaatccataatgccgtggatatctataaagtgatttttttgaatttaaccaaaagaaaaatgggaagaaattacggtattctcgtggcatgggttgccctcaatacatccttgatgccattttgtatgaagtttgcaggtaaaaaaatgcaaaaaaatgctatgcaagcagcagaagccgctgtcgcagcagctacccagcgtgctagccgcccggcagaggccaatactgataaaaataacaacccgcccggaaattga

SEQ ID NO: 4531 - DNA, 2454 bp, Saccharomyces cerevisiae
atgcctaactcaaatgttcggattcctcctactgttccatcgaagataatagatgtggtcgaccaagcgctaagagcgcgactcttaggtggcagcaccttcaattcagggtttgatagtttagattccgtacttaacttacagtttagactacattaccatgttattggatcgaatgggcctgcaaaaccagtttgtgatgttttactgaaggaaagtcaaaatttagaaaagaatatgagtatgatggaggagttgaatgactatccggagattacaaaactagtggagaaaattctgttcaattgcctcggtattcttttcttccacaggggccaatttcaggaatcgcagcggtgcttgctgcactcgttgaaaattcataataacactgcatcgcaaaaaacagcacttatggagcagtatgataggtatttgatcgtagaaaacctgtactaccgtggtctagtttcgcaagacataaatatcatgcaaaatgttttttacaaagaactactggcccacgtggatacgatccctcccgaatcaaacggtcttcttttcgaatacatcagcttgatcgtcgcaaaactcaggttcaatcaaattcaggatttagcagaaaattttaaaactaccgtcgaaaatccttttattcttttcctttacatgataaagaagttccagtcacctctcaaaaagcacattgataatgatgatctttatttgaagttcggacagaacgttttgttgaaggccaaatttcctactgctagtgagacaaatgatgaagctttggagcattttaatgtctttttgcagtattatttcaaattcactcacataaaaaaaataaaagtgaatcccagttggtataatttcataatatcttcaatggaaaagacttttcaaagtattgaagtttcgaaaacagcaatgtttcttttccaaaacctaagcgataacagtaatgacgaaataaagaagaagacatttaaaagagaatctatactaaattttgttaattttgtgaaatacaacgacaagtactatcaactgcacgataactcccaccgtgacataatttcattcattgatgcgtattcttttattttacaaaactcctccaaaaccgattcaatcgaaaatgtttttgattacgataatacggtatctacgtttgcgacttccttgaattccttctacaaagaatataatttgccattaatgagccaatcagaatctttagattggctagaaaacagcaccagatgtgtatacccaggaaacatttcgaaagttctaacaaatgcgtggtcaacattgtacgaaatcagaaaatatcagttagattttcttgtatctaataatttgacttcatatctatgtaatgcaatgatgctgtccacaaaagaaaaagacaatgctgatgtagaagagcaggaagaaggagaggaggagaaggcattacgtgaattacaatttaaatattcttacactctagcacaacagaggcacattgaaactgcaatcaagactctagaatcattgatattaagtaaaaacccaaattactacaaagcttggcatctattagctctttgtaggtctgtgcaagaggataaggaaatgtcgtacaagatagtttgctctgttctagaagctatgaatgaaagtcttcagaacaatactttacttctgaatgatagatggcaatttattcacctaaaattaacgcaattggcgctaattgaagaaatttttggcactttagaggcactggagacacttccagaggtctttgaattatacgcaacattatttccagattcacaacctgaattgaacagcatgggtcccaaatattctcaaactaaagaatatcttttacaaatggtgtggatttttgctgcaaatatgtacatgagaacaaaagacaatgatgaggatgccaaggccgccatcaaagaagcctccaatgtcgaaagtaaattcaagaatttaaattgtaatattgctaacggttatttatcaataataaaagatgaaccaggcgtggcattaaaggaatttgaaacagttctgtactatgatgagaataatttagatgccttggtcggattcgctgaattaattttccctgaagaactaggcgtcgaggaaactaatcttgagcgttattatactctcagccttgataaaaaaccaggtaagagggccaaacttacgttcgttaatgacacagataggtcagcagcgtatgcaagactaaaatttctattggagtgcgcaatactagaatcgatcgaggcttactattccccagaagtttggtggtatttgtccctcatttacgagaaatatcaagatgacgagtacaaaaactctttgctaaaatgtattaaataccaagagttgaatcccattcgctccctaaggtattgcaattactaa

SEQ ID NO: 4532 - DNA, 2454 bp, Artificial Sequence
  Description of Artificial Sequence: Synthetic polynucleotide
atgcctaacagtaatgttagaattcctcctactgttccatctaagataatagatgtggtcgaccaagcgttaagagcgcgcctcttaggtggcagcaccttcaatagtgggtttgatagtttagattccgtacttaacttacagtttagattacattaccatgttattggaagtaatgggcctgcaaaaccagtttgtgatgttttattgaaggaaagtcaaaatttagaaaagaatatgagtatgatggaggagttgaatgactatccggagattacaaaattagtggagaaaattcttttcaattgcctcggtattcttttcttccacaggggccaatttcaggaatctcagcgttgcttgttgcactctttgaaaattcataataacactgcatctcaaaaaacagcacttatggagcagtatgataggtatttgatcgtagaaaacctttactaccgtggtttagtttctcaagacataaatatcatgcaaaatgttttttacaaagaattattagcccacgtggatacgatccctcccgaatctaacggtcttcttttcgaatacatcagcttgatcgtcgcaaaactcaggttcaatcaaattcaggatttagcagaaaattttaaaactaccgtcgaaaatccttttattcttttcctttacatgataaagaagttccagtctcctctcaaaaagcacattgataatgatgatctttatttgaagttcggacagaacgttttgttgaaggccaaatttcctactgctagtgagacaaatgatgaagctttggagcattttaatgtctttttgcagtattatttcaaattcactcacataaaaaaaataaaagtgaatcccagttggtataatttcataatatcttctatggaaaagacttttcaaagtattgaagtttccaaaacagcaatgtttcttttccaaaacttgagcgataacagtaatgacgaaataaagaagaagacatttaaaagagaatctatattgaattttgttaattttgtgaaatacaacgacaagtactatcaattacacgataactcccaccgtgacataatttctttcattgatgcgtattcttttattttacaaaactcctccaaaaccgattctatcgaaaatgtttttgattacgataatacggtatctacgtttgcgacttccttgaattccttctacaaagaatataatttgccattaatgagccaaagtgaatctttagattggttagaaaacagcaccagatgtgtatacccaggaaacatttccaaagttttgacaaatgcgtggtctacattgtacgaaatcagaaaatatcagttagattttcttgtatctaataatttgacttcttatttatgtaatgcaatgatgctttccacaaaagaaaaagacaatgctgatgtagaagagcaggaagaaggagaggaggagaaggcattacgtgaattacaatttaaatattcttacactttggcacaacagaggcacattgaaactgcaatcaagactttggaatctttgatattaagtaaaaacccaaattactacaaagcttggcatcttttagctctttgtaggtctgtgcaagaggataaggaaatgagttacaagatagtttgctctgttttggaagctatgaatgaaagtcttcagaacaatactttacttttgaatgatagatggcaatttattcacttgaaattaacgcaattggcgttaattgaagaaatttttggcactttagaggcattagagacacttccagaggtctttgaattatacgcaacattatttccagattctcaacctgaattgaacagcatgggtcccaaatattctcaaactaaagaatatcttttacaaatggtgtggatttttgctgcaaatatgtacatgagaacaaaagacaatgatgaggatgccaaggccgccatcaaagaagcctccaatgtcgaaagtaaattcaagaatttaaattgtaatattgctaacggttatttatctataataaaagatgaaccaggcgtggcattaaaggaatttgaaacagttctttactatgatgagaataatttagatgccttggtcggattcgctgaattaattttccctgaagaattaggcgtcgaggaaactaatcttgagcgttattatactctcagccttgataaaaaaccaggtaagagggccaaacttacgttcgttaatgacacagataggtctgcagcgtatgcaagattgaaatttttattggagtgcgcaatattggaaagtatcgaggcttactattccccagaagtttggtggtatttgtccctcatttacgagaaatatcaagatgacgagtacaaaaactctttgttgaaatgtattaaataccaagagttgaatcccattcgctccttaaggtattgcaattactga

SEQ ID NO: 4533 - DNA, 2280 bp, Saccharomyces cerevisiae
atgagtaaagccaagggaacgggattttcatcaattgatactgaagatgaaaacttacgcgaacgttatgttaatcaaccaaaagctaatgcctccgatattcaagatgaacaattagattgctttgagcaactagaagaaaaacataggacaaaaaaaaatgaagaatacactgcgttgaaaattttaagggatgtcataggtccccttttattaactataacttcgttttatctaagattccaacatatagatcagaacaattatgttgtctgggatgaggctcattttgggaaattcggatcatactacatcaaacatgagtactaccacgatgtccaccctccacttggtaaaatgcttattgcattgagcgaatggatggcaggatttgacggtcaatttgacttttcctctaataatgcatatccggaaaacgtaaactttaaactaatgagacaatttaatgccacatttggagctctatgtacaccagtagctttctttacagccaaatggatggggttcaattattttactgtttatttgattgctacgatggtaacgttggaacattcatatattgtcctctcaaaattcatattgctagattcaatgctgctttttttctcgatgacgacttttgcctgtatgataaagttgtatacgttgagaaagcaacaaatgacgaaaaaatggtcgttatggatgttattaactggtttatctattggttgcgtttgttctgtgaaatgggttggtctttttatcacagttgtagtcggcctctacacatgtatagaactatttttgctctattgtgataaagaattgcctagaataaaatattacaaacattggcttatcagaatcattaatctgatagtaattccttttcttatctatctctattgcttcaaaattcactttgtgttgttgtacaaatctggcacgggggattctactacaaatacgttatttcagataaacttggagggaactcagattgaggcgggtcctcgtgatgtagcatttgggtcagagttaaccataaggtcgcatggtttaagcccgaatctgctgcattcacatattcaagtatacccagaaggctctggacagcgccaaatcactggatatggattcgcagactctaataatgtttggaagtttgaattttctaggtcttctggattggaactagatcagaacgggactttgaatggcaaaataatcccaataacggatggtgtggaagttcgtctcagccataaaaatacaggatcgaatcttcactcgcatgatgtaccttctcacgtctctagaggaaattatgaggtttcaggctatgggtcacaaagtgttggcgatgaaaaggatgattggatagtggagattgtgaaacaaatggattcaccaaatcccgtctattctaatgagaattcaactattttacatccagtttctactttcttcaggttgagacacaaagttttaggttgttacttggcttctactggattgacgtatccagcttggggatttaaacaagctgaaatcgtctgcaaagactcctggagtcgtagggacaaatcgacctggtggaatgtagaagatcactggaaccacaatttagaaaccgcagaagattacgttccaccaaaatccaatttttggaccgattttattctaactaattttgccatggcctcctctaataacgcgttagtgcctgatgaggataaatatgatagtttatcgtctgatgcatgggaatggccaaccttgcataaagggctaagaatgtgttcatgggcgggatatatcactcgatattacttgatgggatctcccttcaatacatggatttctactgtctccttaatcatcttcccatttattattctttttatattatatcgttggaggagacaaacgctttatctctcagacgatcaaatctggcaaataacgatacagggtatttttcctttcatttcctggatgacacattatctgccttttgcaatgatggggagagtgacgtatgtacatcactacgttcccgctttatattttgcaatgcttgttttcggatttgtgcttgatttcactttgacaagagtccattggatggtcaaatatcccatctatttgtcattgtttggcggatgtatatacatttataatttatttgctccaatatgtcagggtatgcatggtgataaagcggaatacttacctttgcagtggttatctacttgggatatcgcaccttag

SEQ ID NO: 4534 - DNA, 2280 bp, Artificial Sequence
  Description of Artificial Sequence: Synthetic polynucleotide
atgagtaaagccaagggaacgggattttcttccattgatactgaagatgaaaacttacgcgaacgttatgttaatcaaccaaaagctaatgcctccgatattcaagatgaacaattagattgctttgagcaattggaagaaaaacataggacaaaaaaaaatgaagaatacactgcgttgaaaattttaagggatgtcataggtccccttttattaactataacttctttttatttaagattccaacatatagatcagaacaattatgttgtctgggatgaggctcattttgggaaattcggatcttactacatcaaacatgagtactaccacgatgtccaccctccacttggtaaaatgcttattgcattgagcgaatggatggcaggatttgacggtcaatttgacttttcctctaataatgcatatccggaaaacgtaaactttaaattaatgagacaatttaatgccacatttggagctctttgtacaccagtagctttctttacagccaaatggatggggttcaattattttactgtttatttgattgctacgatggtaacgttggaacattcttatattgtcctctctaaattcatattgttggattctatgttactttttttctccatgacgacttttgcctgtatgataaagttgtatacgttgagaaagcaacaaatgacgaaaaaatggtctttatggatgttattaactggtttatctattggttgcgtttgttctgtgaaatgggttggtctttttatcacagttgtagtcggcctctacacatgtatagaattatttttgctctattgtgataaagaattgcctagaataaaatattacaaacattggcttatcagaatcattaatttgatagtaattccttttcttatctatctctattgcttcaaaattcactttgtgttgttgtacaaatctggcacgggggattctactacaaatacgttatttcagataaacttggagggaactcagattgaggcgggtcctcgtgatgtagcatttgggagtgagttaaccataaggagccatggtttaagcccgaatttattacattctcatattcaagtatacccagaaggctctggacagcgccaaatcactggatatggattcgcagactctaataatgtttggaagtttgaattttctaggtcttctggattggaattagatcagaacgggactttgaatggcaaaataatcccaataacggatggtgtggaagttcgtctcagccataaaaatacaggaagtaatcttcactctcatgatgtaccttctcacgtctctagaggaaattatgaggtttctggctatgggagccaaagtgttggcgatgaaaaggatgattggatagtggagattgtgaaacaaatggattctccaaatcccgtctattctaatgagaattctactattttacatccagtttctactttcttcaggttgagacacaaagttttaggttgttacttggcttctactggattgacgtatccagcttggggatttaaacaagctgaaatcgtctgcaaagactcctggagtcgtagggacaaatctacctggtggaatgtagaagatcactggaaccacaatttagaaaccgcagaagattacgttccaccaaaatccaatttttggaccgattttattttgactaattttgccatggcctcctctaataacgcgttagtgcctgatgaggataaatatgatagtttatcttctgatgcatgggaatggccaaccttgcataaagggttgagaatgtgttcttgggcgggatatatcactagatattacttgatgggatctcccttcaatacatggatttctactgtctccttaatcatcttcccatttattattctttttatattatatcgttggaggagacaaacgctttatctctctgacgatcaaatctggcaaataacgatacagggtatttttcctttcatttcctggatgacacattatttaccttttgcaatgatggggagagtgacgtatgtacatcactacgttcccgctttatattttgcaatgcttgttttcggatttgtgcttgatttcactttgacaagagtccattggatggtcaaatatcccatctatttgtctttgtttggcggatgtatatacatttataatttatttgctccaatatgtcagggtatgcatggtgataaagcggaatacttacctttgcagtggttatctacttgggatatcgcaccttga

SEQ ID NO: 4535 - DNA, 2367 bp, Saccharomyces cerevisiae
atggtggaatgtatcactcccgaagccatttttataggtgctaacaagcaaactcaggttagcgatatacacaaagttaaaaaaatcgtcgcatttggcgcaggtaaaactattgcattatgggaccccattgaaccaaataataaaggtgtttatgcaactttgaaaggccacgaagctgaagtgacttgtgtcagatttgtcccagattcagattttatggtatctgcatctgaggatcatcatgttaagatctggaaatttactgattactcacatttacaatgtattcaaaccattcaacattactcgaagacgattgtggcattaagcgctttaccaagtcttatttcagtcggttgtgctgatggtactatcagcatatggagacaaaatattcaaaatgatgagtttggtcttgctcatgaattcaccataaaaaagggattcttctatccactgtgtttatcactgtcaaaagttgaagaaaaaaagtatttacttgccattgggggtactaatgtgaacgtttttatcgcatctttcattttaagtgattctggcattgagaagtgtcgagtggttgcagaattggaaggtcatgaagactgggtcaagtcattggctttccgtcaccaggaaactccgggtgattatttgttatgctctggctctcaggaccgttatattagattgtggagaattaggattaacgatttaatcgatgactctgaagaagattcaaagaaattaacattattgagcaataaacaatataaatttcaaattgatgatgaattgagagtaggcataaattttgaagccttaattatgggccatgatgattggatttcatcccttcagtggcacgaaagtcgcttacaactactagctgctactgctgatacttcattgatggtatgggaacctgatgagacttcaggcatttgggtgtgcagtctacggttaggagaaatgtcctcaaaaggtgcctcaactgcaacgggttcctctggaggtttttggtcctgtctatggtttactcatgagagaatggatttctttttgaccaatggtaagactgggtcctggaggatgtgggctacaaaggataatattatttgcgatcaaaggttgggcatatccggtgccacgaaggatgtgacggacattgcttggtctcctagcggcgagtacctattggctacttctctggatcagaccactagactctttgctccatggatttatgatgccagcgggagaaaaagggaaatagctacctggcatgaattttctaggccacaaatacatggttatgatatgatttgtgttgagacagtgacggataccagatttgtaagtggtggtgatgaaaaaatcttgagatcatttgacctacctaaaggggtggcaggaatgttacaaaagtttgttggtattcaatttgaggaaaaaagtgaaatgccagactctgctaccgttcctgtgttaggtttgtctaataaagctggtgaggatgacgcaaatgaagatgatgaagaggaggaaggtggtaataaagaaacaccagatatcactgatccattgtccttgctagaatgtccacctatggaagaccaattgcaaagacacttgttatggcctgaagtggaaaagctttacggacatggttttgaaataacgtgtcttgatatttctccggatcagaaattaattgcttctgcttgtagatcaaataatgttcagaatgcagttattagaatattcagcacagaaaattggttagaaataaagcctgcattaccgttccacagtctaacgataacaagattaaaattctctaaagatggaaaatttttattgagtgtttgtagagacagaaaatgggcgctttgggaaagaaatatggaagataatacttttgaattgagattcaaaaatgaaaaaccacacacaaggattatatgggatgcagactgggcaccattagagtttggtaatgtttttgtcaccgcgtccagggataaaactgtcaaagtatggaggcaccaaaaggagccagctgatgactacgttctggaagcatcaattaaacacactaaagctgtcactgctatttccatacatgacagcatgataagagagaaaattttgatatcggtgggtcttgaaaacggtgagatttatttatacagttatactttgggaaagtttgagttaataacgcagctaaacgaggatataacaccagcagacaaaattacaagattgaggtggtcacatttaaagagaaacggtaaattatttttaggtgtaggaagtagtgatttgtccacccgtatatactcattagcatatgaatag

SEQ ID NO: 4536 - DNA, 2367 bp, Artificial Sequence
  Description of Artificial Sequence: Synthetic polynucleotide
atggtggaatgtatcactcccgaagccatttttataggtgctaacaagcaaactcaggttagcgatatacacaaagttaaaaaaatcgtcgcatttggcgcaggtaaaactattgcattatgggaccccattgaaccaaataataaaggtgtttatgcaactttgaaaggccacgaagctgaagtgacttgtgtcagatttgtcccagattctgattttatggtatctgcatctgaggatcatcatgttaagatctggaaatttactgattactctcatttacaatgtattcaaaccattcaacattactccaagacgattgtggcattaagcgctttaccaagtcttatttctgtcggttgtgctgatggtactatcagcatatggagacaaaatattcaaaatgatgagtttggtcttgctcatgaattcaccataaaaaagggattcttctatccattatgtttatctttatccaaagttgaagaaaaaaagtatttacttgccattgggggtactaatgtgaacgtttttatcgcatctttcattttaagtgattctggcattgagaagtgtcgtgtggttgcagaattggaaggtcatgaagactgggtcaagtctttggctttccgtcaccaggaaactccgggtgattatttgttatgctctggctctcaggaccgttatattagattgtggagaattaggattaacgatttaatcgatgactctgaagaagattctaagaaattaacattattgagcaataaacaatataaatttcaaattgatgatgaattgagagtaggcataaattttgaagccttaattatgggccatgatgattggatttcttcccttcagtggcacgaaagtcgcttacaattattagctgctactgctgatacttctttgatggtatgggaacctgatgagacttctggcatttgggtgtgcagtttgagattaggagaaatgtcctctaaaggtgcctctactgcaacgggttcctctggaggtttttggtcctgtttatggtttactcatgagagaatggatttctttttgaccaatggtaagactgggtcctggaggatgtgggctacaaaggataatattatttgcgatcaaaggttgggcatatccggtgccacgaaggatgtgacggacattgcttggtctcctagcggcgagtacttgttggctacttctttagatcagaccactagactctttgctccatggatttatgatgccagcgggagaaaaagggaaatagctacctggcatgaattttctaggccacaaatacatggttatgatatgatttgtgttgagacagtgacggataccagatttgtaagtggtggtgatgaaaaaatcttgagatcttttgacttgcctaaaggggtggcaggaatgttacaaaagtttgttggtattcaatttgaggaaaaaagtgaaatgccagactctgctaccgttcctgtgttaggtttgtctaataaagctggtgaggatgacgcaaatgaagatgatgaagaggaggaaggtggtaataaagaaacaccagatatcactgatccattgtccttgttggaatgtccacctatggaagaccaattgcaaagacacttgttatggcctgaagtggaaaagctttacggacatggttttgaaataacgtgtcttgatatttctccggatcagaaattaattgcttctgcttgtagatctaataatgttcagaatgcagttattagaatattcagcacagaaaattggttagaaataaagcctgcattaccgttccacagtttaacgataacaagattaaaattctctaaagatggaaaatttttattgagtgtttgtagagacagaaaatgggcgctttgggaaagaaatatggaagataatacttttgaattgagattcaaaaatgaaaaaccacacacaaggattatatgggatgcagactgggcaccattagagtttggtaatgtttttgtcaccgcgtccagggataaaactgtcaaagtatggaggcaccaaaaggagccagctgatgactacgttttggaagcatctattaaacacactaaagctgtcactgctatttccatacatgacagcatgataagagagaaaattttgatatctgtgggtcttgaaaacggtgagatttatttatacagttatactttgggaaagtttgagttaataacgcagttgaacgaggatataacaccagcagacaaaattacaagattgaggtggtctcatttaaagagaaacggtaaattatttttaggtgtaggaagtagtgatttgtccacccgtatatactctttagcatatgaatga

SEQ ID NO: 4537 - DNA, 678 bp, Saccharomyces cerevisiae
atgtctgacggaacactgtttactgatttgaaggagagaaagttgattaggaccattgtgccaagaggtttagtgcgttccttgaagctggacgttaagcttgctgatccaagtgacgctcagcaactttacgaaagggagtttcccttgcgtaagtacccaacttttgttggaccgcatgacgagtggacgcttacagaggcaatggctattgactactacttgatccatctgtcgagcgacaaggaagctgtgcgccagttgttgggtcccgaaggtgacttcaaaactcgtgcagatattttaagatgggaatcgctttccaacagtgatttcttgaatgaggtttgtgaggtgtttttccctctaattggcgtaaagccatataatgccactgaattcaaagccgcaagagagaatgtcgacaccattgtttcgctttacgagaaaaggttaaagaaacagcaataccttgtctgtgatgaccacgaaactcttgctgatttaatctcagcggctgctttttcgctagggtttataagttttttcgatgaaacatggaggtctaagcatccagaggttacgcgctggtttaatcgagtaattaagtcccgcttttttgaaggtgaatttgagagtttcaaaatgtgtgagactgagatgcaacccattaaataa

SEQ ID NO: 4538 - DNA, 678 bp, Artificial Sequence
  Description of Artificial Sequence: Synthetic polynucleotide
atgtctgacggaacattatttactgatttgaaggagagaaagttgattaggaccattgtgccaagaggtttagtgcgttccttgaagttggacgttaagcttgctgatccaagtgacgctcagcaactttacgaaagggagtttcccttgcgtaagtacccaacttttgttggaccgcatgacgagtggacgcttacagaggcaatggctattgactactacttgatccatttatccagcgacaaggaagctgtgcgccagttgttgggtcccgaaggtgacttcaaaactcgtgcagatattttaagatgggaatctctttccaacagtgatttcttgaatgaggtttgtgaggtgtttttccctttgattggcgtaaagccatataatgccactgaattcaaagccgcaagagagaatgtcgacaccattgtttccctttacgagaaaaggttaaagaaacagcaataccttgtctgtgatgaccacgaaactcttgctgatttaatcagtgcggctgctttttctttagggtttataagttttttcgatgaaacatggaggtctaagcatccagaggttacgcgctggtttaatagagtaattaagtcccgcttttttgaaggtgaatttgagagtttcaaaatgtgtgagactgagatgcaacccattaaatga

SEQ ID NO: 4539 - DNA, 1275 bp, Saccharomyces cerevisiae
atggcaaacccaacaacagggaagtcctcgattagggctaagctttctaactcatcgctatcaaacctatttaaaaaaaataaaaataaaagacagcgtgaggaaacggaagagcaggacaatgaggataaggatgagagtaagaaccaggatgaaaataaggacacacagctcactccccgcaagcgtcgccggttgacgaaggagtttgaagagaaggaggctcgttacaccaacgagttgcccaaggaactgcgcaagtatcgtcctaaaggtttcagattcaatttgcctccaacggatagacccatcaggatatatgcagatggtgtttttgatcttttccatcttggccacatgaagcaactggaacagtgtaagaaggctttccccaatgtaacactgatagttggtgtgcctagcgacaaaatcactcacaaactaaaaggtttgactgtgctgaccgataagcagcgttgtgaaactttaacgcactgcagatgggttgacgaagtcgtgcccaacgctccctggtgtgtcaccccagaatttctactagaacacaagattgactacgtggcacatgacgatattccttacgttagcgccgacagcgacgatatctacaagccaataaaggagatgggaaaattcttgactacccaaagaaccaatggtgtctctacaagtgatattatcacaaagatcatcagagattatgacaaatatttgatgagaaactttgcaaggggtgctaccagacaggagctgaacgtttcttggttgaagaaaaacgaactggagttcaaaaaacacatcaatgaattcaggtcatatttcaagaaaaaccagacaaatttgaataacgcctccagagacttgtacttcgaagtccgtgaaatcttgctaaagaaaacgttgggcaaaaaactctactccaagttaataggcaatgaattaaagaaacaaaatcaacgacaaagaaaacagaattttttggatgatccgtttactaggaagctaatcagggaggcctctccggctacagagtttgccaacgaatttacgggcgaaaactctaccgctaaatcaccggatgacaatggaaatcttttcagtcaggaagatgatgaagacacaaattctaacaacacgaatacaaattcagattcagattcaaacactaactcaacgcctcccagtgaagatgacgacgacaacgacaggttaactttggaaaacctaacacagaagaagaaacaatcagcgaactga

SEQ ID NO: 4540 - DNA, 1275 bp, Artificial Sequence
  Description of Artificial Sequence: Synthetic polynucleotide
atggcaaacccaacaacagggaagtccagtattagggctaagctttctaactcttctttatctaacttgtttaaaaaaaataaaaataaaagacagcgtgaggaaacggaagagcaggacaatgaggataaggatgagagtaagaaccaggatgaaaataaggacacacagctcactccccgcaagcgtcgcagattgacgaaggagtttgaagagaaggaggctcgttacaccaacgagttgcccaaggaattacgcaagtatcgtcctaaaggtttcagattcaatttgcctccaacggatagacccatcaggatatatgcagatggtgtttttgatcttttccatcttggccacatgaagcaattggaacagtgtaagaaggctttccccaatgtaacattaatagttggtgtgcctagcgacaaaatcactcacaaattgaaaggtttgactgtgttgaccgataagcagcgttgtgaaactttaacgcactgcagatgggttgacgaagtcgtgcccaacgctccctggtgtgtcaccccagaatttttattggaacacaagattgactacgtggcacatgacgatattccttacgttagcgccgacagcgacgatatctacaagccaataaaggagatgggaaaattcttgactacccaaagaaccaatggtgtctctacaagtgatattatcacaaagatcatcagagattatgacaaatatttgatgagaaactttgcaaggggtgctaccagacaggagttgaacgtttcttggttgaagaaaaacgaattagagttcaaaaaacacatcaatgaattcaggagttatttcaagaaaaaccagacaaatttgaataacgcctccagagacttgtacttcgaagtccgtgaaatcttgttgaagaaaacgttgggcaaaaaactctactccaagttaataggcaatgaattaaagaaacaaaatcaaagacaaagaaaacagaattttttggatgatccgtttactaggaagttaatcagggaggcctctccggctacagagtttgccaacgaatttacgggcgaaaactctaccgctaaatctccggatgacaatggaaatcttttcagtcaggaagatgatgaagacacaaattctaacaacacgaatacaaattctgattctgattccaacactaactccacgcctcccagtgaagatgacgacgacaacgacaggttaactttggaaaacttaacacagaagaagaaacaaagtgcgaactga

SEQ ID NO: 4541 - DNA, 447 bp, Saccharomyces cerevisiae
atggactcgtactcaataacaaacgtaaaatacctggatccgactgaattgcatcgttggatgcaagaaggacacactactacgctgagggagcctttccaggtagtggatgtgcgaggctcagattatatggggggccatatcaaggacggatggcactacgcctattcgcgccttaagcaggatccggagtacttacgtgagctaaagcacagattgttggaaaagcaagcggacggccgcggagcgctgaacgtgattttccattgtatgttatcgcagcagcgcggaccgtctgcagcgatgctgctgcttcggtcgcttgacacggcggaactttctcgctgtcgtctatgggtgttgcgtggggggttctcgcgctggcaatccgtatacggtgacgacgagagcgttacggcgggttacctacccgatctgtggcgttga

SEQ ID NO: 4542 - DNA, 447 bp, Artificial Sequence
  Description of Artificial Sequence: Synthetic polynucleotide
atggactcttactctataacaaacgtaaaatacttggatccgactgaattgcatcgttggatgcaagaaggacacactactacgttgagggagcctttccaggtagtggatgtgagaggcagtgattatatggggggccatatcaaggacggatggcactacgcctattctcgccttaagcaggatccggagtacttacgtgagttgaagcacagattgttggaaaagcaagcggacggccgcggagcgttgaacgtgattttccattgtatgttatctcagcagcgcggaccgtctgcagcgatgttattacttagatctcttgacacggcggaactttctcgctgtcgtttatgggtgttgcgtggggggttcagtcgctggcaatccgtatacggtgacgacgagagcgttacggcgggttacttgcccgatttatggcgttga

SEQ ID NO: 4543 - DNA, 2841 bp, Saccharomyces cerevisiae
atggctggtcaagtgttggacggcaaagcatgcgctcagcagtttagaagcaatattgctaatgaaatcaaaagcattcaaggtcacgtgcctgggtttgcacctaaccttgccatcattcaagtaggcaacagaccagactcagccacatatgtacgcatgaagcgtaaggcagctgaagaggccggcattgttgctaatttcattcatttagatgaatccgctactgaatttgaagttctgcgttacgtggaccagctgaatgaggacccacatacacacggtattatcgtgcaactaccattacccgctcatttggacgaggatagaatcacctcgagagtgttggcagaaaaggacgtggacgggttcgggcccaccaacattggcgaattgaataagaagaacggacacccattctttttgccctgcacgcccaaggggatcattgagctgcttcacaaggccaacgtcacgattgaaggttcccggtccgttgtgatcggaagatctgacattgttggctctcctgttgcagaattgttaaaatctctaaactccaccgtcaccatcactcattctaaaacccgtgatatcgcatcatacttacacgacgcggacatcgtagtcgttgccatcggccaaccagaatttgtgaagggtgaatggttcaaaccaagagacggcacttccagtgataagaaaaccgtggtaattgatgttggcaccaactacgttgctgatccttccaaaaagtccggtttcaaatgtgttggtgacgttgagttcaatgaagcaatcaaatacgtccatctaatcactccagtgcccggtggtgtgggccccatgacggtggctatgttaatgcaaaataccttgattgctgccaaacgccaaatggaagaatcctcgaagcctttgcagattcctcccttgccattgaagttgctaacacctgttccttccgatatagacatctccagagcacaacagccaaagcttatcaaccagcttgctcaagaattgggtatttactctcatgagttggagctgtacggacattacaaggccaaaatttctcctaaagtcatcgaaaggctgcagacgcgccaaaatggtaagtacatcttggtgtctggtatcacaccaacaccactgggagagggtaaatccactacaacaatgggtcttgtccaggcactaacggctcacttgggcaagccagccattgcgaacgtcagacaaccctccctaggacccactttaggtgtcaaaggtggtgctgcgggtggtggttattcccaagtcatcccaatggacgaattcaacttacatttgactggtgacattcacgccattggtgcggctaacaacctacttgctgccgctattgacactagaatgttccatgagaccactcaaaagaacgacgctaccttctacaacagactagtgcctagaaagaacggaaagagaaagtttactccctccatgcaaagaagattgaacagactgggtattcaaaagaccaaccccgatgatctaacacccgaagagatcaacaaattcgccagattgaacattgacccggacactattactatcaagagggtggtcgatatcaacgacagaatgttaagacaaatcaccattggtcaagcccctaccgagaagaaccacacaagagttactggattcgatatcaccgttgcttctgaattgatggctattcttgctctttcaaaggacttgagggacatgaaggaacgtattggaagagtcgttgttgctgctgacgtaaacaggtctccagtcactgttgaagatgtgggttgtaccggtgccttaaccgctttattaagagacgctatcaagcccaacttgatgcaaactttagaaggtactcctgtcttggtccatgccggcccatttgccaacatctctatcggtgcctcttctgttattgctgatcgcgtggctttgaaattggttggtaccgagccagaggcaaaaacagaagctggttatgtggttactgaagcagggttcgatttcactatgggtggtgaaagattcttcaacatcaagtgccgttcctctggattgacacctaatgctgtggtcttggttgctactgttagggcattgaagtcacacggtggtgctccagatgtcaaacctggccaacctttaccttccgcatacactgaagagaatatcgagtttgtcgaaaaaggtgccgctaacatgtgtaaacaaattgccaacattaagcaatttggcgtccccgtcgttgtcgcaattaacaagtttgaaactgacactgaaggtgaaatagccgccattagaaaagccgctttggaagctggtgcatttgaagccgtaacctctaaccattgggccgaaggtggtaaaggtgctatcgacttggccaaggccgtcatcgaagcttccaaccaaccagtggacttccatttcctatatgacgttaactcctccgttgaagacaaattaactactatcgttcaaaagatgtacggtggtgccgcaatcgatatcttgcctgaagcacaacgcaagattgacatgtacaaggaacaaggtttcggtaacttgccaatttgtatcgccaagacacaatactctttatcccacgatgcaactttgaaaggtgttccaaccgggttcactttccccatcagagacgtcagattgtctaatggtgctggatacttatacgctcttgccgccgaaatacaaaccattcctggtttggctacctatgctggttacatggccgtggaagtcgatgatgacggtgagatcgatggcctgttctaa

SEQ ID NO: 4544 - DNA, 2841 bp, Artificial Sequence
  Description of Artificial Sequence: Synthetic polynucleotide
atggctggtcaagtgttggacggcaaagcatgcgctcagcagtttagaagcaatattgctaatgaaatcaaaagcattcaaggtcacgtgcctgggtttgcacctaaccttgccatcattcaagtaggcaacagaccagactctgccacatatgtacgcatgaagcgtaaggcagctgaagaggccggcattgttgctaatttcattcatttagatgaatccgctactgaatttgaagttttacgttacgtggaccagttgaatgaggacccacatacacacggtattatcgtgcaattaccattacccgctcatttggacgaggatagaatcacctccagagtgttggcagaaaaggacgtggacgggttcgggcccaccaacattggcgaattgaataagaagaacggacacccattctttttgccctgcacgcccaaggggatcattgagttgcttcacaaggccaacgtcacgattgaaggttccagatccgttgtgatcggaagatctgacattgttggctctcctgttgcagaattgttaaaatctttgaactccaccgtcaccatcactcattctaaaacccgtgatatcgcaagctacttacacgacgcggacatcgtagtcgttgccatcggccaaccagaatttgtgaagggtgaatggttcaaaccaagagacggcacttccagtgataagaaaaccgtggtaattgatgttggcaccaactacgttgctgatccttccaaaaagtccggtttcaaatgtgttggtgacgttgagttcaatgaagcaatcaaatacgtccatttgatcactccagtgcccggtggtgtgggccccatgacggtggctatgttaatgcaaaataccttgattgctgccaaacgccaaatggaagaatcctccaagcctttgcagattcctcccttgccattgaagttgttgacacctgttccttccgatatagacatctccagagcacaacagccaaagcttatcaaccagcttgctcaagaattgggtatttactctcatgagttggagttatacggacattacaaggccaaaatttctcctaaagtcatcgaaaggttacagacgcgccaaaatggtaagtacatcttggtgtctggtatcacaccaacaccattaggagagggtaaatccactacaacaatgggtcttgtccaggcattgacggctcacttgggcaagccagccattgcgaacgtcagacaaccctccttgggacccactttaggtgtcaaaggtggtgctgcgggtggtggttattcccaagtcatcccaatggacgaattcaacttacatttgactggtgacattcacgccattggtgcggctaacaacttacttgctgccgctattgacactagaatgttccatgagaccactcaaaagaacgacgctaccttctacaacagattagtgcctagaaagaacggaaagagaaagtttactccctccatgcaaagaagattgaacagattaggtattcaaaagaccaaccccgatgatttaacacccgaagagatcaacaaattcgccagattgaacattgacccggacactattactatcaagagggtggtcgatatcaacgacagaatgttaagacaaatcaccattggtcaagcccctaccgagaagaaccacacaagagttactggattcgatatcaccgttgcttctgaattgatggctattcttgctctttccaaggacttgagggacatgaaggaacgtattggaagagtcgttgttgctgctgacgtaaacaggtctccagtcactgttgaagatgtgggttgtaccggtgccttaaccgctttattaagagacgctatcaagcccaacttgatgcaaactttagaaggtactcctgtcttggtccatgccggcccatttgccaacatctctatcggtgcctcttctgttattgctgatcgcgtggctttgaaattggttggtaccgagccagaggcaaaaacagaagctggttatgtggttactgaagcagggttcgatttcactatgggtggtgaaagattcttcaacatcaagtgccgttcctctggattgacacctaatgctgtggtcttggttgctactgttagggcattgaagtctcacggtggtgctccagatgtcaaacctggccaacctttaccttccgcatacactgaagagaatatcgagtttgtcgaaaaaggtgccgctaacatgtgtaaacaaattgccaacattaagcaatttggcgtccccgtcgttgtcgcaattaacaagtttgaaactgacactgaaggtgaaatagccgccattagaaaagccgctttggaagctggtgcatttgaagccgtaacctctaaccattgggccgaaggtggtaaaggtgctatcgacttggccaaggccgtcatcgaagcttccaaccaaccagtggacttccatttcctctatgacgttaactcctccgttgaagacaaattaactactatcgttcaaaagatgtacggtggtgccgcaatcgatatcttgcctgaagcacaacgcaagattgacatgtacaaggaacaaggtttcggtaacttgccaatttgtatcgccaagacacaatactctttatcccacgatgcaactttgaaaggtgttccaaccgggttcactttccccatcagagacgtcagattgtctaatggtgctggatacttatacgctcttgccgccgaaatacaaaccattcctggtttggctacctatgctggttacatggccgtggaagtcgatgatgacggtgagatcgatggccttttctga

SEQ ID NO: 4545 - DNA, 114 bp, Saccharomyces cerevisiae
atgcaatggaacgctttttcctttgtgtcttatgtatatcttcgttattttatttcgttccgcccaaatattgtgctagccagtgttcgcttgtcttggtatagtatcatttag

SEQ ID NO: 4546 - DNA, 114 bp, Artificial Sequence
  Description of Artificial Sequence: Synthetic polynucleotide
atgcaatggaacgctttttcctttgtgtcttatgtatatcttcgttattttatttctttccgcccaaatattgtgcttgccagtgttcgcttgtcttggtatagtatcatttga

SEQ ID NO: 4547 - DNA, 873 bp, Saccharomyces cerevisiae
atgtgtgataagtcaaaaacggtattggactacacgatagaattcttggataaatatatacctgaatggtttgagacgggaaataaatgccccttgttcattttcttctcgggcccacaaggctcaggcaaaagttttacaagtatccaaatctataaccatttgatggaaaaatatgggggtgaaaaatctatcggttacgcctcaattgatgatttttatttaactcacgaggaccaattgaaactcaatgagcaattcaagaacaataagctgttacaaggacgtggtttaccaggtactcatgatatgaaattgttgcaagaggtattgaacaccatcttcaataataatgaacatccggatcaagatactgtcgtactacccaagtacgataaatcccaatttaaaggagaaggggaccgttgccccactggtcaaaaaatcaagctaccagtcgatatttttatcttagaaggttggttcctcgggttcaaccccattttgcaaggaattgagaataatgatcttcttactggggacatggttgatgtcaatgccaagctcttcttctatagcgacttgttgtggcgcaacccagaaatcaaatctttagggatagtattcaccaccgataacattaacaatgtttatggctggagactacaacaggagcatgaactaatatcaaaggtcggaaaggggatgaccgacgaacaagtgcatgcttttgtggatagatacatgccctcctataaactttatttgaacgactttgtccggagtgaaagtttaggttccattgctacattgacgttaggaatcgactccaacaggaatgtatattctacgaaaacgagatgtattgaatag

SEQ ID NO: 4548 - DNA, 873 bp, Artificial Sequence
  Description of Artificial Sequence: Synthetic polynucleotide
atgtgtgataagagtaaaacggtattggactacacgatagaattcttggataaatatatacctgaatggtttgagacgggaaataaatgccccttgttcattttcttcagtggcccacaaggcagtggcaaaagttttacaagtatccaaatctataaccatttgatggaaaaatatgggggtgaaaaatctatcggttacgcctctattgatgatttttatttaactcacgaggaccaattgaaactcaatgagcaattcaagaacaataagcttttacaaggacgtggtttaccaggtactcatgatatgaaattgttgcaagaggtattgaacaccatcttcaataataatgaacatccggatcaagatactgtcgtattgcccaagtacgataaatcccaatttaaaggagaaggggaccgttgccccactggtcaaaaaatcaagttaccagtcgatatttttatcttagaaggttggttcctcgggttcaaccccattttgcaaggaattgagaataatgatcttcttactggggacatggttgatgtcaatgccaagctcttcttctatagcgacttgttgtggcgcaacccagaaatcaaatctttagggatagtattcaccaccgataacattaacaatgtttatggctggagattacaacaggagcatgaattgatatccaaggtcggaaaggggatgaccgacgaacaagtgcatgcttttgtggatagatacatgccctcctataaactttatttgaacgactttgtcagaagtgaaagtttaggttccattgctacattgacgttaggaatcgactccaacaggaatgtatattctacgaaaacgagatgtattgaatga

SEQ ID NO: 4549 - DNA, 306 bp, Saccharomyces cerevisiae
atgaacaataatgttgaagaactcctacggcgtattcccctctacaacaaatatggtaaggattttccacaagaaacagtgactaggtttcagatgcctgaatttaagttaccagcgctacaaccaacaagggacttattatgcccttggtacgaagaatgtgacaatatcaccaaagtctgtcagttacatgattcttctaataagaaattcgatcagtggtacaaggagcaatatctgagtaaaaaaccaccgggaattgttggaaacacactattatctccatcaagaaaggataattcctag

SEQ ID NO: 4550 - DNA, 306 bp, Artificial Sequence
  Description of Artificial Sequence: Synthetic polynucleotide
atgaacaataatgttgaagaactcttgagacgtattcccctctacaacaaatatggtaaggattttccacaagaaacagtgactaggtttcagatgcctgaatttaagttaccagcgttgcaaccaacaagggacttattatgcccttggtacgaagaatgtgacaatatcaccaaagtctgtcagttacatgattcttctaataagaaattcgatcagtggtacaaggagcaatatttgagtaaaaaaccaccgggaattgttggaaacacattattatctccatctagaaaggataattcctga

SEQ ID NO: 4551 - DNA, 786 bp, Saccharomyces cerevisiae
atgtctgcaaaacagcaactacgtatattagttccggtgaaaagggtagttgatttccagatcaagcctagagtaaataagaccttaactgggattgaaaccagtggaatcaaattcagtatcaaccctttcgatgatattgctgtcgaagaagccatcagaattaaagaaaagaacaagagtttagtagaatctacgcatgcagtttctattggctccgccaaagctcaggatattctaagaaattgccttgctaagggaatagacacctgtagtttaattgactctgtgggtaaagaaaacatagagcccttagcaattgctaaaatcttaaaagctgttgttgaaaagaagggttctaatctggttttgatgggaaagcaagccattgatgatgactgtaacaacaccggtcagatgttggcaggtttattaaattggccacaggcaacaaatgcggcaaaggtggaattccttgataatggtagagttcaggtaacaagagaaattgacgatggagaagaagtaattgaagcttccttaccaatggttattactacagatttgagattgaacactccgcgttacgtaggactgcccaaactaatgaaggcgaagaaaaagcctattgaaaaattggatatagcaaaagattttcctgaaattaatattgaacctcagttaaagatagtgtcgatggaagagccaaagactaagtcacctggtgtgaaattgaattctgtggatgaattgattgaaaagttaaaagaagttaaggccatttaa

SEQ ID NO: 4552 - DNA, 786 bp, Artificial Sequence
  Description of Artificial Sequence: Synthetic polynucleotide
atgtctgcaaaacagcaattgcgtatattagttccggtgaaaagggtagttgatttccagatcaagcctagagtaaataagaccttaactgggattgaaaccagtggaatcaaattcagtatcaaccctttcgatgatattgctgtcgaagaagccatcagaattaaagaaaagaacaagagtttagtagaatctacgcatgcagtttctattggctccgccaaagctcaggatattttaagaaattgccttgctaagggaatagacacctgtagtttaattgactctgtgggtaaagaaaacatagagcccttagcaattgctaaaatcttaaaagctgttgttgaaaagaagggttctaatttggttttgatgggaaagcaagccattgatgatgactgtaacaacaccggtcagatgttggcaggtttattaaattggccacaggcaacaaatgcggcaaaggtggaattccttgataatggtagagttcaggtaacaagagaaattgacgatggagaagaagtaattgaagcttccttaccaatggttattactacagatttgagattgaacactccgcgttacgtaggattgcccaaattaatgaaggcgaagaaaaagcctattgaaaaattggatatagcaaaagattttcctgaaattaatattgaacctcagttaaagatagtgtccatggaagagccaaagactaagtctcctggtgtgaaattgaattctgtggatgaattgattgaaaagttaaaagaagttaaggccatttga

SEQ ID NO: 4553 - DNA, 930 bp, Saccharomyces cerevisiae
atgtcaaagtttgttatcacctgcatagctcatggagaaaatctcccaaaagaaaccatcgaccagattgcgaaagaaattactgaaagctcggcgaaagatgtatcaatcaatggtaccaagaaactatcggccagagctaccgatatattcattgaagtcgcaggatcgattgttcaaaaagacctcaagaataagctgacgaacgtcattgacagtcataatgatgttgatgttattgtttctgtcgacaatgaatatcgtcaagccaaaaagctctttgtctttgacatggattcaacattaatctaccaagaggtcatcgaattgattgccgcttatgctggtgttgaagaacaagtgcacgagatcacagaaagagccatgaacaatgaacttgatttcaaagagtctttaagagaacgcgttaaattattgcaaggcctccaagtcgatacactatatgatgaaataaaacaaaagctagaggtcaccaagggtgtgccagaactatgcaagttccttcacaaaaaaaattgcaagctcgctgttttaagcggtggttttattcagtttgccggttttatcaaggatcagttaggtttagatttttgtaaggcaaacttgttggaagttgacactgatggaaaattaaccggtaaaacactgggtcctatcgtagacggacagtgcaagagtgaaacccttctgcaactatgtaatgactacaatgttccagttgaagcaagttgtatggtgggtgacggtggtaacgacctgccagccatggctaccgccgggtttgggatcgcatggaacgccaagccaaaggtgcagaaagctgcaccttgtaagttgaataccaagagcatgactgacattttatacattcttggttacaccgatgatgaaatatacaatagacaatga

SEQ ID NO: 4554 - DNA, 930 bp, Artificial Sequence
  Description of Artificial Sequence: Synthetic polynucleotide
atgtccaagtttgttatcacctgcatagctcatggagaaaatctcccaaaagaaaccatcgaccagattgcgaaagaaattactgaaagctctgcgaaagatgtatctatcaatggtaccaagaaattatctgccagagctaccgatatattcattgaagtcgcaggatctattgttcaaaaagacctcaagaataagttgacgaacgtcattgacagtcataatgatgttgatgttattgtttctgtcgacaatgaatatcgtcaagccaaaaagctctttgtctttgacatggattctacattaatctaccaagaggtcatcgaattgattgccgcttatgctggtgttgaagaacaagtgcacgagatcacagaaagagccatgaacaatgaacttgatttcaaagagtctttaagagaacgcgttaaattattgcaaggcctccaagtcgatacattatatgatgaaataaaacaaaagttggaggtcaccaagggtgtgccagaattgtgcaagttccttcacaaaaaaaattgcaagctcgctgttttaagcggtggttttattcagtttgccggttttatcaaggatcagttaggtttagatttttgtaaggcaaacttgttggaagttgacactgatggaaaattaaccggtaaaacattaggtcctatcgtagacggacagtgcaagagtgaaacccttttacaattatgtaatgactacaatgttccagttgaagcaagttgtatggtgggtgacggtggtaacgacttaccagccatggctaccgccgggtttgggatcgcatggaacgccaagccaaaggtgcagaaagctgcaccttgtaagttgaataccaagagcatgactgacattttatacattcttggttacaccgatgatgaaatatacaatagacaatga

SEQ ID NO: 4555 - DNA, 315 bp, Saccharomyces cerevisiae
atggtcactcaattaaaatccgcttctgaatacgacagtgctttagcatctggcgacaagttagtcgttgttgacttttttgccacatggtgtgggccatgtaaaatgattgcaccaatgattgaaaagtttgcagaacaatattctgacgctgctttttacaagttggatgttgatgaagtctcagatgttgctcaaaaagctgaagtttcttccatgcctaccctaatcttctacaagggcggtaaggaggttaccagagtcgtcggtgccaacccagctgctatcaagcaagctattgcttccaacgtatag

SEQ ID NO: 4556 - DNA, 315 bp, Artificial Sequence
  Description of Artificial Sequence: Synthetic polynucleotide
atggtcactcaattaaaatccgcttctgaatacgacagtgctttagcatctggcgacaagttagtcgttgttgacttttttgccacatggtgtgggccatgtaaaatgattgcaccaatgattgaaaagtttgcagaacaatattctgacgctgctttttacaagttggatgttgatgaagtctctgatgttgctcaaaaagctgaagtttcttccatgcctaccttaatcttctacaagggcggtaaggaggttaccagagtcgtcggtgccaacccagctgctatcaagcaagctattgcttccaacgtatga

SEQ ID NO: 4557 - DNA, 1236 bp, Saccharomyces cerevisiae
atgcccagggatccattgattggtattgtgggtaagccatcttcagggaaatccaccacattaaattctttgacggacgcaggtgcggcggtaggagcatttccctttaccacgatcgagccaaatcaggcaaccggctacttgcaagttgagtgtgcttgctccagatttggcaaggaagatctttgtaaacctaactacgggtggtgtagcaagggtaagaggcatatccccatcaaactgttggatgtggcagggcttgtgcctggagcgcattccggcagagggcttggaaataaattcttggatgatttaagacacgcagatgctcttattcatgtggtggacgttagtggaaccacagatgcagaggggaagaacacaagaggatatgatccattgaacgatatagaatggctgcaagacgaaatcaggctttgggttgaggggaacctgaagaaaagatgggggtctattgtgcgtaaacatacagcaacgaaatctagcatagtggacacacttcaagcgcaattcggtgggtacggttcacatgcgcccatgatccaaaaagccctggacaggttgaagggactaccacctttggaaaaatgggatgacgaatggatcactcgagtggtcaagtcctttatgatggagaaatttccaactgtgttggcactcaacaagattgaccaccctgacgccgataaaaatgtttctaaaatcatgctaaagtatcctgacaccaaagctgtactgaccagtgcagtgacggaagtttttttgaggaaattgaaaaagcaaggttttatattatacgaggagggcacggaatttgttgacacatttgaggacgagccagacaaactaaagccactggacgacaagatccttaacagaattgaaaatatcagagatttggtcctgtatagattcggatctacgggtgttgttcaggttctgcaagcagcaacggacatccttggtctaataccggtgtacactgtgaagaacatccagacttttacgggtggcaacggaaccaacgtatttagagattgttttttggtcaagcgaggaacccctgttggcaaagttgccaggtatatcatgggtggcgaggtcaccattgcaagcattgaaaccgttggcggcgtgagagtcagtgaagaaagtcttgttgagcccggtaagaatgacatactcggcttcaagatcgctccaagatcagcataa

SEQ ID NO: 4558 - DNA, 1236 bp, Artificial Sequence
  Description of Artificial Sequence: Synthetic polynucleotide
atgcccagggatccattgattggtattgtgggtaagccatcttctgggaaatccaccacattaaattctttgacggacgcaggtgcggcggtaggagcatttccctttaccacgatcgagccaaatcaggcaaccggctacttgcaagttgagtgtgcttgctccagatttggcaaggaagatctttgtaaacctaactacgggtggtgtagcaagggtaagaggcatatccccatcaaacttttggatgtggcagggcttgtgcctggagcgcattccggcagagggcttggaaataaattcttggatgatttaagacacgcagatgctcttattcatgtggtggacgttagtggaaccacagatgcagaggggaagaacacaagaggatatgatccattgaacgatatagaatggttacaagacgaaatcaggctttgggttgaggggaacttgaagaaaagatgggggtctattgtgcgtaaacatacagcaacgaaatctagcatagtggacacacttcaagcgcaattcggtgggtacggttctcatgcgcccatgatccaaaaagccttggacaggttgaagggattaccacctttggaaaaatgggatgacgaatggatcactagagtggtcaagtcctttatgatggagaaatttccaactgtgttggcactcaacaagattgaccaccctgacgccgataaaaatgtttctaaaatcatgttgaagtatcctgacaccaaagctgtattaaccagtgcagtgacggaagtttttttgaggaaattgaaaaagcaaggttttatattatacgaggagggcacggaatttgttgacacatttgaggacgagccagacaaattgaagccattggacgacaagatccttaacagaattgaaaatatcagagatttggtcctttatagattcggatctacgggtgttgttcaggttttgcaagcagcaacggacatccttggtttgataccggtgtacactgtgaagaacatccagacttttacgggtggcaacggaaccaacgtatttagagattgttttttggtcaagagaggaacccctgttggcaaagttgccaggtatatcatgggtggcgaggtcaccattgcaagcattgaaaccgttggcggcgtgagagtcagtgaagaaagtcttgttgagcccggtaagaatgacatactcggcttcaagatcgctccaagaagtgcatga

SEQ ID NO: 4559 - DNA, 1461 bp, Saccharomyces cerevisiae
atgagcgaacaaaaggaagatttgtttaaaccagtaggagaagctgctgcagaggtcgaagatgaaagcatagccgaacagaacaaagctaatgacggcgtcaagttaaccggcgcacaggacgccatgggccatccagtgcaagagatagagtctctttgtatgaattgtggaaagaacggtacaaccagacttcttctgacttccatcccttatttcagagaaataattattatgtcattcgactgtcctcactgtgggtttaagaactgtgagatccaacccgcttctcaaattcaagagaagggctctcgttacgttttgaaagtggagtgccgtgaagattttaacaggcaagttattaagtcagaaactgccacttgtaagtttgtcgagctagacattgagattcctgctaagagaggtcaattgacgacagttgaaggtttgttatccgagatgatcgacgatctgtcgcaagaccaggaaatgagaaaatctatagacgaagctctttacaagaagatcgatgacttcatacagaaagttaaatcctacatcaattgtgaacccaacactattccgattacatttattttggatgatcctgcgggaaattcctggatcgaatacaaacccggtgaacctcaacacaaatggtctcatacccagtacgtgagaaccgacgaacaaaacgttcaagttggcattattactagagaccagttggagcaacgtcgccaagaacaattaaaacaattggccaaccgtgaaagaaatccttctgaatctgtcaaagttggctcagcaaacccacagtttttgtcagacgccaccgacatcgaaaactttaacaacgaggtgcaaacattcagagcttcttgtccatcgtgtacccaagagtgtgaaactcatatgaagccagtaaatatcccacactttaaagaagtcattatcatgtcgacggtctgcgatcattgtggttataagtctaatgaggtgaagaccggtggtgccatccctgacaaaggaagaaggattactttatactgtgacgatgcagctgacttgtcccgtgatattttgaaatctgagacctgtagtatggtaattcctgaattacatcttgatattcaagaaggtacattgggtggtagattcaccactttggaaggtttactaagacaagtctacgaagaactagaatcccgtattttcactcaaacttcggattccatggacgaagcaacgaaagcccgctgggtagaattttttgccaagctaaaggaggccatcgctgggaaagtcaagttcacagtcattatggaagatccattggccgggtcgtacatacaaaatgtctacgccccagatccggatccaaacatgactatcgaagattatgaaagaactaaagagcaaaatgaagacctgggattgtccgatatcaaggttgagtaa

SEQ ID NO: 4560 - DNA, 1461 bp, Artificial Sequence
  Description of Artificial Sequence: Synthetic polynucleotide
atgagcgaacaaaaggaagatttgtttaaaccagtaggagaagctgctgcagaggtcgaagatgaaagcatagccgaacagaacaaagctaatgacggcgtcaagttaaccggcgcacaggacgccatgggccatccagtgcaagagatagagtctctttgtatgaattgtggaaagaacggtacaaccagacttcttttgacttccatcccttatttcagagaaataattattatgagtttcgactgtcctcactgtgggtttaagaactgtgagatccaacccgcttctcaaattcaagagaagggctctcgttacgttttgaaagtggagtgccgtgaagattttaacaggcaagttattaagtctgaaactgccacttgtaagtttgtcgagttggacattgagattcctgctaagagaggtcaattgacgacagttgaaggtttgttatccgagatgatcgacgatttatctcaagaccaggaaatgagaaaatctatagacgaagctctttacaagaagatcgatgacttcatacagaaagttaaatcctacatcaattgtgaacccaacactattccgattacatttattttggatgatcctgcgggaaattcctggatcgaatacaaacccggtgaacctcaacacaaatggtctcatacccagtacgtgagaaccgacgaacaaaacgttcaagttggcattattactagagaccagttggagcaacgtcgccaagaacaattaaaacaattggccaaccgtgaaagaaatccttctgaatctgtcaaagttggcagtgcaaacccacagtttttgagtgacgccaccgacatcgaaaactttaacaacgaggtgcaaacattcagagcttcttgtccaagttgtacccaagagtgtgaaactcatatgaagccagtaaatatcccacactttaaagaagtcattatcatgtctacggtctgcgatcattgtggttataagtctaatgaggtgaagaccggtggtgccatccctgacaaaggaagaaggattactttatactgtgacgatgcagctgacttgtcccgtgatattttgaaatctgagacctgtagtatggtaattcctgaattacatcttgatattcaagaaggtacattgggtggtagattcaccactttggaaggtttattaagacaagtctacgaagaattggaatcccgtattttcactcaaacttctgattccatggacgaagcaacgaaagcccgctgggtagaattttttgccaagttgaaggaggccatcgctgggaaagtcaagttcacagtcattatggaagatccattggccgggtcttacatacaaaatgtctacgccccagatccggatccaaacatgactatcgaagattatgaaagaactaaagagcaaaatgaagacttgggattgtccgatatcaaggttgagtga

SEQ ID NO: 4561 - DNA, 1407 bp, Saccharomyces cerevisiae
atgaatcttaaactttctgctattgaaagttactttttccatagaagcagactaaatttgcattcatgtttttatgtcggaatcaaactcaacgaattgcccaaaaaaagtcaactgatagcggctcttaagtatactgtaatccaacatgaacgtttgacttgtaatgtattctatgatgaattgaaaaaggaaaacttcctacaaaacattcttgagccactgaaattttgcgatctagtagaataccgccacgattgggaccagttaggggaaaccgaaattaaccacatctttcaaaggtataacttttcatacaacgagaataaacctttatggaaaattctgatcctccctaatcaaaatcaaatgctattgctgacagatcatgttctcatggatgggatgtccgctattcatgtgtgggaaacgtttatggaaggcctacagatgcaacagccggttgaaattgatgaaacaatatattcaccatcattaaattcatcaactgaaaaaataatgtcagccccactatacggagattggcccataccttggaattggcatatagtgcgacaattggtcagtagactacattattggtttccacaaacagtcgtaaaaaacaatagaaatttaatccaatttgccaactactcatttccaaaagacctgctggatgataaaccgagcgatggaactcaaaaatacaaagttaaaaacacgaaccatcaatgggagtttcgattatcgccgacccatctcaacgacattttacaagaatgcaaggccaataatacttcgttgacttcccttttaggtgccctggtctgcaccagtttcgaaaaaatagctgcacatgagtataccggatcatttttgaaaattgaattaccaatgaatattagaaagccttttgaacgagtcttgaaattaccttcagatgataagctcgccgtgggaaattttattgcggtcatagaattcaaccataaactacatcaaaaccgtggaatatgggatatcgcttctcaaattcaaagggccataagaagcagttccgaggataaaataatagataaagtaaacgaagtaaagttattggaggttatttcttctcaacaatacatagaagataaaattagcttgaataacggaccttcttccacatttgaagtaacaaacttaggatttcaaacatttaaagatgcatgcaacaccagtttaccgttttatatagtggatgctacattcaacgagccgcaaggaatatcttcaattttctcactaagcgtaatctctactcctggtaacggactacattgttgtatcagttatccaaatactctcactaaagtgctagaaccccactggcaatatatgaaagattacttaaatttatactag

SEQ ID NO: 4562 - DNA, 1407 bp, Artificial Sequence
  Description of Artificial Sequence: Synthetic polynucleotide
atgaatcttaaactttctgctattgaaagttactttttccatagaagcagattgaatttgcattcttgtttttatgtcggaatcaaactcaacgaattgcccaaaaaaagtcaattgatagcggctcttaagtatactgtaatccaacatgaacgtttgacttgtaatgtattctatgatgaattgaaaaaggaaaacttcttacaaaacattcttgagccattgaaattttgcgatttagtagaataccgccacgattgggaccagttaggggaaaccgaaattaaccacatctttcaaaggtataacttttcttacaacgagaataaacctttatggaaaattttgatcctccctaatcaaaatcaaatgcttttgttgacagatcatgttctcatggatgggatgtccgctattcatgtgtgggaaacgtttatggaaggcttgcagatgcaacagccggttgaaattgatgaaacaatatattctccatctttaaattcttctactgaaaaaataatgtctgccccattgtacggagattggcccataccttggaattggcatatagtgagacaattggtcagtagattacattattggtttccacaaacagtcgtaaaaaacaatagaaatttaatccaatttgccaactactcttttccaaaagacttattagatgataaaccgagcgatggaactcaaaaatacaaagttaaaaacacgaaccatcaatgggagtttagattatctccgacccatctcaacgacattttacaagaatgcaaggccaataatacttctttgacttcccttttaggtgccttggtctgcaccagtttcgaaaaaatagctgcacatgagtataccggaagttttttgaaaattgaattaccaatgaatattagaaagccttttgaaagagtcttgaaattaccttctgatgataagctcgccgtgggaaattttattgcggtcatagaattcaaccataaattgcatcaaaaccgtggaatatgggatatcgcttctcaaattcaaagggccataagaagcagttccgaggataaaataatagataaagtaaacgaagtaaagttattggaggttatttcttctcaacaatacatagaagataaaattagcttgaataacggaccttcttccacatttgaagtaacaaacttaggatttcaaacatttaaagatgcatgcaacaccagtttaccgttttatatagtggatgctacattcaacgagccgcaaggaatatcttccattttctctttaagcgtaatctctactcctggtaacggattgcattgttgtatcagttatccaaatactctcactaaagtgttggaaccccactggcaatatatgaaagattacttaaatttatactga

SEQ ID NO: 4563 - DNA, 954 bp, Saccharomyces cerevisiae
atggcaaaagacggcttcgagttatatagatacactccggaattaggtgcgagtatactttttacggtactttttgcagtatcaggggtagcatttgtaattttactattccattattctgtgaaaagtaaaaggagagttggctctcttatgaagtcccaacccgtattgcggtattacggtacggtaaacttagcaggagcgtacattccctttatatttgggtgttttgttgagtgtgtgggctttgcgtttagatgtaaatcaagcaaagacaccacactactaaacccctatattattcaaacggttttcttgctggtgtctccaacattatatgctgccagtatttacatgatttttggtagaatggctactctgctgttcgcagaaaacttaatgatcatgcccgctagattcaatactacaatatttgtgattggcgatgtaggcagtcttctattacaagcaattggtggtgctatgatgtctaaagtgacaagtgcatcttctggttctcatctcgttacagctggtttgttcattcaaattgctttttttggtctcttcattataaatgaggttttgttcattttcaagatgagcaaaaaaccaaccaatgtatcggtaaggtatggtagttggaaatacctaaacattgctttattggtgaacagtttcctgattttaattaggtcgatcgtcagagctgttgaatttattcagggttatgacggagaaattgcctcgcacgagtggtatctttatatttttgatggtttaccaatgtttttactcgtattaatttttattgtggcgttcccactaattaacatttttagaatacatgaagagtctattcaagcgcaacaatcagcaagatttgacggcaccgactatcctgacgttgaggtgacgtctatcgaagaagatctcgcttcaaagagcgaataa

SEQ ID NO: 4564 - DNA, 954 bp, Artificial Sequence
  Description of Artificial Sequence: Synthetic polynucleotide
atggcaaaagacggcttcgagttatatagatacactccggaattaggtgcgagtatactttttacggtactttttgcagtaagtggggtagcatttgtaattttattattccattattctgtgaaaagtaaaaggagagttggctctcttatgaagtcccaacccgtattgagatattacggtacggtaaacttagcaggagcgtacattccctttatatttgggtgttttgttgagtgtgtgggctttgcgtttagatgtaaaagtagcaaagacaccacattgttgaacccctatattattcaaacggttttcttgttggtgtctccaacattatatgctgccagtatttacatgatttttggtagaatggctactttattattcgcagaaaacttaatgatcatgcccgctagattcaatactacaatatttgtgattggcgatgtaggcagtcttttattacaagcaattggtggtgctatgatgtctaaagtgacaagtgcatcttctggttctcatctcgttacagctggtttgttcattcaaattgctttttttggtctcttcattataaatgaggttttgttcattttcaagatgagcaaaaaaccaaccaatgtatctgtaaggtatggtagttggaaatacttgaacattgctttattggtgaacagtttcttgattttaattaggtctatcgtcagagctgttgaatttattcagggttatgacggagaaattgcctctcacgagtggtatctttatatttttgatggtttaccaatgtttttactcgtattaatttttattgtggcgttcccattgattaacatttttagaatacatgaagagtctattcaagcgcaacaaagtgcaagatttgacggcaccgactatcctgacgttgaggtgacgtctatcgaagaagatctcgcttccaagagcgaatga

SEQ ID NO: 4565 - DNA, 759 bp, Saccharomyces cerevisiae
atgtccttaccagctacttttgacttgactccagaagatgcccaacttttgttggctgctaacactcacttaggtgctagaaacgttcaagttcaccaagaaccatatgttttcaacgcaagaccagatggtgtccacgttatcaacgttggtaagacctgggaaaaattggttttggctgccagaatcatcgctgccattccaaacccagaagacgttgttgccatctcttccagaactttcggtcaaagggctgttttgaagttcgctgcccacaccggtgctaccccaatcgccggtagattcactccaggttctttcaccaattatatcacccgttctttcaaggaaccaagattagttattgtcaccgacccaagatcagatgctcaagccatcaaggaagcttcttacgttaacatccctgtcattgctctaactgatcttgactctccatcagaattcgtcgatgtcgctatcccatgtaacaacagaggtaagcactccattggtttaatctggtacttattggctagagaagttttgagactaagaggtgctttagttgacagaactcaaccatggtccatcatgccagatttgtacttctacagagaccctgaagaagttgaacaacaagttgctgaagaagctaccaccgaagaagctggtgaagaagaagccaaggaagaggttaccgaagagcaagctgaagctactgaatgggctgaagaaaatgctgacaacgtcgagtggtaa

SEQ ID NO: 4566 - DNA, 759 bp, Artificial Sequence
  Description of Artificial Sequence: Synthetic polynucleotide
atgtccttaccagctacttttgacttgactccagaagatgcccaacttttgttggctgctaacactcacttaggtgctagaaacgttcaagttcaccaagaaccatatgttttcaacgcaagaccagatggtgtccacgttatcaacgttggtaagacctgggaaaaattggttttggctgccagaatcatcgctgccattccaaacccagaagacgttgttgccatctcttccagaactttcggtcaaagggctgttttgaagttcgctgcccacaccggtgctaccccaatcgccggtagattcactccaggttctttcaccaattatatcacccgttctttcaaggaaccaagattagttattgtcaccgacccaagaagtgatgctcaagccatcaaggaagcttcttacgttaacatccctgtcattgctttgactgatcttgactctccatctgaattcgtcgatgtcgctatcccatgtaacaacagaggtaagcactccattggtttaatctggtacttattggctagagaagttttgagattgagaggtgctttagttgacagaactcaaccatggtccatcatgccagatttgtacttctacagagaccctgaagaagttgaacaacaagttgctgaagaagctaccaccgaagaagctggtgaagaagaagccaaggaagaggttaccgaagagcaagctgaagctactgaatgggctgaagaaaatgctgacaacgtcgagtggtga

SEQ ID NO: 4567 - DNA, 333 bp, Saccharomyces cerevisiae
atgaacgtaccaaaggcgagactcctaaaagtagcagagttatctgcgaagatatttgatcaaaatttcaacccatcaggtataagaaccggttctaagattctaaatgagcgattaaagggcccttctgtggcaagctactacggcaatccggatatcctgaagttcagacatttgaaaacattatatcctgatattgaatttgtagaccttgaggagcaatatcgattatctatggtagaagcaaagaaacgtcgtggtaaaggtgctcctaagaagatgaagaaggatgcagctgcaactgcaaaggggaaggggaagaaaaaaaaatga

SEQ ID NO: 4568 - DNA, 333 bp, Artificial Sequence
  Description of Artificial Sequence: Synthetic polynucleotide
atgaacgtaccaaaggcgagactcttgaaagtagcagagttatctgcgaagatatttgatcaaaatttcaacccatctggtataagaaccggttctaagattttgaatgagagattaaagggcccttctgtggcaagctactacggcaatccggatatcttgaagttcagacatttgaaaacattatatcctgatattgaatttgtagaccttgaggagcaatatagattatctatggtagaagcaaagaaacgtcgtggtaaaggtgctcctaagaagatgaagaaggatgcagctgcaactgcaaaggggaaggggaagaaaaaaaaatga

SEQ ID NO: 4569 - DNA, 1830 bp, Saccharomyces cerevisiae
atgccaaattacattttctggccatacgaatccttgttcgagaattccgcagctcaaggacctcaggtagctttggcaatttcatttgagaagacgcattttgttgtcttaggtgtttgcgaacctcagtatttagaagaagtaagcatacggcccccttattcagtggtagctactaagaacaatggagcggagggttggaactacaaagttgctgatccctgtaatgtccattttagaatacccaagctgaaatttatgcaattctattcttctgatcccatctcgctcatcataccagaaaaagaagttggtcttcatagtagtgtgggtgaaactctgaactattctaaattagagcaacatccaagatacaagagagataataagaaattgagtgaaactttgaacatcattaatctattccccgcatattgtaaagcattaaatgagctttacccgtttattcaaacatcacaggaaaatttgaggggtactatgcttaatagtgtcgcagcttggtgttcatctacttgtatttataaaatggtcgcaaaaattggtttttatttgacttttgtgatctgctctattgctagtctcgtatcctcgttattaaattattcgcactttcagttggtaaattactcggcatttgtccagcaaatcgatcttcgttgtcaacaaatttgctatttcccagtacagtatgagcgtattaataagaaggataacatacagaatgttggctctatggtggaaaaagataattctaatagtcaattctcacattcatatatgccttctaaattctatcccgattatattttattgtataatacaatttggcttattattaatgacatttcatttggtttaatattgggggccatacttattgagaatcgagatttcttggtgtcggcatcccatagagtattgaagttttttttatatgattcattaaaaacaataactgaaacgttagcaaataacccccttggcatcaaattaaatgcagaacttgcgaactttttgagcgaattatttctttgggtgatagaattttcttataccacattcataaaaagactcattgatccgaaaaccctatcatctttgctcacgttaacgatatatatgatgtttctcgttggcttttcttttgctgtttccctagcgattgatttttttgcaattttaagttttccaatatatgttttttatcgtatcagcagtaaactgtaccattgtcagttgaatattatggctagtctttttaacctgttctgcggtaaaaagaggaacgttttacgaaataggattgaccataactattttcaactagatcaattgctattgggaacattattatttattattctagtgttcttgactcccacagtgatggcattctatatgtcatacacagttttgagaatgctaacaataactatcgaaatattctcggaagctgtcattgcactcattaaccattttccattgttcgcattattacttaggttaaaagatcctaaacgtctacccggtggcatttcaattgagctcaaaaccacggtttctaacaagcatacaaccttagaacttcaaaacaatcctattaaattcaagagtatgttcagaccatacaatctattgttgtcgcaaatgaggacaaattatttctcgtttgctactgtacgaaagattgtccgaggggagtctataatggtcaatagaaataagctgtactatgttctttattcttcactgcctagtaagccattgagtgtaaaggatttatacaaaaggctgactattcaggcataa

SEQ ID NO: 4570 - DNA, 1830 bp, Artificial Sequence
  Description of Artificial Sequence: Synthetic polynucleotide
atgccaaattacattttctggccatacgaatccttgttcgagaattccgcagctcaaggacctcaggtagctttggcaatttcctttgagaagacgcattttgttgtcttaggtgtttgcgaacctcagtatttagaagaagtaagcataaggcccccttattctgtggtagctactaagaacaatggagcggagggttggaactacaaagttgctgatccctgtaatgtccattttagaatacccaagttgaaatttatgcaattctattcttctgatcccatctctctcatcataccagaaaaagaagttggtcttcatagtagtgtgggtgaaactttgaactattctaaattagagcaacatccaagatacaagagagataataagaaattgagtgaaactttgaacatcattaatttattccccgcatattgtaaagcattaaatgagctttacccgtttattcaaacatctcaggaaaatttgaggggtactatgcttaatagtgtcgcagcttggtgttcttctacttgtatttataaaatggtcgcaaaaattggtttttatttgacttttgtgatctgctctattgctagtctcgtatcctctttattaaattattctcactttcagttggtaaattacagtgcatttgtccagcaaatcgatcttcgttgtcaacaaatttgctatttcccagtacagtatgagcgtattaataagaaggataacatacagaatgttggctctatggtggaaaaagataattctaatagtcaattctctcattcttatatgccttctaaattctatcccgattatattttattgtataatacaatttggcttattattaatgacatttcctttggtttaatattgggggccatacttattgagaatagagatttcttggtgagcgcatcccatagagtattgaagttttttttatatgattctttaaaaacaataactgaaacgttagcaaataacccccttggcatcaaattaaatgcagaacttgcgaactttttgagcgaattatttctttgggtgatagaattttcttataccacattcataaaaagactcattgatccgaaaaccttatcttctttgctcacgttaacgatatatatgatgtttctcgttggcttttcttttgctgtttccttagcgattgatttttttgcaattttaagttttccaatatatgttttttatcgtatcagcagtaaactttaccattgtcagttgaatattatggctagtctttttaacttgttctgcggtaaaaagaggaacgttttaagaaataggattgaccataactattttcaattggatcaattgttgttgggaacattattatttattattttggtgttcttgactcccacagtgatggcattctatatgagttacacagttttgagaatgttaacaataactatcgaaatattctctgaagctgtcattgcactcattaaccattttccattgttcgcattattacttaggttaaaagatcctaaacgtttacccggtggcatttccattgagctcaaaaccacggtttctaacaagcatacaaccttagaacttcaaaacaatcctattaaattcaagagtatgttcagaccatacaatttattgttgtctcaaatgaggacaaattatttctcctttgctactgtaagaaagattgtccgcggggagtctataatggtcaatagaaataagttgtactatgttctttattcttctttgcctagtaagccattgagtgtaaaggatttatacaaaaggttaactattcaggcatga

SEQ ID NO: 4571 - DNA, 6120 bp, Saccharomyces cerevisiae
atgcaggggagaaaaaggacgcttacggaaccatttgagccaaataccaatccatttggggacaatgcagcagtaatgacggaaaatgttgaggataacagcgaaacagatggtaaccgtctagaatcaaaaccacaagctttggtcccaccagctttaaatatcgtgccaccagagagcagcatccacagtactgaagaaaaaaaaggtgacgagtacaatggaaatgataaagatagctccttaatctccaacatatttcgtactcgtgtcggaaggagtagtcatgaaaacttgagcaggcctaaactctcacttaaaacagcatcatttggtgccgctgaatcttcccggcgtaatgtttcaccctctacaaaatctgccaagtctagttcgcagtatattgatttaaatgatgaaaggctacgcaggcgtagcttcagtagttatagccgatcatctagtaggcgtgtttctaattcaccaagctcaacggataggcctccacggtcggcaaaggttttatcgctaattgccgctgatgatatggatgattttgaagatttgcaaaagggatttaaaagtgcaatagacgaagagggcctgacatggctaccccaattaaaatcagaaaaaagccgtcctgtatcagacgttggagaagatagaggagaaggagaacaagaatctatacctgacgttcatacacccaatgtaggagcaagcgctactccaggatcaattcatctaacacccgaacccgcgcagaatggttcggtatctgagggtctagaaggctctattaataattcaagaaagaaacccagtccaaagttttttcatcatttatcaccgcaaaaagaagataaagaccaaacagaagttattgagtatgctgaagacattctagattttgaaacccttcaaagaaaactggaatcaaggccctttgtgctttatggacattctcttggggttttctcgcctacgaatccgctaagaataaaaattgctcgttttttgttgcataggcggtattcgttactttacaacactttgttaacattttatgccattctcctggcgataaggacatataaccctcacaatgtggtttttttataccgtttctctaactggaccgactatttcatttttattttatcagcttgctttacaggcaatgatattgctaaaataattgcgtttggattttgggacgattctgaaatgtttaaagcctatggacgtgagtataaatcaatcttacagagatctggaattatgaaactatacatatatctgagagaaaagtatggtagaaagctaatagatttcattattccatttaggatcatatcgccgggagaagagacaaaatatcaacgaagttcgttgagtacttccctgacgaaaccttatggggcaaaggaaaatcagaggccttttggcaccccaagagcctttgcgagatcatcgtggaatagaatagatctggtatcttctgtcagtttttggctaggtatgtttttatccataaaaagttatgatacaaaaacaggcataagaatattcaagccccttgctatattaaggattcttcgacttgtaaacgtggatactggtatgccctcaattctaaggggattgaaatatggtatcccacagttggtaaatgttagttcaatgctagtttacttttggattttctttgggattttgggagtacagatttttcagggctcttttcgaagacaatgtgtatggtttaaccctgaagatcctaccgatacttaccagtacgatatgcaattctgtggtggttacctagatccagtaacaaaacgaaaacaaaattatatctatgaagacggatcagaaggttctgtttcaaaaggctttctttgcccacaatattcgaaatgtgtttccaatgccaacccctacaacggcagaattagttttgataatattgttaattccatggagctcgtttttgtcattatgagtgcgaatacttttactgacttaatgtactatacgatggattcggatgaaatggctgcctgtttgttttttattgtttgcatctttgttttaactatctggctgctaaatctactcattgcagtgttggtatcatcttttgaaatagccaatgaggagtacaaaaagaaaaagttcatatatggttctagaaagacaggttatgttgctcgcatagtaacaggctactggaaatattttaagcttaaggcgaatcagacaaaattcccaaattggtcccaaaaaggactagctatttattcccacgttgagtttatctttgtcatacttattatttgcgatataggtatgcgcgcctctgttaaagtatcgacttcggcaaactgtaacaatatccttctaaaaactgacaggggaatttcgattgttctcttcatcgaatcactggcaaggttagtattatatctgcccaatatgtggaagtttttaacaaaacctagttacgtttacgattttattatatcaattattactctggttattagttgcctggctgttgaaggggttctaggacatatgtatgcctggctatccatattccacatatccagattttacagggtgattatttctttcaatttaacaaaaaaactatggaaacaaatattgagtaatggtgttatgatttggaacttatcgtctttttacttttttttcacctttttggttgctataatcatggctgtgtatttcgaaggcgtgattcctccagaagaaatggcagaccagccatttggaatgtattcactaccgaattcatttctttctttgtttataataggttcaactgaaaattggacggatatcctatatgccctccaaaaacactcaccaaacatctcctcaacttttttttgctcagtattttttattatatggtttctactatccaactcagtgatcttgaacattttcattgccctaatatcagaaagcatggaagtgaaagaagaagaaaaacgaccacagcaaattaagcattatcttaagttcgtctatcctcagaaaatacaagaatatacacacgctagtttggttgcgagaattcgtaaaaaattctttggaggtcataggaacgaagatacaagagattttaagcaatttcttatgagaggaaccgcgataatgaacatagcgcagaatatgggggagttggccgatgaattcaaagagccaccttcagaaaacctatttaaaaagggcttatcaaagctcacaattggggttccgtcactaaaaaggctgagaatgtttgctaataatccattttataaaaatagtgacgttgtgtttacagaaacgaacgatataaatgggaggacgtatatcttggagttgaatgagtacgaggatgagaagctagattatttaaaaaagtaccctttattcaattactcatattatttcttttctcctcagcatagatttcgaaggttctgtcaacgcttggtaccaccaagcactggaaaaaggactgatggatcacgatttttcgaggatagcactgatctatacaataaaaggagctattttcatcatattgaaagagatgtatttgtattcattttcgcacttgccaccattttactaattgtttgctcatgttatgttacgcctctatatcgtatgcatcacaagatgggaacttggaattggtcctcggcgttagattgcgccttcattggtgccttctcaattgaatttatcgtgaaaacagtagctgacggatttatatattctccaaatgcttacctgaggaatccatggaactttattgatttttgtgtcctaatctcaatgtggattaatttaattgcatacctaaaaaacaatggaaatttgtctaggattttcaagggattgacagccctgagggccctcagatgcctcacgatcagtaacacagctcgtcaaacatttaacctagttatgtttgatggtttaaataaaatttttgaagctgggttgatttcactcagtttgctatttccatttacagtttggggcttaagcatttttaaaggccgtttaggtacttgcaatgacggaagtttgggccgtgcagattgttacaatgaatattcaaattccgtttttcaatgggatatcatgtctccaagggtttaccagcaaccatatcttcatttggactctttcgcaagcgcttttagttcattataccaaatcatttctttggaaggatgggttgatttgttggaaaatatgatgaatagttcaggaataggtacacccgctacggtaatgggttcagcagggaatgctttattcctcgttctgtttaattttttaagtatggttttcatcctgaacttgtttgtttcattcattgttaacaaccaagcaaggacaacaggaagcgcttactttaccattgaggaaaaggcgtggctggaatcccagaaacttttatctcaggccaagccaaaagctatcccaaatttaattgagttatcaagagttaggcaatttttctatcaacttgcagtggagaaaaaaaatttctactacgcatcgtttcttcaggtagtactttatttgcacataatcatgctcctgagtcgaagctacaatccaggaaacttgataggttatcaaggtgtttattttatgttttccactagtgtttttttaattcaagaggcacttcacatgtgcggtgaaggaccaagattatattttaggcaaaaatggaacagcatacgactcagtatcataattatagcctttattatgaacgctgtagcattccacgttccagcctctcactattggttccacaatataaaggggtttttcctgttagtgatatttttgtttattattcctcaaaatgacacactaactgaactattagaaaccgcaatggcaagcttaccgcctattctatcattgacctacacttggggggttttatttttagtatatgctattgctttgaatcaaatcttcggcctaacaaggttagggagtaatacgaccgataacataaattttagaactgtaatcaaatccatgattgttctgtttagatgtagttttggtgagggctggaattatatcatggccgacctaactgtgtcagaaccttattgctcctctgatgataattcaacctatacggactgtggatcagagacatatgcctatttgttattaatgtcgtggaatattatttccatgtatatttttgtgaatatgtttgtttcgttgattattggtaatttcagttatgtttaccgtagcggtggatctcgctctggcatcaacagatcggagataaaaaaatacattgaagcttggtccaaatttgatactgatggaactggcgagcttgagctgtcctacctcccaagaataatgcattcatttgacggtcctctttcatttaaaatttgggaaggtagattgacaataaaaagtctagtcgagaactacatggaggttaacccagatgatccatatgacgtcaaaatagacctgatcggactgaacaaagagctgaatacgattgataaagcaaagatcatacagaggaagttacagtacagaagatttgtacaaagcattcactatacgaatgcttataatggatgtatcagattctcggatttgttattacaaatacctctctatacagcttattctgcaagggaatgtctaggtattgatcaatatgtccatcatctatatatcctgggtaaagtggacaagtacttagaaaatcaaagaaacttcgatgtattggagatggtggtaacaagatggaaatttcattgcaggatgaaacgtaccattgaacccgaatgggatgttaaagatcccacagtatcgtctcacatttcgaatataaacgtaaatctggaacctgctccaggaattttagaaagagaacctattgcgacacctagaatggactacggtgttaacaattttatgtggtctccgagaatgaatcaagactctacgatggagcccccggaagaaccaatagataataatgacgatagcgcaaatgatctaattgatagataa

SEQ ID NO: 4572 - DNA, 6120 bp, Artificial Sequence
  Description of Artificial Sequence: Synthetic polynucleotide
atgcaggggagaaaaaggacgcttacggaaccatttgagccaaataccaatccatttggggacaatgcagcagtaatgacggaaaatgttgaggataacagcgaaacagatggtaaccgtttagaaagtaaaccacaagctttggtcccaccagctttaaatatcgtgccaccagagagcagcatccacagtactgaagaaaaaaaaggtgacgagtacaatggaaatgataaagatagctccttaatctccaacatatttcgtactcgtgtcggaaggagtagtcatgaaaacttgagcaggcctaaactctcccttaaaacagcaagttttggtgccgctgaatcttcccgtcgtaatgtttctccctctacaaaatctgccaagtctagttctcagtatattgatttaaatgatgaaaggttacgcaggcgtagcttcagtagttatagcagatcttctagtaggcgtgtttctaattctccaagctctacggataggcctccaagaagtgcaaaggttttaagtttgattgccgctgatgatatggatgattttgaagatttgcaaaagggatttaaaagtgcaatagacgaagagggcttaacatggttgccccaattaaaaagtgaaaaaagccgtcctgtaagtgacgttggagaagatagaggagaaggagaacaagaatctatacctgacgttcatacacccaatgtaggagcaagcgctactccaggatctattcatttaacacccgaacccgcgcagaatggttctgtatctgagggtttggaaggctctattaataattctagaaagaaacccagtccaaagttttttcatcatttatctccgcaaaaagaagataaagaccaaacagaagttattgagtatgctgaagacattttagattttgaaacccttcaaagaaaattagaaagtaggccctttgtgctttatggacattctcttggggttttcagtcctacgaatccgttaagaataaaaattgctcgttttttgttgcataggagatattctttactttacaacactttgttaacattttatgccattctccttgcgataaggacatataaccctcacaatgtggtttttttataccgtttctctaactggaccgactatttcatttttattttatctgcttgctttacaggcaatgatattgctaaaataattgcgtttggattttgggacgattctgaaatgtttaaagcctatggacgtgagtataaatctatcttacagagatctggaattatgaaactttacatatatttaagagaaaagtatggtagaaagttaatagatttcattattccatttaggatcatatctccgggagaagagacaaaatatcaaagaagttctttgagtacttccttgacgaaaccttatggggcaaaggaaaatcagaggccttttggcaccccaagagcctttgcgagatcttcttggaatagaatagatttagtatcttctgtcagtttttggttaggtatgtttttatccataaaaagttatgatacaaaaacaggcataagaatattcaagccccttgctatattaaggattcttagacttgtaaacgtggatactggtatgccctctattttaaggggattgaaatatggtatcccacagttggtaaatgttagttctatgcttgtttacttttggattttctttgggattttgggagtacagatttttcagggctcttttagaagacaatgtgtatggtttaaccctgaagatcctaccgatacttaccagtacgatatgcaattctgtggtggttacttggatccagtaacaaaaagaaaacaaaattatatctatgaagacggatctgaaggttctgtttccaaaggctttctttgcccacaatattctaaatgtgtttccaatgccaacccctacaacggcagaattagttttgataatattgttaattccatggagctcgtttttgtcattatgagtgcgaatacttttactgacttaatgtactatacgatggattctgatgaaatggctgcctgtttgttttttattgtttgcatctttgttttaactatctggttgttgaatttactcattgcagtgttggtatcttcttttgaaatagccaatgaggagtacaaaaagaaaaagttcatatatggttctagaaagacaggttatgttgctcgcatagtaacaggctactggaaatattttaagcttaaggcgaatcagacaaaattcccaaattggtcccaaaaaggattggctatttattcccacgttgagtttatctttgtcatacttattatttgcgatataggtatgcgcgcctctgttaaagtatccacttctgcaaactgtaacaatatccttttgaaaactgacaggggaatttccattgttctcttcatcgaatctttggcaaggttagtattatatttacccaatatgtggaagtttttaacaaaacctagttacgtttacgattttattatatctattattactttggttattagttgccttgctgttgaaggggttttaggacatatgtatgcctggttatccatattccacatatccagattttacagggtgattatttctttcaatttaacaaaaaaattatggaaacaaatattgagtaatggtgttatgatttggaacttatcttctttttacttttttttcacctttttggttgctataatcatggctgtgtatttcgaaggcgtgattcctccagaagaaatggcagaccagccatttggaatgtattctttaccgaattcttttctttctttgtttataataggttctactgaaaattggacggatatcttatatgccctccaaaaacactctccaaacatctccagcacttttttttgcagtgtattttttattatatggtttttattatccaactctgtgatcttgaacattttcattgccttaatatctgaaagcatggaagtgaaagaagaagaaaaaaggccacagcaaattaagcattatcttaagttcgtctatcctcagaaaatacaagaatatacacacgctagtttggttgcgagaattcgtaaaaaattctttggaggtcataggaacgaagatacaagagattttaagcaatttcttatgagaggaaccgcgataatgaacatagcgcagaatatgggggagttggccgatgaattcaaagagccaccttctgaaaacttgtttaaaaagggcttatccaagctcacaattggggttccgtctttgaaaaggttaagaatgtttgctaataatccattttataaaaatagtgacgttgtgtttacagaaacgaacgatataaatgggaggacgtatatcttggagttgaatgagtacgaggatgagaagttggattatttaaaaaagtaccctttattcaattactcctattatttcttttctcctcagcatagatttagaaggttctgtcaacgcttggtaccaccaagcactggaaaaaggactgatggatctagatttttcgaggatagcactgatttatacaataaaaggagctattttcatcatattgaaagagatgtatttgtattcattttcgcacttgccaccattttattgattgtttgctcttgttatgttacgcctttatatcgtatgcatcacaagatgggaacttggaattggtcctctgcgttagattgcgccttcattggtgccttctccattgaatttatcgtgaaaacagtagctgacggatttatatattctccaaatgcttacttgaggaatccatggaactttattgatttttgtgtcttgatctctatgtggattaatttaattgcatacttgaaaaacaatggaaatttgtctaggattttcaagggattgacagccttaagggccctcagatgcctcacgatcagtaacacagctcgtcaaacatttaacttggttatgtttgatggtttaaataaaatttttgaagctgggttgatttctctcagtttgttatttccatttacagtttggggcttaagcatttttaaaggccgtttaggtacttgcaatgacggaagtttgggccgtgcagattgttacaatgaatattctaattccgtttttcaatgggatatcatgtctccaagggtttaccagcaaccatatcttcatttggactctttcgcaagcgcttttagttctttataccaaatcatttctttggaaggatgggttgatttgttggaaaatatgatgaatagtagtggaataggtacacccgctacggtaatgggttctgcagggaatgctttattcctcgttttatttaattttttaagtatggttttcatcttgaacttgtttgtttctttcattgttaacaaccaagcaaggacaacaggaagcgcttactttaccattgaggaaaaggcgtggttagaatcccagaaacttttatctcaggccaagccaaaagctatcccaaatttaattgagttatctagagttaggcaatttttctatcaacttgcagtggagaaaaaaaatttctactacgcaagttttcttcaggtagtactttatttgcacataatcatgctcttgagtagaagctacaatccaggaaacttgataggttatcaaggtgtttattttatgttttccactagtgtttttttaattcaagaggcacttcacatgtgcggtgaaggaccaagattatattttaggcaaaaatggaacagcataagactcagtatcataattatagcctttattatgaacgctgtagcattccacgttccagcctctcactattggttccacaatataaaggggtttttcttattagtgatatttttgtttattattcctcaaaatgacacattgactgaattattagaaaccgcaatggcaagcttaccgcctattttatctttgacctacacttggggggttttatttttagtatatgctattgctttgaatcaaatcttcggcttaacaaggttagggagtaatacgaccgataacataaattttagaactgtaatcaaatccatgattgttttatttagatgtagttttggtgagggctggaattatatcatggccgacttgactgtgtctgaaccttattgctcctctgatgataattctacctatacggactgtggatctgagacatatgcctatttgttattaatgtcttggaatattatttccatgtatatttttgtgaatatgtttgtttctttgattattggtaatttcagttatgtttaccgtagcggtggatctcgctctggcatcaacagaagtgagataaaaaaatacattgaagcttggtccaaatttgatactgatggaactggcgagcttgagctttcctacctcccaagaataatgcattcttttgacggtcctctttcttttaaaatttgggaaggtagattgacaataaaaagtttagtcgagaactacatggaggttaacccagatgatccatatgacgtcaaaatagacttgatcggattgaacaaagagttgaatacgattgataaagcaaagatcatacagaggaagttacagtacagaagatttgtacaaagcattcactatacgaatgcttataatggatgtatcagattcagtgatttgttattacaaatacctctctatacagcttattctgcaagggaatgtttaggtattgatcaatatgtccatcatttatatatcttgggtaaagtggacaagtacttagaaaatcaaagaaacttcgatgtattggagatggtggtaacaagatggaaatttcattgcaggatgaaacgtaccattgaacccgaatgggatgttaaagatcccacagtatcttctcacatttctaatataaacgtaaatttggaacctgctccaggaattttagaaagagaacctattgcgacacctagaatggactacggtgttaacaattttatgtggtctccgagaatgaatcaagactctacgatggagcccccggaagaaccaatagataataatgacgatagcgcaaatgatttgattgatagatga

SEQ ID NO: 4573 - DNA, 3255 bp, Saccharomyces cerevisiae
atggaaggaattttggatttttctaacgacttagatatcgctctattagatcaggtggtatctacattctatcaaggttcaggtgttcagcaaaagcaagcccaagagattttgactaaatttcaagataatccagacgcttggcaaaaagctgaccaaattcttcaattctcaactaaccctcaatcaaaatttattgccctttccatccttgataaattaattactagaaaatggaaattgttgccgaatgatcatagaattggaattaggaacttcgttgttggtatgattatctccatgtgccaagacgatgaagtatttaaaacacaaaagaacctgatcaataagtcggacttgactttggtccaaattttaaagcaggaatggcctcagaattggcctgaatttatcccagaactaatcggcagttcaagttcctctgttaatgtttgtgaaaataacatgatcgttttgaaactgctatccgaagaagtcttcgatttctctgcggaacaaatgacacaagctaaagctttacatttgaaaaattccatgtcaaaagaatttgaacagatttttaaattatgttttcaagttttggaacaaggttcttcaagctctctaatagtggcaaccttagaatctttactgagatatttacattggattccttatcgttatatttatgaaaccaatattttggaattattaagcaccaaattcatgacatcgcctgatacaagagccatcacattgaaatgtttgactgaggtttcaaatctaaaaattccacaagataatgatttgataaaaagacaaactgtactttttttccaaaatactctacaacaaattgccacaagtgtgatgcccgtgactgccgatctgaaagccacttatgcaaatgctaacggtaatgatcaatctttcttacaagatttagcaatgtttctaactacatatctcgctcgtaatagggcccttctagagagtgatgaatcgttaagagagttgttgttgaatgcgcaccaatacttaattcaattatccaaaatcgaagaaagagaactatttaagacgacattggattactggcataatttagtagcagatttgttttatgaggttcagcgtttgcctgctaccgaaatgagcccattgatacagttatcagtcggttcacaagctatctcaactggatctggcgccctaaatccggaatatatgaaaagatttccattaaaaaaacatatttacgaagaaatttgttcacagttgagattggtcattattgaaaatatggttagaccagaagaagtccttgtggttgaaaatgatgaaggagaaattgttagagagttcgttaaagaatcagacactatccaattatacaaatcagaaagagaggttcttgtatatttgacccatttgaatgttatcgatacagaagaaatcatgatcagtaaattggcaaggcaaatcgatggttccgaatggtcatggcataatatcaacactttatcttgggctattggttccatatctggtacaatgagcgaagatactgaaaaaaggtttgtagttactgttattaaagatttactagatttaacggtcaagaaaaggggtaaagataataaagctgttgttgcatcggatattatgtacgtcgtgggccaatatcctagatttttgaaggctcactggaattttctaagaacagttattttgaaactttttgaatttatgcatgaaactcatgagggtgttcaggatatggcatgtgacacattcattaagattgttcaaaaatgtaaatatcattttgttattcaacaaccccgtgagtctgagcctttcatccaaacaataattagggatattcaaaagacaactgctgacctacagccgcaacaggtccatacattttacaaggcttgtggtattattatttctgaagaaagaagcgtagcggagagaaatagattattaagtgatttgatgcaactgccaaatatggcttgggacactatagtggaacaatccactgctaacccaacattgttgttagattctgaaactgtcaaaattattgcgaatattataaaaaccaatgtagctgtctgcacctcaatgggagcagatttctatccacagttgggtcacatctattacaatatgcttcagctatacagagctgtttcttcgatgatttctgctcaagttgccgcagaaggtctaattgctacgaagacaccaaaggttcgtggtttgagaaccatcaaaaaagagattctgaagcttgttgagacctatatatccaaggcgagaaatttggatgatgtcgttaaagtgttagttgagccattattgaacgctgtacttgaagactatatgaacaacgttcctgatgcaagggacgccgaagtgctaaattgtatgacaacagtagtagaaaaggttggtcatatgatcccacaaggtgttattttaattttacagagtgtatttgaatgcactttggacatgattaacaaagacttcacagaatatccagagcatcgtgtagaattttacaagttattgaaggtcatcaatgagaaatcatttgctgcatttttggaactacctccggctgcctttaaattgtttgttgacgctatttgttgggcgttcaaacataacaatagagatgtcgaagttaatggtctacagattgcattagacctagtgaaaaacattgaaagaatgggaaatgtcccatttgcaaatgagttccacaagaattattttttcatttttgtcagtgaaacgttttttgttttaaccgattccgaccacaaatccggtttttctaagcaagctttgttactaatgaagttgatttctttggtttatgataacaagatttcggtaccattatatcaagaagctgaggtaccacaaggaacttcaaatcaagtctacttaagccaatatttggctaatatgttaagtaatgcattcccccatttaacatccgaacaaatcgcaagttttctctctgcattaactaaacaatacaaagacttagtggtcttcaaaggcactttgagggactttttggtgcaaatcaaagaagtcggaggtgatccaacagattatttgtttgctgaagataaagagaatgcattaatggaacagaatagactagagagggaaaaagctgccaagattggtgggttattaaaaccttccgaacttgatgattag

SEQ ID NO: 4574 - DNA, 3255 bp, Artificial Sequence
  Description of Artificial Sequence: Synthetic polynucleotide
atggaaggaattttggatttttctaacgacttagatatcgctttattagatcaggtggtatctacattctatcaaggttctggtgttcagcaaaagcaagcccaagagattttgactaaatttcaagataatccagacgcttggcaaaaagctgaccaaattcttcaattctctactaaccctcaaagtaaatttattgccctttccatccttgataaattaattactagaaaatggaaattgttgccgaatgatcatagaattggaattaggaacttcgttgttggtatgattatctccatgtgccaagacgatgaagtatttaaaacacaaaagaacttgatcaataagagtgacttgactttggtccaaattttaaagcaggaatggcctcagaattggcctgaatttatcccagaattgatcggcagtagtagttcctctgttaatgtttgtgaaaataacatgatcgttttgaaattattatccgaagaagtcttcgatttctctgcggaacaaatgacacaagctaaagctttacatttgaaaaattccatgtccaaagaatttgaacagatttttaaattatgttttcaagttttggaacaaggttcttctagctctttgatagtggcaaccttagaatctttattaagatatttacattggattccttatcgttatatttatgaaaccaatattttggaattattaagcaccaaattcatgacatctcctgatacaagagccatcacattgaaatgtttgactgaggtttctaatttgaaaattccacaagataatgatttgataaaaagacaaactgtactttttttccaaaatactttacaacaaattgccacaagtgtgatgcccgtgactgccgatttgaaagccacttatgcaaatgctaacggtaatgatcaatctttcttacaagatttagcaatgtttttaactacatatctcgctcgtaatagggcccttttggagagtgatgaatctttaagagagttgttgttgaatgcgcaccaatacttaattcaattatccaaaatcgaagaaagagaattatttaagacgacattggattactggcataatttagtagcagatttgttttatgaggttcagcgtttgcctgctaccgaaatgagcccattgatacagttaagtgtcggttctcaagctatctctactggatctggcgccttgaatccggaatatatgaaaagatttccattaaaaaaacatatttacgaagaaatttgttctcagttgagattggtcattattgaaaatatggttagaccagaagaagtccttgtggttgaaaatgatgaaggagaaattgttagagagttcgttaaagaaagtgacactatccaattatacaaaagtgaaagagaggttcttgtatatttgacccatttgaatgttatcgatacagaagaaatcatgatcagtaaattggcaaggcaaatcgatggttccgaatggtcctggcataatatcaacactttatcttgggctattggttccatatctggtacaatgagcgaagatactgaaaaaaggtttgtagttactgttattaaagatttattagatttaacggtcaagaaaaggggtaaagataataaagctgttgttgcatctgatattatgtacgtcgtgggccaatatcctagatttttgaaggctcactggaattttttaagaacagttattttgaaactttttgaatttatgcatgaaactcatgagggtgttcaggatatggcatgtgacacattcattaagattgttcaaaaatgtaaatatcattttgttattcaacaaccccgtgagtctgagcctttcatccaaacaataattagggatattcaaaagacaactgctgacttacagccgcaacaggtccatacattttacaaggcttgtggtattattatttctgaagaaagaagcgtagcggagagaaatagattattaagtgatttgatgcaattaccaaatatggcttgggacactatagtggaacaatccactgctaacccaacattgttgttagattctgaaactgtcaaaattattgcgaatattataaaaaccaatgtagctgtctgcacctccatgggagcagatttctatccacagttgggtcacatctattacaatatgcttcagttatacagagctgtttcttctatgatttctgctcaagttgccgcagaaggtttgattgctacgaagacaccaaaggttcgtggtttgagaaccatcaaaaaagagattttgaagcttgttgagacctatatatccaaggcgagaaatttggatgatgtcgttaaagtgttagttgagccattattgaacgctgtacttgaagactatatgaacaacgttcctgatgcaagggacgccgaagtgttgaattgtatgacaacagtagtagaaaaggttggtcatatgatcccacaaggtgttattttaattttacagagtgtatttgaatgcactttggacatgattaacaaagacttcacagaatatccagagcatcgtgtagaattttacaagttattgaaggtcatcaatgagaaaagttttgctgcatttttggaattacctccggctgcctttaaattgtttgttgacgctatttgttgggcgttcaaacataacaatagagatgtcgaagttaatggtttacagattgcattagacttggtgaaaaacattgaaagaatgggaaatgtcccatttgcaaatgagttccacaagaattattttttcatttttgtcagtgaaacgttttttgttttaaccgattccgaccacaaatccggtttttctaagcaagctttgttattgatgaagttgatttctttggtttatgataacaagattagtgtaccattatatcaagaagctgaggtaccacaaggaacttccaatcaagtctacttaagccaatatttggctaatatgttaagtaatgcattcccccatttaacatccgaacaaatcgcaagttttctctctgcattaactaaacaatacaaagacttagtggtcttcaaaggcactttgagggactttttggtgcaaatcaaagaagtcggaggtgatccaacagattatttgtttgctgaagataaagagaatgcattaatggaacagaatagattggagagggaaaaagctgccaagattggtgggttattaaaaccttccgaacttgatgattga

SEQ ID NO: 4575 - DNA, 810 bp, Saccharomyces cerevisiae
atgtcgaagttcctacagggatcaatatttagcatatcaaaacttcatgttagatattcttctactcggccttttctagtggctcctagtattgctaacagtataacaaccgaggctccagcgattaatcactcacctgaactggcaaatgcgagaaaatggctaccaaaaagatgcggtttaattactcgtaagaagggaatgatgccttattttgataaatctactggtgaaagaagcgccgctactatattagaagttaataatgttgaagtaataatgcatagaacttcggaggtcaatgggtacttcgcgtgtcaagtagggtacggatcaaggcatttgtctaaagttagcagacaaatgcttggtcatttcgcttctaaagttgttaacccaaaagagcatgtggccgaattccgagttaaagatgaaaagggattaataccacctggcacattattgaaaccctcttttttcaaagaaggccaatatgttgacgtcagatcagtcagcaaaggcaaaggttttactggtgtgatgaaaaggtatggattcaagggtttgagagcatctcatggtacatctattatgcatagacacggtggttcttatggtcaaaaccaagacccaggtagggtactgccaggaagaaagatgcctggtcatatgggaaacgagcatgttactatccaaaatgttaaagttttgaaagtcgacgatgaaaataatgttatttgggttaaaggctctgtggctgggcccaaaaacagtttcgttaaaattcaagatgcaatcaaaaaaacttga

SEQ ID NO: 4576 - DNA, 810 bp, Artificial Sequence
  Description of Artificial Sequence: Synthetic polynucleotide
atgtccaagttcttacagggatccatatttagcatatccaaacttcatgttagatattcttctactagaccttttttagtggctcctagtattgctaacagtataacaaccgaggctccagcgattaatcactctcctgaattggcaaatgcgagaaaatggttaccaaaaagatgcggtttaattactcgtaagaagggaatgatgccttattttgataaatctactggtgaaagaagcgccgctactatattagaagttaataatgttgaagtaataatgcatagaacttccgaggtcaatgggtacttcgcgtgtcaagtagggtacggatctaggcatttgtctaaagttagcagacaaatgcttggtcatttcgcttctaaagttgttaacccaaaagagcatgtggccgaattcagagttaaagatgaaaagggattaataccacctggcacattattgaaaccctcttttttcaaagaaggccaatatgttgacgtcagatctgtcagcaaaggcaaaggttttactggtgtgatgaaaaggtatggattcaagggtttgagagcatctcatggtacatctattatgcatagacacggtggttcttatggtcaaaaccaagacccaggtagggtattgccaggaagaaagatgcctggtcatatgggaaacgagcatgttactatccaaaatgttaaagttttgaaagtcgacgatgaaaataatgttatttgggttaaaggctctgtggctgggcccaaaaacagtttcgttaaaattcaagatgcaatcaaaaaaacttga

SEQ ID NO: 4577 - DNA, 1869 bp, Saccharomyces cerevisiae
atgtttagtcactaccgctataaagaaaattcttgccaaaaaagagaggctataccagacaaatctcgcgtatcactgacatttcttcagaaaagaaccgattcatctaacgtcactgttgcagtggccgttgctgttcccattggtgctattattatagtactatccgtcgttttaatagtagtatataggagatgcaaaaaagaaccttctatgcaggattttgacccaaattttgagggcgatttatactatttaccgaagatggattcttctatgaattctgcaaactcagacagcaatgccacagaaaagaggtttatttatggtggttatgacgattttttgcaaccgtcaatcgaaaactcacaatctttcaaagattatgtgaggcgtatcaatgagcatgcaccctccgcttataatattgcttcactggcttcgcagaataacagcaagttatcggtcccctccaagcacattgacctttcgaataagatttctttcgaatcgttagagaattctgagctgattgtttcaccacaacactcaaatactgggcaagactgtgatcaaagatgtgatagtacgtcaaatcctgatgtaaatgaaaagtccagccataacaacgataatcgacttaaatcgaattatacgagtcgtagcgggctcgagcctcagtgttcgagagaggaggaagaaaatattgacagaataagaagcatttataacatttattttgagaaaagtaatagcacgatacgatcctctgtaacttcttcgatacggcgtgactctaaattaaacatcgctacaagaaaaagtgtaaatatgagctctcaagacaatccaaatgatactacattaattgaacagagtcacttcggaagtacaactgtccaagaaattgattccagttccagcgccaatgaggaatatgaagatgcaactgattatctgcaagtgccggcaccacaagagaataaaaacattgcatcgtcagtatattcagaagtagcaaccagagaaaaagtgattcccgaatcgtctctatctcttacattcccaccaccgaatggtctttcaacgagaattacctcatcaatatattctgacacggtcgctaaggaccatattcactctgcaaaggctcccgtacgggccctttcggagggttcgggtcagtcaaatcttacttctgctcagcaatattctacatattttatagatcactgcaaccagagcaatgatgacaattactactataattatcccctcccgttagaacatcctcaaaattatgagaacatcggagatttgcccacgcctacccaattcatttattccacctcttcgcattccttgacgtcattcaaaggaaggcctaaacctccaaaaacactaaaacatgtacctacagctaggcttaatgggacagcgttgaatccaatggatcatcctgaaatgttttacagttcgcctacgaaaataccgtcaacatctttgacaaagcaattttgtacgccccttccatatcagcttagacaaagtgttgttatgaccaacccatcagaactttctatgaaacctcgctataagcctgcaggatctttaagaaatttaataaaggcccaatatctccctggtaactcatccactacaacatcatcttctttatcacaaccgccgtcaacgttgtcaaatgcaataaatttccgtgttagtgggttattggatgacactgacatcttgcagcctcctagtgtgggggaaatcttaccttttaaagcttctacggaagacttaaggaagcaactgggcacatcccataattacgaaataacaccgtacgagaatgtacatgtataa

SEQ ID NO: 4578 - DNA, 1869 bp, Artificial Sequence
  Description of Artificial Sequence: Synthetic polynucleotide
atgtttagtcactaccgctataaagaaaattcttgccaaaaaagagaggctataccagacaaatctcgcgtatctttaacatttcttcagaaaagaaccgattcttctaacgtcactgttgcagtggccgttgctgttcccattggtgctattattatagtattgtccgtcgttttaatagtagtatataggagatgcaaaaaagaaccttctatgcaggattttgacccaaattttgagggcgatttatactatttaccgaagatggattcttctatgaattctgcaaacagcgacagcaatgccacagaaaagaggtttatttatggtggttatgacgattttttgcaaccgtctatcgaaaactctcaatctttcaaagattatgtgaggcgtatcaatgagcatgcaccctccgcttataatattgcttctttggcttctcagaataacagcaagttaagtgtcccctccaagcacattgacctttctaataagatttctttcgaatctttagagaattctgagttgattgtttctccacaacactctaatactgggcaagactgtgatcaaagatgtgatagtacgtccaatcctgatgtaaatgaaaagtccagccataacaacgataatagacttaaatctaattatacgagtcgtagcgggctcgagcctcagtgttccagagaggaggaagaaaatattgacagaataagaagcatttataacatttattttgagaaaagtaatagcacgataagatcctctgtaacttcttctatacgtcgtgactctaaattaaacatcgctacaagaaaaagtgtaaatatgagctctcaagacaatccaaatgatactacattaattgaacagagtcacttcggaagtacaactgtccaagaaattgattccagttccagcgccaatgaggaatatgaagatgcaactgattatttacaagtgccggcaccacaagagaataaaaacattgcatcttctgtatattctgaagtagcaaccagagaaaaagtgattcccgaaagctctttatctcttacattcccaccaccgaatggtctttctacgagaattacctcttctatatattctgacacggtcgctaaggaccatattcactctgcaaaggctcccgtaagagccctttctgagggttctggtcagtctaatcttacttctgctcagcaatattctacatattttatagatcactgcaaccagagcaatgatgacaattactactataattatcccctcccgttagaacatcctcaaaattatgagaacatcggagatttgcccacgcctacccaattcatttattccacctcttctcattccttgacgtccttcaaaggaaggcctaaacctccaaaaacattaaaacatgtacctacagctaggcttaatgggacagcgttgaatccaatggatcatcctgaaatgttttacagtagccctacgaaaataccgtccacatctttgacaaagcaattttgtacgccccttccatatcagcttagacaaagtgttgttatgaccaacccatctgaactttctatgaaacctcgctataagcctgcaggatctttaagaaatttaataaaggcccaatatctccctggtaactcttccactacaacatcttcttctttatctcaaccgccgtccacgttgagcaatgcaataaatttccgtgttagtgggttattggatgacactgacatcttgcagcctcctagtgtgggggaaatcttaccttttaaagcttctacggaagacttaaggaagcaattaggcacatcccataattacgaaataacaccgtacgagaatgtacatgtatga

SEQ ID NO: 4579 - DNA, 882 bp, Saccharomyces cerevisiae
atgaaggcttctagtaaagctattaaattagtactggaccatctgaagtccacgggaagagttcttggctccgtagagtcaggaaattcagcaacaataagtgagaaaacggcatctgttaataagcagcagcagttgcaggaaaagaaaccttctgtcctacaatatagaagctacaatccatatttagttaaggaggatttcctgtcaattctgccagaaaatttgtataaaaagaggggacaatttacaaatgagcttgactttcagttgatgaaagtcagggaccctaaatacttccagttcaaggatcagtattacttgttttttaatgattataactcgcttactgagtatatcaaattaacaaaacactcgcgaataaacaagatcagggtgaaaatgacgccattggcgcaacccttgccaaccctgttaacaaaattacaaagatattcaaaaaatctatataacgcattccgatcatctgagcaatattttgagggactaaacgaaaaagtcgatgttagtggagagttcactaccaatcagttacggagtatccttgattcggtggaagaaatagaaaataagtccgtattagtctggaatatacccactaaattacggtcgcacgatatattgaattatttttggttttacaacataaggtctagcttcaagatatactgggatgatgaaatgaaaagaaatctacgatttatatctttcgaaaactcgcatgacgcctaccgctttaaaagaaactatcatggattattggctaaagagctattgaccctgtcagaaaagggagatgcagctgactattcgctcgaaatggacgattccaaaatattaattgaacatcttagtgaatga

SEQ ID NO: 4580 - DNA, 882 bp, Artificial Sequence
  Description of Artificial Sequence: Synthetic polynucleotide
atgaaggcttctagtaaagctattaaattagtattggaccatttgaagtccacgggaagagttcttggctccgtagagagtggaaattctgcaacaataagtgagaaaacggcatctgttaataagcagcagcagttgcaggaaaagaaaccttctgtcttacaatatagaagctacaatccatatttagttaaggaggatttcttatccattttaccagaaaatttgtataaaaagaggggacaatttacaaatgagcttgactttcagttgatgaaagtcagggaccctaaatacttccagttcaaggatcagtattacttgttttttaatgattataactctcttactgagtatatcaaattaacaaaacactctagaataaacaagatcagggtgaaaatgacgccattggcgcaacccttgccaaccttattaacaaaattacaaagatattctaaaaatttatataacgcattcagatcttctgagcaatattttgagggattgaacgaaaaagtcgatgttagtggagagttcactaccaatcagttaagaagtatccttgattctgtggaagaaatagaaaataagtccgtattagtctggaatatacccactaaattaagaagtcacgatatattgaattatttttggttttacaacataaggtctagcttcaagatatactgggatgatgaaatgaaaagaaatttaagatttatatctttcgaaaactctcatgacgcctaccgctttaaaagaaactatcatggattattggctaaagagttattgaccttatctgaaaagggagatgcagctgactattccctcgaaatggacgattccaaaatattaattgaacatcttagtgaatga

SEQ ID NO: 4581 - DNA, 1347 bp, Saccharomyces cerevisiae
atggatgttcgtcgacctataagggaggcagtcaacaacaggaggaaaccaaaatttttgagcgtttcgtttaaccaagatgattcgtgtttcagcgtggcgttagagaatggatttcgtattttcaatacagatccattgactagtaagctatcgaaaacatttaaagagtctgcgaccaaccaatccaggggcactgggattggctataccaggatgctttatcgtacgaattacatcgcactagtcggaggtggtaaacgaccaaggcatgctctaaataaactgatcatctgggatgatcttttgcaaaaggaaacgattactttgaagtttatgtcttccattaaagacgtgtttttatctaggattcatattgtggtagtcctggagaacacaatagagatcttccaatttcaaaccaatcctcaaagaatttgtcctattttggatatccctcccaatggatcagtggactatgtcgtttgtagcagcaaacatctccagtcgcaagcatcgcagtcacagtctaaaatcttagaaatcattgcattcccatcgaataaatgcgtaggccaaattcaagtagccgacctatcacaaataaaatataattcacaaaacccgaaggaatcagcgcttttgcccacttccatcattaaagcacataaaaatcccatcaaactggttagactgaaccgtcaaggcaccatggtagcaacatgttccgtccagggtacacttataagaatcttcagtacgcataacggtactttaatcaaagaatttagaagaggggtggacaaggcggatatttacgagatgagtttcagccccaatggtagtaagttggccgtattgtcaaataagcaaacattgcatattttccaaatttttgaaacaaccaatacagaaacgaatacaccagaccactctcgtgccaatggttcgagccatcccttgaaaaattatataccgaagggcctatggaggcccaagtatttggactctgtgtggtcgatatgcaatgctcacttaaagaacccaatctttgacgctcacagaaatgacaacagtggtgatgtaactcacgataacgagttctataaagacagatgtagaattggctggtgtcaagactctaataatagagaacaagacgattcgttggttctggtgtggcaaaattctgggatatgggagaaatttgttattttggagaaggaacaacaagattcatcgaaaacgcattattcattgaatgaaagcttgaggaacgaagatacgaaatcagcgggtgagcccaccagatgggagttggtgagagaatcatggagagagctttaa

SEQ ID NO: 4582 - DNA, 1347 bp, Artificial Sequence
  Description of Artificial Sequence: Synthetic polynucleotide
atggatgttcgtcgtcctataagggaggcagtcaacaacaggaggaaaccaaaatttttgagcgtttcttttaaccaagatgattcttgtttcagcgtggcgttagagaatggatttcgtattttcaatacagatccattgactagtaagctttctaaaacatttaaagagtctgcgaccaaccaatccaggggcactgggattggctataccaggatgctttatcgtacgaattacatcgcattggtcggaggtggtaaaaggccaaggcatgctttgaataaattaatcatctgggatgatcttttgcaaaaggaaacgattactttgaagtttatgtcttccattaaagacgtgtttttatctaggattcatattgtggtagtcttggagaacacaatagagatcttccaatttcaaaccaatcctcaaagaatttgtcctattttggatatccctcccaatggatctgtggactatgtcgtttgtagcagcaaacatctccagtctcaagcatcccagtctcagtctaaaatcttagaaatcattgcattcccatccaataaatgcgtaggccaaattcaagtagccgacttatctcaaataaaatataattctcaaaacccgaaggaaagtgcgcttttgcccacttccatcattaaagcacataaaaatcccatcaaattggttagattgaaccgtcaaggcaccatggtagcaacatgttccgtccagggtacacttataagaatcttcagtacgcataacggtactttaatcaaagaatttagaagaggggtggacaaggcggatatttacgagatgagtttcagccccaatggtagtaagttggccgtattgagcaataagcaaacattgcatattttccaaatttttgaaacaaccaatacagaaacgaatacaccagaccactctcgtgccaatggttccagccatcccttgaaaaattatataccgaagggcttatggaggcccaagtatttggactctgtgtggtccatatgcaatgctcacttaaagaacccaatctttgacgctcacagaaatgacaacagtggtgatgtaactcacgataacgagttctataaagacagatgtagaattggctggtgtcaagactctaataatagagaacaagacgattctttggttttggtgtggcaaaattctgggatatgggagaaatttgttattttggagaaggaacaacaagattcttctaaaacgcattattctttgaatgaaagcttgaggaacgaagatacgaaatctgcgggtgagcccaccagatgggagttggtgagagaaagttggagagagctttga

SEQ ID NO: 4583 - DNA, 1842 bp, Saccharomyces cerevisiae
atgaaaggcgaacctaagacttacagcatgagcgacctctcatactacggtgagaaagcacaacaacagaacgagaaacagcaaaaacaatatgttgtgagacgaaattctacgcagtcaacatcaaaacaaaacgtgagcgtggtgctcgaggacaacgccagcgaaagtaatgaactacctaaagggtttatcttgtacgcatctttgatagcattggctttgtcgctgtttctggcagccttggatatcatgatagtttctacaatcattgaagaagtagctaaacagtttggatcgtactctgagatcgggtggttatttaccgggtatagcttaccaaacgctctgttggcgttgatatggggaagaattgccacacctatcggattcaaggagaccatgctatttgctattgtcatttttgaaatcgggtcgctgatctctgctttagcaaattcaatgagtatgctcattggtggtagagttattgctggagtcggcggttgtggtattcaaagtttatcgttcgtcattggttcaaccctggtagaggagtcgcagagaggcatactaattgctgttttgagttgttcgtttgctattgcatctgttgttgggcctttccttggaggagttttcacctccagcgtcacatggagatggtgcttctatgttaatttaccgatcggtggcctagcatttttcttattcctgttcttttataacccaggtttaagtacatttcaagagacaatggataacatccgcaaatttccatcacagtttatcgaaattgttcggaatgtagcatatcatttattgaaaatcaaagggtttagcaaacttaatgggtggagaaagccgttcatggaattgattttcatgtatgatattatcgagtttgtgttttgttcagctggattcacatgtattctattggctttcacatttggcggtaaccggtatgcttggaactctgcatccatcattattcttttcatcatcggtatagtcctggtagtgttagcaggtatctatgatttccttgtcttccccaaatttaatatagtgaaagcaacaccacattaccaaccattaatgtcatggacaaatatcaagaaaccaggtattttcacggttaatatagccttgtttctcacttgtgcaggatatatcagtcagtttacgtatattgtgcaatacttccaattaatttacaatgattccgcctggagagccgctgtacacctggttgcttgcattatttctacagtcgttacagcaatactttgcggtgctatcaccgacaaaacccgccaaatcaaaccgattattgttatttcaagcatttttggtgttgttggtgcgggtatattaaccctattgaacaataatgccaataactctgctcacatcggccttttgatattacctggcgttgctttcggtggtttggcacaaagttccatgctcgcttctcaaattcagttagacaagaagagcccaacttttcgatcagattttgtctctattaccacttttaacacattttgcaaaaatctaggtcaagcactgggaggtgtcatctctaacactgttttcagtgctgctgctatcaagaaattaaccaaggctaatattcagctcccagatggtaccacggtagacaatctggtaatctataggcagaccaatttcgatggctctcattccaaattgggcaatataatttctgaatctctcactgacgtcttttacatggcattaggattttatgcattatctctcatttttgctgtttttgcttcaaataagaaagtcacagcaagcctgagataa

SEQ ID NO: 4584 - DNA, 1842 bp, Artificial Sequence
  Description of Artificial Sequence: Synthetic polynucleotide
atgaaaggcgaacctaagacttacagcatgagcgacctctcttactacggtgagaaagcacaacaacagaacgagaaacagcaaaaacaatatgttgtgagaagaaattctacgcagagtacaagtaaacaaaacgtgagcgtggtgctcgaggacaacgccagcgaaagtaatgaattacctaaagggtttatcttgtacgcatctttgatagcattggctttgtctttatttttggcagccttggatatcatgatagtttctacaatcattgaagaagtagctaaacagtttggatcttactctgagatcgggtggttatttaccgggtatagcttaccaaacgctttattggcgttgatatggggaagaattgccacacctatcggattcaaggagaccatgttatttgctattgtcatttttgaaatcgggtctttgatctctgctttagcaaattctatgagtatgctcattggtggtagagttattgctggagtcggcggttgtggtattcaaagtttatctttcgtcattggttctaccttggtagaggagagccagagaggcatattgattgctgttttgagttgttcctttgctattgcatctgttgttgggcctttccttggaggagttttcacctccagcgtcacatggagatggtgcttctatgttaatttaccgatcggtggcttggcatttttcttattccttttcttttataacccaggtttaagtacatttcaagagacaatggataacatccgcaaatttccatctcagtttatcgaaattgttagaaatgtagcatatcatttattgaaaatcaaagggtttagcaaacttaatgggtggagaaagccgttcatggaattgattttcatgtatgatattatcgagtttgtgttttgttctgctggattcacatgtattttattggctttcacatttggcggtaacagatatgcttggaactctgcatccatcattattcttttcatcatcggtatagtcttggtagtgttagcaggtatctatgatttccttgtcttccccaaatttaatatagtgaaagcaacaccacattaccaaccattaatgtcttggacaaatatcaagaaaccaggtattttcacggttaatatagccttgtttctcacttgtgcaggatatatcagtcagtttacgtatattgtgcaatacttccaattaatttacaatgattccgcctggagagccgctgtacacttggttgcttgcattatttctacagtcgttacagcaatactttgcggtgctatcaccgacaaaacccgccaaatcaaaccgattattgttatttctagcatttttggtgttgttggtgcgggtatattaacccttttgaacaataatgccaataactctgctcacatcggccttttgatattacctggcgttgctttcggtggtttggcacaaagttccatgctcgcttctcaaattcagttagacaagaagagcccaacttttagaagtgattttgtctctattaccacttttaacacattttgcaaaaatttgggtcaagcattgggaggtgtcatctctaacactgttttcagtgctgctgctatcaagaaattaaccaaggctaatattcagctcccagatggtaccacggtagacaatttggtaatctataggcagaccaatttcgatggctctcattccaaattgggcaatataatttctgaatctctcactgacgtcttttacatggcattaggattttatgcattatctctcatttttgctgtttttgcttctaataagaaagtcacagcaagcttaagatga

SEQ ID NO: 4585 - DNA, 1782 bp, Saccharomyces cerevisiae
atggctactccccatttatatcacagatataactccaaaagctctaacaaaaatatcaattcgagcggaaattctacagaggttgaccgtttcattccaaaatcagtttcgagaaatgcttataagtctattccaatgttaaatgggtttgacataagttactcagaactttgcgagaaatctccttcacctgagcggctatcatcccctgaattctttaacgaactgcgaaacaccgggcattacgaatcaatcagtacaacaaatgagttttccatgtcaagtatctctagctcttctgagagtcaagttaccagaagtggaagtgcaagagcttcaagaaacgattattcaaaattaactaaagagcaaaaggaccatagaaagaatattgcacattctcttggttttcaattgcccgaccgtgtctttacgtttgagaccacaagtgctgaaattctggaaaagaataaagccatcaaaaattgctttggaccaggaagttgcgccgaaataagatcaacctttgactttagtacactctcgcccgatgttgcccgttattatatcgctaattctaacgcaagatcagcttccccacaaagacaaatccaaagacctgctaaacgagtaaagtcacatattccataccgtgtattggatgcaccttgcctgagaaatgatttttattcgaacttaatttcttggtcaagaaccacaaacaacgttttggtgggactgggttgctccgtatacatctggtctgagaaagaaggagcggtatctatattggaccatcaatacttaagtgaaaagagggatttagtgacatgcgtctcattctgtccttacaatacttattttattgttggtacaaaatttggccgtattcttctttatgatcaaaaagaattttttcattccagcaacacaaacgaaaaggaaccagtatttgttttccaaactgaatccttcaaaggaatatgttgcctagaatggttcaaaccaggtgaaatttgcaaattttatgttggagaggaaaatggcaatgtgagcctctttgaaataaagagtttgcatttccccataaaaaactggagtaaaagacaaaaactcgaagatgaaaatttaataggattgaaacttcattccacttatcaagctcaggcacagcaagtctgtggtatttctctgaatgaacatgcaaacctgcttgcagtcggcggcaatgataattcttgtagcttatgggatatttccgacttggataaacctattaaaaagtttgttcttccacataaagcggctgtgaaggccattgccttttgtccttggtcgaagtctttgttggctacgggtggtggaagcaaagacagatgtattaagttttggcatacatcgacaggcacattgttggatgagatttgcacctcgggacaggtgacgtctttgatatggtcgttgagacataaacagattgttgctacttttggattcggtgataccaagaatcctgtattaataacactatactcatatccaaaattatcaaaactactcgaagttaggtcgcccaaccctttgcgtgtactgagcgcagtaatctctccaagttccatggcaatttgcgttgccactaacgatgaaacgataagattttatgaactgtggaacgataaggaggaaataattaatgaaattcaagagagtgggatttatggatctaatattatagaatatatggagggtatcgaaacaacacataacaaaagaataaggtaa

SEQ ID NO: 4586 - DNA, 1782 bp, Artificial Sequence
  Description of Artificial Sequence: Synthetic polynucleotide
atggctactccccatttatatcacagatataactccaaaagctctaacaaaaatatcaatagtagcggaaattctacagaggttgaccgtttcattccaaaatctgtttctagaaatgcttataagtctattccaatgttaaatgggtttgacataagttactctgaactttgcgagaaatctccttctcctgagagattatcttcccctgaattctttaacgaattaagaaacaccgggcattacgaaagtatcagtacaacaaatgagttttccatgagcagtatctctagctcttctgagagtcaagttaccagaagtggaagtgcaagagcttccagaaacgattattctaaattaactaaagagcaaaaggaccatagaaagaatattgcacattctcttggttttcaattgcccgaccgtgtctttacgtttgagaccacaagtgctgaaattttggaaaagaataaagccatcaaaaattgctttggaccaggaagttgcgccgaaataagatctacctttgactttagtacactctctcccgatgttgcccgttattatatcgctaattctaacgcaagatctgcttccccacaaagacaaatccaaagacctgctaaaagagtaaagagtcatattccataccgtgtattggatgcaccttgcttgagaaatgatttttattccaacttaatttcttggtccagaaccacaaacaacgttttggtgggattaggttgctccgtatacatctggtctgagaaagaaggagcggtatctatattggaccatcaatacttaagtgaaaagagggatttagtgacatgcgtctctttctgtccttacaatacttattttattgttggtacaaaatttggccgtattcttctttatgatcaaaaagaattttttcattccagcaacacaaacgaaaaggaaccagtatttgttttccaaactgaatccttcaaaggaatatgttgcttagaatggttcaaaccaggtgaaatttgcaaattttatgttggagaggaaaatggcaatgtgagcctctttgaaataaagagtttgcatttccccataaaaaactggagtaaaagacaaaaactcgaagatgaaaatttaataggattgaaacttcattccacttatcaagctcaggcacagcaagtctgtggtatttctttgaatgaacatgcaaacttacttgcagtcggcggcaatgataattcttgtagcttatgggatatttccgacttggataaacctattaaaaagtttgttcttccacataaagcggctgtgaaggccattgccttttgtccttggtccaagtctttgttggctacgggtggtggaagcaaagacagatgtattaagttttggcatacatctacaggcacattgttggatgagatttgcacctctggacaggtgacgtctttgatatggtctttgagacataaacagattgttgctacttttggattcggtgataccaagaatcctgtattaataacattgtactcctatccaaaattatccaaattactcgaagttaggtctcccaaccctttgcgtgtattgagcgcagtaatctctccaagttccatggcaatttgcgttgccactaacgatgaaacgataagattttatgaattatggaacgataaggaggaaataattaatgaaattcaagagagtgggatttatggatctaatattatagaatatatggagggtatcgaaacaacacataacaaaagaataaggtga

SEQ ID NO: 4587 - DNA, 1578 bp, Saccharomyces cerevisiae
atggatgcaaagaaaaatactggtgaagccaataatgatgtattggaagaggaagcagcgattcagttgattgcaccaggtatagcgagaaacttaacacaagaagtcattaccggtatcttctgtaatgtagtaatatatcctcttcttctaatatattttgtcttaactttccgttacatgactacaaatattgtaccttatgaatttatagatgaaaagtttcacgttggccaaactttgacctatttaaaaggtaaatggactcaatgggaccctaaaataacaaccccccctggaatctatattttgggtttaattaattattattgtataaagcccatattcaagtcgtggagcacactaaccatactaagattagttaatttacttggagggattatcgttttccccattttagtactcaggccaatattcctttttaatgccttaggtttttggcccgtttcattaatgagcttcccattgatgacaacttattattacttattttacaccgatgtgtggtctacaattctgatattgcaatcactcagctgcgtgttaacattaccgtttggccccgtgaagagtatatggttgagtgctttttttgctggtgtaagctgtctcttcagacaaacgaatatcatttggacgggatttataatgattcttgctgttgaacgcccagccattttacaaaaacagttcaacacgcatacgttcaataactatttgaaattattcattcatgctattgacgatttctccaaccttgttctgccctatatgataaattttgttttgttcttcatttatctgatttggaacagatccataacactaggtgataagtccagccactcagcaggcctgcatatagtacaaatattctattgtttcacattcatcaccgttttcagtttacctatatggatatctcgtaattttatgaagttgtacaaattaagaataaaacggaagccagtacaaactttttttgaatttattggtattatgctaatcataagatactttacaaaagttcacccatttttgttagcagataatagacactacacgttctacctcttcagaagattgataggcaacaaaagtagactaatcaagtacttttttatgacaccaatctatcatttctccactttcgcataccttgaagtgatgagacccaaccagctcacctttcaccccatcactccactccccatcaaagaacctgtacatttacccatacaactgacacatgtatcgtggacggccttaataacgtgcaccatggtaactatcgttccatcacccttattcgaacctcgttactatatattgccctatttcttttggagaatatttattacctgcagctgcgaacctttgataaaggatttaaaacctgctaaagaaggcgaaaacccaattaccataagcagtacgaaaagactgttcatggaatttttatggttcatgctcttcaatgtcgttactttagttatcttttccaaggtctcatttccttggaccactgagccctatttgcaaagaataatatggtga

SEQ ID NO: 4588 - DNA, 1578 bp, Artificial Sequence
  Description of Artificial Sequence: Synthetic polynucleotide
atggatgcaaagaaaaatactggtgaagccaataatgatgtattggaagaggaagcagcgattcagttgattgcaccaggtatagcgagaaacttaacacaagaagtcattaccggtatcttctgtaatgtagtaatatatcctcttcttttgatatattttgtcttaactttccgttacatgactacaaatattgtaccttatgaatttatagatgaaaagtttcacgttggccaaactttgacctatttaaaaggtaaatggactcaatgggaccctaaaataacaaccccccctggaatctatattttgggtttaattaattattattgtataaagcccatattcaagtcttggagcacattaaccatattaagattagttaatttacttggagggattatcgttttccccattttagtactcaggccaatattcctttttaatgccttaggtttttggcccgtttctttaatgagcttcccattgatgacaacttattattacttattttacaccgatgtgtggtctacaattttaatattgcaatctctcagctgcgtgttaacattaccgtttggccccgtgaagagtatatggttgagtgctttttttgctggtgtaagctgtctcttcagacaaacgaatatcatttggacgggatttataatgattcttgctgttgaacgcccagccattttacaaaaacagttcaacacgcatacgttcaataactatttgaaattattcattcatgctattgacgatttctccaaccttgttttgccctatatgataaattttgttttgttcttcatttatttgatttggaacagatccataacattaggtgataagtccagccactctgcaggcttgcatatagtacaaatattctattgtttcacattcatcaccgttttcagtttacctatatggatatctcgtaattttatgaagttgtacaaattaagaataaaaagaaagccagtacaaactttttttgaatttattggtattatgttgatcataagatactttacaaaagttcacccatttttgttagcagataatagacactacacgttctacctcttcagaagattgataggcaacaaaagtagattgatcaagtacttttttatgacaccaatctatcatttctccactttcgcataccttgaagtgatgagacccaaccagctcacctttcaccccatcactccactccccatcaaagaacctgtacatttacccatacaattgacacatgtaagctggacggccttaataacgtgcaccatggtaactatcgttccatctcccttattcgaacctcgttactatatattgccctatttcttttggagaatatttattacctgcagctgcgaacctttgataaaggatttaaaacctgctaaagaaggcgaaaacccaattaccataagcagtacgaaaagattattcatggaatttttatggttcatgctcttcaatgtcgttactttagttatcttttccaaggtcagttttccttggaccactgagccctatttgcaaagaataatatggtga

SEQ ID NO: 4589 - DNA, 174 bp, Saccharomyces cerevisiae
atgaacgttcgtggaaatcaatgcattatgtctataagagtattcctaaaagcaggagaaagttcgctatcatttgccattaagtggctcaaacggtttgaggccactacgaagaaaaatcaatatatacaaaacggttggccactaaaagatggaaataaaaaaagaaaataa

SEQ ID NO: 4590 - DNA, 174 bp, Artificial Sequence
  Description of Artificial Sequence: Synthetic polynucleotide
atgaacgttcgtggaaatcaatgcattatgtctataagagtattcttgaaagcaggagaaagttctttatcttttgccattaagtggctcaaaagatttgaggccactacgaagaaaaatcaatatatacaaaacggttggccattgaaagatggaaataaaaaaagaaaatga

SEQ ID NO: 4591 - DNA, 1518 bp, Saccharomyces cerevisiae
atggatctattcaaaagaaaagttaaagaatgggtatactccctcagcactgacgaccattatgcagagtataaccccgatgaaacgcctacttttaacatgggtaaacgtttaaacagcaacaatggtcaggtaaatccctctcaaatgcatttgaatagtgtagatgaggaaatgagcatgggatttcaaaatggcgtgccatctaatgaagacataaatattgatgaatttacgtccacggagtcaaacgatggtgtctctgaaaccctcttagcttggagacacatcgatttttggaccagtgaacataatccagatttaaatgcaactttgagtgatccttgcacccaaaacgatatcactcacgcagaggaagacttggaagttagctttcccaacccagtaaaagcgtctttcaaaattcatgatggccaagaagatttagaatcgatgaccggtacttctggcttgttttatggcttccaactaatgacactagatcaggttgtagctatgactcaggcctggagaaacgtcgcaaagaacctaaacaaaagatctcaacaaggtttatcccatgttacatctactggctcttcttcatctatggaaagactaaatggtaacaagttcaaactgccaaatatcccagatcaaaaatctattcctccaaatgcagtgcaaccggtatatgcacatcctgcttggattcctttaataacggacaatgccggtaaccatatcggtgttgacttggcgcctggtccaaatggtaaatatgctcaaattataacatttgggagggacttcgatacgaaatttgtcattgctgaaaattggggtgaatttctgttatcgtttgccaacgatttggaagctggtaattggtatttagtagatgacaatgacgactactttagcggtgatggtgaattggtcttcagggataagaaatctaatggtcctatacaagattatttcgaagttttaaaaagaagaacgtggatcaagtatcaagaaaacttgagatcacaacagcaaaaatctcaacctgacacatccttgcaggagcagaaatacgtgcctgcctcgcaaaagaaagtggcagctgaacagccttctaccctcaacgcagaatccataaagggcgaagatagtggtagtgcagatgtacaatctgttcaagatcacgaatctgtcaaaattgtgaaaacagaacctagcgaagcggagactacaactgtaaatacagaaagccttggacaagcagagcatgaaatcaaagctgataatgtagacattaaacaagaaagcgagaggaaagaagacgaaaagcaaccaaaggttgaagaaaaagaacacgttgaaaacgaacatgtcacagaatcagcaaaaaaagacgatgatgtaaataagcaaacagaagaaatgaacaaaaaggaagaaaatgaaataagaagtgatgatgctaaagtggaagaagcgagagaagaatttgaaaatatagctttatga

SEQ ID NO: 4592 - DNA, 1518 bp, Artificial Sequence
  Description of Artificial Sequence: Synthetic polynucleotide
atggatcttttcaaaagaaaagttaaagaatgggtatactccctcagcactgacgaccattatgcagagtataaccccgatgaaacgcctacttttaacatgggtaaacgtttaaacagcaacaatggtcaggtaaatccctctcaaatgcatttgaatagtgtagatgaggaaatgagcatgggatttcaaaatggcgtgccatctaatgaagacataaatattgatgaatttacgtccacggagagcaacgatggtgtctctgaaaccctcttagcttggagacacatcgatttttggaccagtgaacataatccagatttaaatgcaactttgagtgatccttgcacccaaaacgatatcactcacgcagaggaagacttggaagttagctttcccaacccagtaaaagcgtctttcaaaattcatgatggccaagaagatttagaaagtatgaccggtacttctggcttgttttatggcttccaattgatgacattagatcaggttgtagctatgactcaggcctggagaaacgtcgcaaagaacttgaacaaaagatctcaacaaggtttatcccatgttacatctactggctcttcttcttctatggaaagattgaatggtaacaagttcaaattaccaaatatcccagatcaaaaatctattcctccaaatgcagtgcaaccggtatatgcacatcctgcttggattcctttaataacggacaatgccggtaaccatatcggtgttgacttggcgcctggtccaaatggtaaatatgctcaaattataacatttgggagggacttcgatacgaaatttgtcattgctgaaaattggggtgaatttttattatcttttgccaacgatttggaagctggtaattggtatttagtagatgacaatgacgactactttagcggtgatggtgaattggtcttcagggataagaaatctaatggtcctatacaagattatttcgaagttttaaaaagaagaacgtggatcaagtatcaagaaaacttgagatctcaacagcaaaaatctcaacctgacacatccttgcaggagcagaaatacgtgcctgcctctcaaaagaaagtggcagctgaacagccttctaccctcaacgcagaatccataaagggcgaagatagtggtagtgcagatgtacaatctgttcaagatcacgaatctgtcaaaattgtgaaaacagaacctagcgaagcggagactacaactgtaaatacagaaagccttggacaagcagagcatgaaatcaaagctgataatgtagacattaaacaagaaagcgagaggaaagaagacgaaaagcaaccaaaggttgaagaaaaagaacacgttgaaaacgaacatgtcacagaaagtgcaaaaaaagacgatgatgtaaataagcaaacagaagaaatgaacaaaaaggaagaaaatgaaataagaagtgatgatgctaaagtggaagaagcgagagaagaatttgaaaatatagctttatga

SEQ ID NO: 4593 - DNA, 414 bp, Saccharomyces cerevisiae
atgtcatacggcggatcggcatcccaagatatagtgacaaaattgattagaaaaatccaaaatacgtctgtgtcttgcaccaggagggatgaaaatctagattcttttaatcaacacttgaaaatgagtcttaaagttgcgcataacacgaagacatttgcaaagcattgccttcatcgacaagtattcaagaatacgtatcggaaaagaaaagcagtggaagatcaaaggaaaaacttgaacacgcaacttaggcaaaaatttgcgtcgccgtcagacaatttgctttcaccatgctctagaaaactgaatgatcacaagtcaaaacttttctcagccaaatcgcaacccaaaacactggagtttgtgcggggcaaacagaatataccacgcaagccgaatgtagacatttaa

SEQ ID NO: 4594 - DNA, 414 bp, Artificial Sequence
  Description of Artificial Sequence: Synthetic polynucleotide
atgagttacggcggaagtgcatcccaagatatagtgacaaaattgattagaaaaatccaaaatacgtctgtgtcttgcaccaggagggatgaaaatttggattcttttaatcaacacttgaaaatgagtcttaaagttgcgcataacacgaagacatttgcaaagcattgccttcatagacaagtattcaagaatacgtatagaaaaagaaaagcagtggaagatcaaaggaaaaacttgaacacgcaacttaggcaaaaatttgcgtccccgtctgacaatttgctttctccatgctctagaaaattgaatgatcacaagagtaaacttttctctgccaaatctcaacccaaaacattagagtttgtgagaggcaaacagaatataccacgcaagccgaatgtagacatttga

SEQ ID NO: 4595 - DNA, 933 bp, Saccharomyces cerevisiae
atgaatagatcacctggtgagttccaaaggtacgcaaaggcgttccaaaaacaattgtccaaggtacagcaaaccggaggcagaggtcaagtgccttcaccaaggggggcatttgcaggcttgggaggtttgcttttactcggaggtggtgcactgttcattaataatgcactgttcaatgtagatggtggtcatagagccattgtttattccagaatacatggtgtttcctctaggatatttaatgaaggtactcacttcattttcccttggcttgacacaccaattatttatgatgtgagagcaaaacctcgtaatgttgcttctttaacaggtaccaaagacttacaaatggtgaatatcacctgtagagtactttcaagaccggatgtggtgcaattgcccaccatatacagaaccttaggtcaggattacgatgaaagagtgttgccttccattgttaatgaagttttaaaggctgtagtggcccaatttaatgcgtcacaattaatcactcaaagagaaaaagtttccaggttgattcgcgagaatttggttcgtcgtgcaagcaaattcaatatcctactggatgatgtttctattacgtacatgactttttcgccagagtttacgaacgctgtagaagcaaagcaaattgcccaacaagatgctcaaagggctgcatttgtagttgataaagccagacaagaaaaacaaggtatggtagtgagggcacaaggtgaagccaaatccgccgaactgattggtgaagccatcaagaaatcaagagactacgtggaattgaaaagattagatacagccagggacattgcaaagatcttggctagctctccaaatagagtcatcttggataatgaagcattgttgctaaataccgtagtggatgcaagaatcgatggaaggggcaaataa

SEQ ID NO: 4596 - DNA, 933 bp, Artificial Sequence
  Description of Artificial Sequence: Synthetic polynucleotide
atgaatagatctcctggtgagttccaaaggtacgcaaaggcgttccaaaaacaattgtccaaggtacagcaaaccggaggcagaggtcaagtgccttctccaaggggggcatttgcaggcttgggaggtttgcttttactcggaggtggtgcattattcattaataatgcattattcaatgtagatggtggtcatagagccattgtttattccagaatacatggtgtttcctctaggatatttaatgaaggtactcacttcattttcccttggcttgacacaccaattatttatgatgtgagagcaaaacctcgtaatgttgcttctttaacaggtaccaaagacttacaaatggtgaatatcacctgtagagtactttctagaccggatgtggtgcaattgcccaccatatacagaaccttaggtcaggattacgatgaaagagtgttgccttccattgttaatgaagttttaaaggctgtagtggcccaatttaatgcgtctcaattaatcactcaaagagaaaaagtttccaggttgattcgcgagaatttggttcgtcgtgcaagcaaattcaatatcttattagatgatgtttctattacgtacatgactttttctccagagtttacgaacgctgtagaagcaaagcaaattgcccaacaagatgctcaaagggctgcatttgtagttgataaagccagacaagaaaaacaaggtatggtagtgagggcacaaggtgaagccaaatccgccgaattgattggtgaagccatcaagaaatctagagactacgtggaattgaaaagattagatacagccagggacattgcaaagatcttggctagctctccaaatagagtcatcttggataatgaagcattgttgttgaataccgtagtggatgcaagaatcgatggaaggggcaaatga

SEQ ID NO: 4597 - DNA, 687 bp, Saccharomyces cerevisiae
atgtctaattatcctttgcatcaagcctgcatggaaaatgagtttttcaaggtacaagagctgctacactccaaaccttccttgttgctacagaaggaccaggatggcagaatccctttacactggtcagtttctttccaagcacatgaaattaccagttttttgctttctaaaatggaaaatgttaacttagatgattatccagatgattctggatggacacctttccatattgcttgttcagtggggaatttggaggtggtaaagtctctttacgacagacctctaaagcctgatctaaataagataaccaatcaaggagttacatgcttgcacttggcagttggtaagaaatggtttgaagtatcccaatttttaattgaaaatggtgcgtccgtaagaattaaagataaatttaatcaaattccattgcatagagctgcgtcggtgggttctttgaaattaattgaactattatgcggtttgggcaaaagcgctgtaaattggcaggataagcagggttggaccccactatttcatgctttggctgaagggcacggtgacgcagctgtattgttggtggaaaagtatggtgcagaatatgatcttgtagataataaaggcgctaaggcagaagatgttgcccttaatgaacaggttaaaaagtttttcctaaataatgtataa

SEQ ID NO: 4598 - DNA, 687 bp, Artificial Sequence
  Description of Artificial Sequence: Synthetic polynucleotide
atgtctaattatcctttgcatcaagcctgcatggaaaatgagtttttcaaggtacaagagttattacactccaaaccttccttgttgttacagaaggaccaggatggcagaatccctttacactggtctgtttctttccaagcacatgaaattaccagttttttgctttctaaaatggaaaatgttaacttagatgattatccagatgattctggatggacacctttccatattgcttgttctgtggggaatttggaggtggtaaagtctctttacgacagacctttgaagcctgatttgaataagataaccaatcaaggagttacatgcttgcacttggcagttggtaagaaatggtttgaagtatcccaatttttaattgaaaatggtgcgtccgtaagaattaaagataaatttaatcaaattccattgcatagagctgcgtctgtgggttctttgaaattaattgaattattatgcggtttgggcaaaagcgctgtaaattggcaggataagcagggttggaccccattatttcatgctttggctgaagggcacggtgacgcagctgtattgttggtggaaaagtatggtgcagaatatgatcttgtagataataaaggcgctaaggcagaagatgttgcccttaatgaacaggttaaaaagtttttcttgaataatgtatga

SEQ ID NO: 4599 - DNA, 3537 bp, Saccharomyces cerevisiae
atgaaattcggcaagtatttggaagccaggcagttggaactggcggagtacaacagccattttattgattataaggctctaaagaaacttatcaaacaattggccattcccacgctaaaggctagttcagatttagatttgcatttaacattagatgacatcgacgaaaaaattatacatcagagactgcaagaaaataaagctgcctttttttttaaactagagagggagctggaaaaagtaaatggttattatttggcgagagagtccgatttaagaataaaattcaatatattacactcaaaatataaagattataagataaatggtaagctaaactcaaaccaagctacctcatttaaaaacttatatgcggctttcaaaaagtttcaaaaggatcttagaaatttggagcagtatgttgagttaaataaaacgggattttcaaaagctctgaagaaatgggacaagagatctcaatctcacgataaagatttttaccttgctactgttgtttccattcaaccaatttttaccagagatgggccactaaaattaaacgatgaaactttacatattctcttagagctgaatgatattgacaacaacaatagaagggcagacatacaatccagtacgtttactaatgacgatgatgacgacaataataccagcaacaataataaacacaataataataataacaataataataacaacaacaacaacaacaataataataacatattacacaataattatgaattaacaacatcaaagatttcggaaaaccaacttgaacatctttttcaagcatcttcctcctccttggacatggagatggaaatcgaaaactggtataaggaaattttgaatatagccacggtgaaagatgttcaaagaaagcatgcactactaagaaacttcagagaaaccaagatattcacatatctgctacaaaattcctcagaatcttttcataaaaatgtcttttctttgttgaaggagtgcttaacgacgctgtttttattactggtggctagtcctttggacgataactctctgcatattttctataaaagcaatcaggatcatattgatctgtcatattgtgacgaagatgatcaagtattttcacgaaaaaacgtatttcacgaggctgcaagttgtccagaaaaatcacgcttatttattctagatgaggctttaacaacatcaaagttatctaaagaaacagtacaaaaactactgaatgcccaagatatacattcgcgggtgccgctacattatgctgcagagctaggaaaactggaatttgttcactcgttgctaatcaccaatcttttagaggacgttgatcccattgatagtgattctaagacacccttggttttggctatcactaacaaccacatagatgttgttagggatctgctgactattggtggtgcgaacgcatcacccattgaaaagccaattctggattatagtaagaatgtaatcagctctactaaagtccagttcgatcctttaaatgttgcttgtaaatttaataatcatgacgccgccaagttacttttagaaattcggagtaagcaaaatgctgataatgccaagaacaaaagttcacaacacttgtgtcaaccgcttttcaaaaagaactcaacaggtttatgcactcttcatatagtggcaaaaattggcggcgatccacaattaattcaactattgatacgttatggggcggatcccaacgaaattgatgggtttaataaatggacgcccattttttacgctgttcgttcaggtcattctgaagttattactgaactattgaaacataatgcacgtctggatattgaagatgacaacggccattcgccacttttttacgccttatgggagagccacgttgatgttttgaatgcacttttacaaagaccattaaatttgccatctgcacccctgaatgaaataaattcgcagtctagtacgcaacgccttaatacaatagatttaaccccaaatgatgacaaatttgatttagacattcaagatagcattccggattttgctttaccaccgccaatcattccactaaggaaatatggtcataattttttggagaaaaaaattttcatcaaattaaagttgaggccaggtctcgagtctatcaagttgactcaggataacggcattattatgtcatcatcaccaggcagaattactttatcctcaaacttacctgaaataataccgcgaaatgttattttacctgttagatctggcgaaattaataacttttgtaaggatatcagtgaaacaaatgatgaagaagatgatgatgaaattagtgaagatcatgatgatggagagataattttccaagtagattcaatcgacgatttttcaatggatttcgagatatttccttcatttggcacaaggataattgccaaaacaacggcaatgccattccttttcaagaaggtggcaataaatagtattgcaaccatgaatttacccttattcgacacaagactaaataatattggatctctcactttggattaccaaattatttttccttatccgggaaatccactgaaaatcataaattatgagccgtattggaaatctacaggaagtgatttaatgacctctagtaaagacggtaattttgttacttcttcatcgttgaatggcagttttattagtgtattagtttgcgctctgaatgatgaaaccatagtggctgcgccaaaaccatacgttgaattcaaaggcacgaagattctgttaaatgatttaacgaaagaacaattggaaaaggtagtggattatgacttcggtaaaattgatggaagcttcgatgaagtaacattgaaacaatacttatcttcgagagtggtgcctctcagaagcctactagaagttattcccgggtcagcccagctggtaattcgtgtatattttcctacagataaggaaattgacacaattcccatcaaaatatcgccatttataaatatcaatcaattcattgataagcttttactaatcattttcgagcatgaacgttttttgcgtcacagcggaagtgggagtatgcgccaaatagttttcagttcatgcaattgggaagcttgctcgatccttaactggaaacaacccaattttccggttttgttgcaaatgaaaaatctactcagagattcaaccacaggcaaatttgtaggtgatactcctaattgtttaaaggaactggccgtaaatcctcaaaaaatgtcgtatttaaacacggaactaataaacatacatacaatggttcaatttgctatgaacaataatttgttaggtgtaacgcttccatatgaagtactgaagatatgcccgtcgttggctaggatcatcaaacaaaacggactactgttgattgcatcggtcggggaaaatgaccaaataccagctgatggaggttacagcgggatctactacgcttgtgagttgctttttgagaataatattgatatgtaa

SEQ ID NO: 4600 - DNA, 3537 bp, Artificial Sequence
  Description of Artificial Sequence: Synthetic polynucleotide
atgaaattcggcaagtatttggaagccaggcagttggaattggcggagtacaacagccattttattgattataaggctttgaagaaacttatcaaacaattggccattcccacgttgaaggctagttctgatttagatttgcatttaacattagatgacatcgacgaaaaaattatacatcagagattacaagaaaataaagctgcctttttttttaaattagagagggagttagaaaaagtaaatggttattatttggcgagagagtccgatttaagaataaaattcaatatattacactctaaatataaagattataagataaatggtaagttgaactccaaccaagctacctcttttaaaaacttatatgcggctttcaaaaagtttcaaaaggatcttagaaatttggagcagtatgttgagttaaataaaacgggattttccaaagctttgaagaaatgggacaagagatctcaatctcacgataaagatttttaccttgctactgttgtttccattcaaccaatttttaccagagatgggccattgaaattaaacgatgaaactttacatattctcttagagttgaatgatattgacaacaacaatagaagggcagacatacaatccagtacgtttactaatgacgatgatgacgacaataataccagcaacaataataaacacaataataataataacaataataataacaacaacaacaacaacaataataataacatattacacaataattatgaattaacaacatccaagatttctgaaaaccaacttgaacatctttttcaagcatcttcctcctccttggacatggagatggaaatcgaaaactggtataaggaaattttgaatatagccacggtgaaagatgttcaaagaaagcatgcattattaagaaacttcagagaaaccaagatattcacatatttattacaaaattccagtgaatcttttcataaaaatgtcttttctttgttgaaggagtgcttaacgacgttgtttttattattggtggctagtcctttggacgataactctttgcatattttctataaaagcaatcaggatcatattgatttatcttattgtgacgaagatgatcaagtattttctagaaaaaacgtatttcacgaggctgcaagttgtccagaaaaaagccgcttatttattttagatgaggctttaacaacatccaagttatctaaagaaacagtacaaaaattattgaatgcccaagatatacattccagagtgccgcttcattatgctgcagagttaggaaaattagaatttgttcactctttgttgatcaccaatcttttagaggacgttgatcccattgatagtgattctaagacacccttggttttggctatcactaacaaccacatagatgttgttagggatttattaactattggtggtgcgaacgcatctcccattgaaaagccaattttagattatagtaagaatgtaatcagctctactaaagtccagttcgatcctttaaatgttgcttgtaaatttaataatcatgacgccgccaagttacttttagaaattagaagtaagcaaaatgctgataatgccaagaacaaaagttctcaacacttgtgtcaaccgcttttcaaaaagaactccacaggtttatgcactcttcatatagtggcaaaaattggcggcgatccacaattaattcaattattgatacgttatggggcggatcccaacgaaattgatgggtttaataaatggacgcccattttttacgctgttcgttctggtcattctgaagttattactgaattattgaaacataatgcacgtttggatattgaagatgacaacggccattctccacttttttacgccttatgggagagccacgttgatgttttgaatgcacttttacaaagaccattaaatttgccatctgcacccttgaatgaaataaattctcagtctagtacgcaacgccttaatacaatagatttaaccccaaatgatgacaaatttgatttagacattcaagatagcattccggattttgctttaccaccgccaatcattccattaaggaaatatggtcataattttttggagaaaaaaattttcatcaaattaaagttgaggccaggtctcgagtctatcaagttgactcaggataacggcattattatgtcttcttctccaggcagaattactttatccagtaacttacctgaaataataccgagaaatgttattttacctgttagatctggcgaaattaataacttttgtaaggatatcagtgaaacaaatgatgaagaagatgatgatgaaattagtgaagatcatgatgatggagagataattttccaagtagattctatcgacgatttttccatggatttcgagatatttccttcttttggcacaaggataattgccaaaacaacggcaatgccattccttttcaagaaggtggcaataaatagtattgcaaccatgaatttacccttattcgacacaagattgaataatattggatctctcactttggattaccaaattatttttccttatccgggaaatccattgaaaatcataaattatgagccgtattggaaatctacaggaagtgatttaatgacctctagtaaagacggtaattttgttacttcttcttctttgaatggcagttttattagtgtattagtttgcgctttgaatgatgaaaccatagtggctgcgccaaaaccatacgttgaattcaaaggcacgaagattttattaaatgatttaacgaaagaacaattggaaaaggtagtggattatgacttcggtaaaattgatggaagcttcgatgaagtaacattgaaacaatacttatcttctagagtggtgcctctcagaagcttgttggaagttattcccgggtctgcccagttggtaattcgtgtatattttcctacagataaggaaattgacacaattcccatcaaaatatctccatttataaatatcaatcaattcattgataagcttttattgatcattttcgagcatgaacgttttttgcgtcacagcggaagtgggagtatgcgccaaatagttttcagttcctgcaattgggaagcttgctccatccttaactggaaacaacccaattttccggttttgttgcaaatgaaaaatttactcagagattctaccacaggcaaatttgtaggtgatactcctaattgtttaaaggaattggccgtaaatcctcaaaaaatgtcttatttaaacacggaattgataaacatacatacaatggttcaatttgctatgaacaataatttgttaggtgtaacgcttccatatgaagtattgaagatatgcccgtctttggctaggatcatcaaacaaaacggacttttattgattgcatctgtcggggaaaatgaccaaataccagctgatggaggttacagcgggatctactacgcttgtgagttgctttttgagaataatattgatatgtga

SEQ ID NO: 4601 - DNA, 1200 bp, Saccharomyces cerevisiae
atgctagccgaaaaaacccgttccataatcaaagcaaccgttcctgttttggaacagcagggcactgtcatcacgcgtacattctacaaaaatatgcttactgaacacaccgaattacttaatatttttaacagaactaatcaaaaggttggcgcacaaccaaatgccttggccactactgttttggcagcggctaagaacattgacgatttgtctgtgcttatggaccatgtcaagcaaattggccacaagcatcgtgccttgcaaattaaacctgagcattatccaatcgttggtgagtacttgttaaaagcaatcaaggaagttttaggcgatgctgcgactccagagataattaatgcatggggcgaggcttaccaagcaattgctgacatcttcatcactgttgaaaaaaaaatgtacgaagaagctttatggccaggttggaaaccatttgacattactgccaaagagtacgttgcttcagatattgttgaatttactgttaagccaaagttcggttctggtattgaattggaaagcttgccaatcactccaggtcagtatattacggtaaacactcacccaattagacaggaaaaccaatacgacgctttaagacactactctctttgttctgcttcaactaaaaatggtttacgatttgcagtaaagatggaagctgccagagaaaattttcctgcaggattagtctctgaatatttacacaaggacgctaaagttggtgatgaaattaagcttagtgctccggctggtgatttcgcaataaataaagagttgatacaccaaaacgaagttccattggtgttactatcgtctggtgttggtgttacaccacttttagctatgttagaagaacaagtcaaatgcaacccaaataggccaatttactggattcaatcttcctatgatgaaaagactcaagcattcaaaaaacatgtagatgaactattagctgaatgtgcgaatgtcgacaaaataattgttcatactgatactgaaccactgattaatgctgcattcttgaaggaaaagtcacctgcgcatgccgatgtctacacttgcggctctttagcttttatgcaagctatgattggtcatctaaaagaactagagcatcgtgatgatatgattcactatgaaccatttggtccaaagatgtcaaccgtgcaagtttag

SEQ ID NO: 4602 - DNA, 1200 bp, Artificial Sequence
  Description of Artificial Sequence: Synthetic polynucleotide
atgttggccgaaaaaacccgttccataatcaaagcaaccgttcctgttttggaacagcagggcactgtcatcacgcgtacattctacaaaaatatgcttactgaacacaccgaattacttaatatttttaacagaactaatcaaaaggttggcgcacaaccaaatgccttggccactactgttttggcagcggctaagaacattgacgatttgtctgtgcttatggaccatgtcaagcaaattggccacaagcatcgtgccttgcaaattaaacctgagcattatccaatcgttggtgagtacttgttaaaagcaatcaaggaagttttaggcgatgctgcgactccagagataattaatgcatggggcgaggcttaccaagcaattgctgacatcttcatcactgttgaaaaaaaaatgtacgaagaagctttatggccaggttggaaaccatttgacattactgccaaagagtacgttgcttctgatattgttgaatttactgttaagccaaagttcggttctggtattgaattggaaagcttgccaatcactccaggtcagtatattacggtaaacactcacccaattagacaggaaaaccaatacgacgctttaagacactactctctttgttctgcttccactaaaaatggtttaagatttgcagtaaagatggaagctgccagagaaaattttcctgcaggattagtctctgaatatttacacaaggacgctaaagttggtgatgaaattaagcttagtgctccggctggtgatttcgcaataaataaagagttgatacaccaaaacgaagttccattggtgttattatcttctggtgttggtgttacaccacttttagctatgttagaagaacaagtcaaatgcaacccaaataggccaatttactggattcaatcttcctatgatgaaaagactcaagcattcaaaaaacatgtagatgaattattagctgaatgtgcgaatgtcgacaaaataattgttcatactgatactgaaccattgattaatgctgcattcttgaaggaaaagtctcctgcgcatgccgatgtctacacttgcggctctttagcttttatgcaagctatgattggtcatttgaaagaattagagcatcgtgatgatatgattcactatgaaccatttggtccaaagatgtctaccgtgcaagtttga

SEQ ID NO: 4603 - DNA, 702 bp, Saccharomyces cerevisiae
atgacaaaagatttttaccgtcagctagatcccgttgaggagaagattgttccaccagaaaacgctatagtaatttcttcggaggccaaagaggctactgttaatgagaaggaagccaagcaaggtgttctttcgcaaagggttatgaaatatattggagaaaatgagctggtagacggtatttcagtacgtgatcctgactacttgaagaggtttttcaacgaaagaagaaaacaattttccgctaaatgggacaaggtgacaaataaaatagatgatatcgcaggcagatattatgcccgtgaagagagctttacatcaacaattgctagtttacataccgatccaaacgagcgcctaataccggggttgttgtccattttggttgcttccatgacaggttccgttttggcaagaagaagaacatggcttcttcgtgcaaccatgcccattatactggggtcttgttgttttgcgtatgcaatgccaacaaccttcaggaacaccatgggtctcatccataatctagaaatgaacacctttccacactttaccgaaagacaagatcgtgtttggaaagaaacaaagagattaagtaccgcgtctgtgcaatactactatgatgccaaaaaatggttgaacaaagatgtagaaaaaacagggaatgcaatcaaaaattggactggcgttaacgtgaagtga

SEQ ID NO: 4604 - DNA, 702 bp, Artificial Sequence
  Description of Artificial Sequence: Synthetic polynucleotide
atgacaaaagatttttaccgtcagttagatcccgttgaggagaagattgttccaccagaaaacgctatagtaatttcttctgaggccaaagaggctactgttaatgagaaggaagccaagcaaggtgttctttctcaaagggttatgaaatatattggagaaaatgagttggtagacggtattagtgtacgtgatcctgactacttgaagaggtttttcaacgaaagaagaaaacaattttccgctaaatgggacaaggtgacaaataaaatagatgatatcgcaggcagatattatgcccgtgaagagagctttacatctacaattgctagtttacataccgatccaaacgagcgcttaataccggggttgttgtccattttggttgcttccatgacaggttccgttttggcaagaagaagaacatggcttcttcgtgcaaccatgcccattatattagggtcttgttgttttgcgtatgcaatgccaacaaccttcaggaacaccatgggtctcatccataatttggaaatgaacacctttccacactttaccgaaagacaagatcgtgtttggaaagaaacaaagagattaagtaccgcgtctgtgcaatactactatgatgccaaaaaatggttgaacaaagatgtagaaaaaacagggaatgcaatcaaaaattggactggcgttaacgtgaagtga

SEQ ID NO: 4605 - DNA, 288 bp, Saccharomyces cerevisiae
atgaagttagattcaggaatatactcagaggcacaaagagttgtgagaactccaaagtttagatatattatgttagggctggtgggcgctgctgtggtaccgaccgcatacatgaggagaggctatacggttcctgcacatagcttagacaacatcaacggcgtagacacaactaaggcgtctgttatgggtacagaacagagagcagctatgacgaagggtaagagtttacaagagatgatggatgatgatgaagtaacgtatttgatgttctcttcaatcatgtaa

SEQ ID NO: 4606 - DNA, 288 bp, Artificial Sequence
  Description of Artificial Sequence: Synthetic polynucleotide
atgaagttagattctggaatatactctgaggcacaaagagttgtgagaactccaaagtttagatatattatgttagggttagtgggcgctgctgtggtaccgaccgcatacatgaggagaggctatacggttcctgcacatagcttagacaacatcaacggcgtagacacaactaaggcgtctgttatgggtacagaacagagagcagctatgacgaagggtaagagtttacaagagatgatggatgatgatgaagtaacgtatttgatgttctcttctatcatgtga

SEQ ID NO: 4607 - DNA, 2358 bp, Saccharomyces cerevisiae
atgtcatctgcaaagacatttactaagcatatctcgtttgatgatctggcaccttccttaattgatgaccaagctaccattattaaaaatgacagtcaccatgttggcttgaataatcattttttacatatacctccacaatttaatcctgtttacaaaaatactttgaccggtagccatggctctaatgaccttgccactgacgaaagcttggactcacccgaagacgaagaagcttcttcgccactacaactaggaactccaacgtctacaacatctggagttcctcacttctatactcaggtattttctcctgcagcacatgatccctccaaaagctatttgagatcgcccagcgttgaaagaagtagaagtgagtctccaatgttcaggtcaagaagaaggacttcagtgaggttgcctccccctccaaaagtatccgtgctaaaaaaatctcgaaaagctgctgatgaacagggccctattgatgatattgatattggtgatttggattttgagctggaaagaaaaatgaccaaaatgaccgaaagaaacactcaaaaaaattctggatcaaggaaaggctatacgcaagctgcatttgccaatcttaatgaagttgaagatagaattgagaccaagtcaatggtagatttatccgaaagcgaaaatatggagagctcaaagaaaaggtccaagtcgtttgccgggatgacagacgaagaattagccaaattagaggaattttatataagtaaaggaagatcgaacaagactaaaatagatcaatttgattttggtgagcaagttccagtctatttgaacacaacagagtcaaaaacggattcaagcaacgtgacggaccctttagcagcaatttatccatcaaggcctacaattgttcacaatgcaatttcaatgacaattgatcatccagactatgaaaattatatttccaatacaaaagaaaagctcaattgcaaagacaaagatgacgatgtagatttaagagttgtttcgtgttatatatcaggtaggagatatacttggtcatctgtggactggtatgttgaaaatttgacaagaaatggtgatcatttagtcataattactacaattcctgagtttgaagcaaagattgatactctagcatataaggagaaaagaaggcaccgcttagaaaggatgactagcaatactagtgaaagcatgactaccgcgtcacatagccttataggcccggatctctctagtcctttatcaacgggaataagaatagaagctattcataatgaggctaagcaaacttgtagcgatattttaaattactacgcgagaagattggcaactaaaatagttaggattagtattgagatggtaaaagaaaattcaacaagatcagccataatatctgcgacctctctgtataggccaagtttgcaagtaatcagcaccgttagtgccaacattcaaatcaagtttagaaatggaaaagtgaaactaccattttttttaatgaaacactttgcaatgccagcatttgttgtcccattcgaattcatcaagcctgagcttttaataaaacctagagtggataaagatgaacaggacaacagcgatgatttgaaaacggaagtgagaaaaaaggaacgattgcaatggctaagtgcattaatcaggagaactttggaaaaccctttcacaaaacataaagtggttgattcggatgatgaagaaagcgatagtgatgagtcagtaacctctgtaaatgagtacttcccaatctcacctgaaaaaaaggaagaaatggaattcttcgataagatgggatatgttagaccaaaaccgtcgagacaagtactattggatgataacactcttatgaagtacgacagttctggccgaaagctaactcctatagaatcgagaaattcgaggcgcagctcaaagcggagttcaagaatacaattcaacaataacggcatttataaagtaaagtccatggttgatgacatttacaaccacgaaactgcctctacgcctcatatcaagacagcactaaaatgggacaatgaggatccgaaaatgaagttcacttcacatccaatgagaaaaacaaaatccgcagggctatcacccagaacatcctccacttcatcttcttcaggacagagaaaagcgcatcaccaccaccatcaccacaaccacgtttcaaggacgaaaactaccgaaagcaccaaatcaggcaacagcaaaaaggacagttcctcatcctcaacaaacgaccatcaatttaaaaggtctgaaaagaagaaaaaaagtaaatttggctcgatcttcaaaaaagttttcggatga

SEQ ID NO: 4608 - DNA, 2358 bp, Artificial Sequence
  Description of Artificial Sequence: Synthetic polynucleotide
atgtcttctgcaaagacatttactaagcatatctcttttgatgatttggcaccttccttaattgatgaccaagctaccattattaaaaatgacagtcaccatgttggcttgaataatcattttttacatatacctccacaatttaatcctgtttacaaaaatactttgaccggtagccatggctctaatgaccttgccactgacgaaagcttggactctcccgaagacgaagaagcttcttctccattgcaattaggaactccaacgtctacaacatctggagttcctcacttctatactcaggtattttctcctgcagcacatgatccctccaaaagctatttgagatctcccagcgttgaaagaagtagaagtgagtctccaatgttcaggagcagaagaaggacttctgtgaggttgcctccccctccaaaagtatccgtgttgaaaaaatctagaaaagctgctgatgaacagggccctattgatgatattgatattggtgatttggattttgagttagaaagaaaaatgaccaaaatgaccgaaagaaacactcaaaaaaattctggatctaggaaaggctatacgcaagctgcatttgccaatcttaatgaagttgaagatagaattgagaccaagtctatggtagatttatccgaaagcgaaaatatggagagctctaagaaaaggtccaagagctttgccgggatgacagacgaagaattagccaaattagaggaattttatataagtaaaggaagatctaacaagactaaaatagatcaatttgattttggtgagcaagttccagtctatttgaacacaacagagagtaaaacggattctagcaacgtgacggaccctttagcagcaatttatccatctaggcctacaattgttcacaatgcaatttccatgacaattgatcatccagactatgaaaattatatttccaatacaaaagaaaagctcaattgcaaagacaaagatgacgatgtagatttaagagttgtttcttgttatatatctggtaggagatatacttggtcttctgtggactggtatgttgaaaatttgacaagaaatggtgatcatttagtcataattactacaattcctgagtttgaagcaaagattgatactttggcatataaggagaaaagaaggcaccgcttagaaaggatgactagcaatactagtgaaagcatgactaccgcgtctcatagccttataggcccggatctctctagtcctttatctacgggaataagaatagaagctattcataatgaggctaagcaaacttgtagcgatattttaaattactacgcgagaagattggcaactaaaatagttaggattagtattgagatggtaaaagaaaattctacaagatctgccataatatctgcgacctctttgtataggccaagtttgcaagtaatcagcaccgttagtgccaacattcaaatcaagtttagaaatggaaaagtgaaattaccattttttttaatgaaacactttgcaatgccagcatttgttgtcccattcgaattcatcaagcctgagcttttaataaaacctagagtggataaagatgaacaggacaacagcgatgatttgaaaacggaagtgagaaaaaaggaaagattgcaatggttgagtgcattaatcaggagaactttggaaaaccctttcacaaaacataaagtggttgattctgatgatgaagaaagcgatagtgatgagagtgtaacctctgtaaatgagtacttcccaatctctcctgaaaaaaaggaagaaatggaattcttcgataagatgggatatgttagaccaaaaccgtccagacaagtacttttggatgataacactcttatgaagtacgacagttctggcagaaagttgactcctatagaatctagaaattctaggcgcagctctaagagaagtagtagaatacaattcaacaataacggcatttataaagtaaagtccatggttgatgacatttacaaccacgaaactgcctctacgcctcatatcaagacagcattgaaatgggacaatgaggatccgaaaatgaagttcacttctcatccaatgagaaaaacaaaatccgcagggctttctcccagaacatcctccacttcttcttcttctggacagagaaaagcgcatcaccaccaccatcaccacaaccacgtttccaggacgaaaactaccgaaagcaccaaatctggcaacagcaaaaaggacagttcctcctcctctacaaacgaccatcaatttaaaaggtctgaaaagaagaaaaaaagtaaatttggctccatcttcaaaaaagttttcggatga

SEQ ID NO: 4609 - DNA, 2649 bp, Saccharomyces cerevisiae
atggtacctttcaagctgacaaataaggtacctacggacacgggaccttctctgatttcagcgcaaagtgtacccagaccaatagtttttatggataatcgaaacaatacgcgaatagtaacacctacgctacctccaaaccagcatagaggcatatcaggcgcgtcgactgctcttccctggtctccagagagtaagaatacagggaagtatatttggaatagggtcaaactaaaaaactctccgtttccccgttatcgacactcttcctcatttattgttacgaatgataacaggatttttgtgaccggtggacttcacgatcaatcggtatatggggatgtctggcaaatagccgctaacgcggatggtacgagctttacttccaagagaatcgatattgatcaaaatacacctcccccaagagtgggacatgcctctactatatgcggtaatgcctatgttgtgtttggtggcgacacacacaagctgaataagaacggactgttggatgatgatctttatcttttcaatattaattcttataagtggaccataccacaacctatcggccgtaggccgttgggcaggtacggccataaaatttctataattgctagcaaccctatgcaaactaaactatatctttttggcggacaagtagatgaaacttattttaacgatctggtcgtctttgatttatcatcattccgtaggccgaattctcattgggaatttttagagcctgtcggcgacctgcctcctcctttaacaaatcatacaatggtggcatatgacaacaaattatgggtattcggcggggaaactcccaagacaataagcaatgatacataccgctacgatccagcacaaagtgagtggtctaaagttaaaaccacaggagaaaagcctccgccaatacaagagcatgctagtgtggtgtataaacatttaatgtgtgtgttaggcggtaaggatacccataacgcatattccaacgatgtctattttttaaacttattatcgctaaaatggtataagcttccccgtatgaaggagggcatacctcaagaacgctctggacattctttaaccttaatgaagaatgagaagcttcttatcatgggtggcgacaaaactgactatgccagcccaaatattcacgatctacaaacttcagaaactgaccaaggcgaaggaactttactgtataccttagatttatcatctttgaatgagctatgcccaggaataatgtgtgaatcactacatgcaggagaaagtttttctaatagtctttccgggggctttacaccctctaagtctaccgaaagtgaaaatcaagagataataaacattcttacaccaagattgcctgatagcaaagttttgagttataatgatattgatgaaggggctggaagttactccagcgctttggatgataaggcatttgaacgaaaatcagatagggaggaaaagaaaccccaatcttccaaagttgattcaagcatcaataaggaaagtccgggaactggtatcaaagtatctaaaaaaaatttccctgttctacgaggactaacagtggattcagaagagtatggctcttcttcatataaggacacatcatgtcaaaaaggaattcccaaaaatctttttgatgatttaaacctgaacctacaaacattacgtctcgaagctcaacaaaaggaacttgaaactgctagacatatttcacaattagaaaaggaagtccagagactcatggtaataaaagaagcttcaaaagattcaaattttcaaacagcacggcttaaaaatctagaaattcagaaaacctttttagaatctagaattaatgatttaaaaaatttattgatggtcaaattatctcaggcaagtaaactctgtgaccaaattacgattcaaaataatggacttaaaacatgctccgaacatgtcactattaaaagggatatcatcgatcttgagaataaatgtgatgttttgaagcgccagaacgaaatacttgtaaataatatgcaaaaaataacccccgaacttcatacctatttgaacgaatcgtcctgctatctgggtaaattattaaaaagctatcctaccagtgcacggccaccttcaagtgagaaagataatcaaatatatgagaaagattcgctgaacaaaatagaaaaagtaataaatgaaatgcacgaaaccgtgcgtgctaaagagaaattgcaccttgaaactcagaagcttaatgatgaaagagattctttgcgggctaatttactcgacaataacaacaagttggatgcgctaagaaaactctctgatggaagctcgaagtctatggacctaacaaagaaggctattcacctatcacaatccgagctcgaaaaatatcgtaaaaacaacgacgatttacagaaggagattgatagaattaaaactgaacaagctgaacaggatgacaagcaggaacagcgtggcgccatcactcatggaaattttgatgcgttccacagaatgaaaatcaacaatctgaaagcggaactgtatatgtcgaaagaaaatagagattccctcaaggacgaactgctagctttaaaaaaaaaactatatactctcgaacaaaaaaaatag

SEQ ID NO: 4610 - DNA, 2649 bp, Artificial Sequence
  Description of Artificial Sequence: Synthetic polynucleotide
atggtacctttcaagttaacaaataaggtacctacggacacgggaccttctttgattagtgcgcaaagtgtacccagaccaatagtttttatggataatagaaacaatacgagaatagtaacacctacgttacctccaaaccagcatagaggcatatctggcgcgtctactgctcttccctggtctccagagagtaagaatacagggaagtatatttggaatagggtcaaattgaaaaactctccgtttccccgttatagacactcttcctcttttattgttacgaatgataacaggatttttgtgaccggtggacttcacgatcaaagtgtatatggggatgtctggcaaatagccgctaacgcggatggtacgagctttacttccaagagaatcgatattgatcaaaatacacctcccccaagagtgggacatgcctctactatatgcggtaatgcctatgttgtgtttggtggcgacacacacaagttgaataagaacggattattggatgatgatctttatcttttcaatattaattcttataagtggaccataccacaacctatcggccgtaggccgttgggcaggtacggccataaaatttctataattgctagcaaccctatgcaaactaaactttatctttttggcggacaagtagatgaaacttattttaacgatttggtcgtctttgatttatcttctttccgtaggccgaattctcattgggaatttttagagcctgtcggcgacttgcctcctcctttaacaaatcatacaatggtggcatatgacaacaaattatgggtattcggcggggaaactcccaagacaataagcaatgatacataccgctacgatccagcacaaagtgagtggtctaaagttaaaaccacaggagaaaagcctccgccaatacaagagcatgctagtgtggtgtataaacatttaatgtgtgtgttaggcggtaaggatacccataacgcatattccaacgatgtctattttttaaacttattaagtttgaaatggtataagcttccccgtatgaaggagggcatacctcaagaacgctctggacattctttaaccttaatgaagaatgagaagcttcttatcatgggtggcgacaaaactgactatgccagcccaaatattcacgatttgcaaacttctgaaactgaccaaggcgaaggaactttattatataccttagatttatcttctttgaatgagctctgcccaggaataatgtgtgaatctttgcatgcaggagaaagtttttctaatagtctttccgggggctttacaccctctaagtctaccgaaagtgaaaatcaagagataataaacattcttacaccaagattgcctgatagcaaagttttgagttataatgatattgatgaaggggctggaagttactccagcgctttggatgataaggcatttgaaagaaaatctgatagggaggaaaagaaaccccaatcttccaaagttgattctagcatcaataaggaaagtccgggaactggtatcaaagtatctaaaaaaaatttccctgttttaagaggattaacagtggattctgaagagtatggctcttcttcttataaggacacatcttgtcaaaaaggaattcccaaaaatctttttgatgatttaaacttgaacttacaaacattacgtctcgaagctcaacaaaaggaacttgaaactgctagacatatttctcaattagaaaaggaagtccagagactcatggtaataaaagaagcttccaaagattctaattttcaaacagcaagacttaaaaatttggaaattcagaaaacctttttagaatctagaattaatgatttaaaaaatttattgatggtcaaattatctcaggcaagtaaactctgtgaccaaattacgattcaaaataatggacttaaaacatgctccgaacatgtcactattaaaagggatatcatcgatcttgagaataaatgtgatgttttgaagcgccagaacgaaatacttgtaaataatatgcaaaaaataacccccgaacttcatacctatttgaacgaatcttcctgctatttgggtaaattattaaaaagctatcctaccagtgcaagaccaccttctagtgagaaagataatcaaatatatgagaaagattctttgaacaaaatagaaaaagtaataaatgaaatgcacgaaaccgtgcgtgctaaagagaaattgcaccttgaaactcagaagcttaatgatgaaagagattctttgagagctaatttactcgacaataacaacaagttggatgcgttaagaaaactctctgatggaagctctaagtctatggacttgacaaagaaggctattcacttatctcaatccgagctcgaaaaatatcgtaaaaacaacgacgatttacagaaggagattgatagaattaaaactgaacaagctgaacaggatgacaagcaggaacagcgtggcgccatcactcatggaaattttgatgcgttccacagaatgaaaatcaacaatttgaaagcggaattgtatatgtccaaagaaaatagagattccctcaaggacgaattattagctttaaaaaaaaaactttatactctcgaacaaaaaaaatga

SEQ ID NO: 4611 - DNA, 867 bp, Saccharomyces cerevisiae
atgcccagtgtctgccatacaagcccgatagaaaagattatccaacaagggcatcgcatacagaatgattccttaataccgtcaaaacgcaccaagctggcccatacggaattaacagcacactatgccactgaagactcgcatgtggaaaaacactttttgcataatggtagtaattttgacggcattgacaatgtaaggtatcaaaatcaaccctctccattaaccttcattactccaaacaacactgtagattccagtgattgggttccgcagttctcgtctatgaagattgacgattcactagagtttagctcagaatataaaaggttgtattccaattacgagtcacagcagcgcctgaattcaagcagacaacacttaccttttaagaattgtatgataaggaagacaagttgcacttacccacctcaaaagacgcttcgacagcaacgccaaggaaaccgggacaacccaacggatgcgtttcaattcgacgcggagttccaagttttggagagagaaattcaaaaagagcggtacgagcccataacacgtcgggacgagaaatggttcgaccaagatcagtcggaactgcaaaggattgccacagatatagtaaaatgctgtactccaccgccttcgtctgcatcctcctcttctactctttcctcctctgtcgaatcaaaactatctgagtcgaagtttattcagttaatgagaaacattagtagcggtgacgtgactttaaagaaaaatgcagatggaaattccgcaagcgagttattctcatccaacaacggggaactggtcggaaacaggcacattttcgtcaaggacgaaattcacaaagacatacttgattga

SEQ ID NO: 4612 - DNA, 867 bp, Artificial Sequence
  Description of Artificial Sequence: Synthetic polynucleotide
atgcccagtgtctgccatacaagcccgatagaaaagattatccaacaagggcatcgcatacagaatgattccttaataccgtccaaacgcaccaagttggcccatacggaattaacagcacactatgccactgaagactctcatgtggaaaaacactttttgcataatggtagtaattttgacggcattgacaatgtaaggtatcaaaatcaaccctctccattaaccttcattactccaaacaacactgtagattccagtgattgggttccgcagttcagttctatgaagattgacgattctttggagtttagctctgaatataaaaggttgtattccaattacgagagccagcagcgcttgaatagtagcagacaacacttaccttttaagaattgtatgataaggaagacaagttgcacttacccacctcaaaagacgcttcgtcagcaacgccaaggaaacagagacaacccaacggatgcgtttcaattcgacgcggagttccaagttttggagagagaaattcaaaaagagagatacgagcccataacacgtagagacgagaaatggttcgaccaagatcagtctgaattacaaaggattgccacagatatagtaaaatgctgtactccaccgccttcttctgcatcctcctcttctactctttcctcctctgtcgaaagtaaattatctgagtctaagtttattcagttaatgagaaacattagtagcggtgacgtgactttaaagaaaaatgcagatggaaattccgcaagcgagttattctcttccaacaacggggaattggtcggaaacaggcacattttcgtcaaggacgaaattcacaaagacatacttgattga

SEQ ID NO: 4613 - DNA, 2964 bp, Saccharomyces cerevisiae
atgcaatctcaagattcatgctacggtgttgcattcagatctatcatcacaaatgatgaagctttattcaagaagaccattcacttttatcacactctaggatttgcaactgtgaaagatttcaacaaattcaaacatggtgaaaatagcttactatcttcagggacttcccaagattccttgagagaagtttggttagaatctttcaagttgagtgaggttgatgcttctgggttccgtataccacaacaagaagctactaacaaggctcaaagtcaaggtgctctattaaagattcgtttagtgatgtctgctccaatcgatgaaactttcgacaccaacgaaaccgccacaatcacttatttctctactgatttgaacaagattgtcgagaaattcccaaaacaagccgaaaaattgtccgataccttagtgtttttgaaagatccaatgggcaacaacatcaccttctcaggcttagctaatgcaaccgattccgctccaacttccaaagatgctttcttagaagctacctccgaagacgaaatcatctctagagcttcttccgatgcttctgacttactaagacaaacattgggctcttctcaaaagaagaagaagattgctgtcatgacttctggtggtgattctccaggtatgaatgccgctgttcgtgccgttgttcgtacaggtatacatttcggctgtgatgtttttgctgtttacgaaggttacgaaggtttactaagaggcggtaaatatttaaagaaaatggcttgggaagatgtcagaggttggttaagtgaaggtggtactttgattggtactgctcgttctatggaattcagaaagcgtgagggtcgtagacaagctgcaggcaatttaatttcgcaaggtattgacgctttggttgtttgtggtggtgatggttctttaaccggtgctgatcttttcagacacgaatggccatctttggttgatgaattggttgcagaaggtagattcactaaagaagaagtcgccccatacaagaatttgtccattgttggtcttgtcggttccatcgataatgatatgtctggtactgactctaccattggtgcttattctgctttggaaagaatctgtgaaatggttgactacattgatgccaccgctaaatcccactcccgtgcctttgttgttgaagttatgggtagacattgtggttggttggccttgatggctggtattgctaccggtgccgattacatttttattccagaaagagctgttcctcacggaaaatggcaggacgaattgaaggaagtgtgccaaagacacagaagtaagggtagaagaaataacacaattattgtcgctgaaggtgctttagatgatcaattaaaccctgttactgccaatgacgtcaaagatgctttgattgaattgggtctagacaccaaggtaaccattctaggtcacgttcaaagaggtggtacagctgttgctcatgacagatggttagctactctacaaggtgtcgatgctgttaaggccgttctggaatttacccctgaaactccttctccattaattggtattttagaaaacaagataattagaatgccattggttgaatctgtgaagttgactaaatctgttgccactgccattgaaaacaaagatttcgataaggcaatttctttaagagacacagaatttattgaactttacgaaaacttcttatccactaccgttaaagatgatggttccgaattattgccagtatctgacagactaaacattggtattgtccatgttggtgccccatctgctgctttgaacgctgccacccgtgccgcaactctatactgtttgtctcacggccataaaccatacgctatcatgaatggtttcagtggattgattcaaaccggtgaagtgaaggaactatcatggattgatgtcgaaaactggcataacttgggtggttccgaaatcggtacgaacagatctgttgcttcagaagatttgggtaccattgcttactacttccaaaagaacaagctagacggtttgattattcttggtggttttgaaggtttcaggtccttgaagcaattgcgtgacggtagaacccaacacccaatctttaacattccaatgtgtttgattccagccactgtttctaacaacgttccaggtactgaatactcacttggtgttgatacctgtttgaacgcattagtcaattacactgatgacatcaaacagagtgcttctgcgacaagaagaagagtcttcgtctgtgaagtccaaggtggtcactctggttacatcgcttctttcactggtttaatcactggtgctgtttcagtgtacactccagaaaagaagatcgacttagcttctatcagagaagatataactctattaaaagagaactttcgtcacgacaaaggtgaaaacagaaacggtaagctattggttagaaacgaacaagcttctagcgtatatagcactcaattgttggctgacatcatctctgaagcaagcaagggtaagtttggtgttagaactgctatcccaggccatgttcaacaaggtggtgttccatcttctaaagaccgtgtcaccgcttccagatttgctgtcaaatgtatcaagtttatcgaacaatggaacaagaaaaatgaagcttctccaaacactgacgctaaggttttgagattcaagttcgatactcacggtgaaaaggtaccaactgttgagcacgaagatgactctgctgctgttatctgtgttaatggttctcacgtttccttcaagccaattgctaacctttgggaaaacgaaaccaacgttgaattaagaaagggttttgaagttcactgggctgaatacaacaagattggtgacatcctgtccggtagattaaagttgagagctgaggtagccgctttagccgctgaaaacaaatga

SEQ ID NO: 4614 - DNA, 2964 bp, Artificial Sequence
  Description of Artificial Sequence: Synthetic polynucleotide
atgcaatctcaagattcctgctacggtgttgcattcagatctatcatcacaaatgatgaagctttattcaagaagaccattcacttttatcacactttgggatttgcaactgtgaaagatttcaacaaattcaaacatggtgaaaatagcttattatcttctgggacttcccaagattccttgagagaagtttggttagaatctttcaagttgagtgaggttgatgcttctgggttccgtataccacaacaagaagctactaacaaggctcaaagtcaaggtgctttattaaagattcgtttagtgatgtctgctccaatcgatgaaactttcgacaccaacgaaaccgccacaatcacttatttctctactgatttgaacaagattgtcgagaaattcccaaaacaagccgaaaaattgtccgataccttagtgtttttgaaagatccaatgggcaacaacatcaccttcagtggcttagctaatgcaaccgattccgctccaacttccaaagatgctttcttagaagctacctccgaagacgaaatcatctctagagcttcttccgatgcttctgacttattaagacaaacattgggctcttctcaaaagaagaagaagattgctgtcatgacttctggtggtgattctccaggtatgaatgccgctgttcgtgccgttgttcgtacaggtatacatttcggctgtgatgtttttgctgtttacgaaggttacgaaggtttattaagaggcggtaaatatttaaagaaaatggcttgggaagatgtcagaggttggttaagtgaaggtggtactttgattggtactgctcgttctatggaattcagaaagcgtgagggtcgtagacaagctgcaggcaatttaatttctcaaggtattgacgctttggttgtttgtggtggtgatggttctttaaccggtgctgatcttttcagacacgaatggccatctttggttgatgaattggttgcagaaggtagattcactaaagaagaagtcgccccatacaagaatttgtccattgttggtcttgtcggttccatcgataatgatatgtctggtactgactctaccattggtgcttattctgctttggaaagaatctgtgaaatggttgactacattgatgccaccgctaaatcccactcccgtgcctttgttgttgaagttatgggtagacattgtggttggttggccttgatggctggtattgctaccggtgccgattacatttttattccagaaagagctgttcctcacggaaaatggcaggacgaattgaaggaagtgtgccaaagacacagaagtaagggtagaagaaataacacaattattgtcgctgaaggtgctttagatgatcaattaaaccctgttactgccaatgacgtcaaagatgctttgattgaattgggtttggacaccaaggtaaccattttgggtcacgttcaaagaggtggtacagctgttgctcatgacagatggttagctactttacaaggtgtcgatgctgttaaggccgttttggaatttacccctgaaactccttctccattaattggtattttagaaaacaagataattagaatgccattggttgaatctgtgaagttgactaaatctgttgccactgccattgaaaacaaagatttcgataaggcaatttctttaagagacacagaatttattgaactttacgaaaacttcttatccactaccgttaaagatgatggttccgaattattgccagtatctgacagattgaacattggtattgtccatgttggtgccccatctgctgctttgaacgctgccacccgtgccgcaactttgtactgtttgtctcacggccataaaccatacgctatcatgaatggtttcagtggattgattcaaaccggtgaagtgaaggaattatcttggattgatgtcgaaaactggcataacttgggtggttccgaaatcggtacgaacagatctgttgcttctgaagatttgggtaccattgcttactacttccaaaagaacaagttggacggtttgattattcttggtggttttgaaggtttcaggtccttgaagcaattgcgtgacggtagaacccaacacccaatctttaacattccaatgtgtttgattccagccactgtttctaacaacgttccaggtactgaatactctcttggtgttgatacctgtttgaacgcattagtcaattacactgatgacatcaaacagagtgcttctgcgacaagaagaagagtcttcgtctgtgaagtccaaggtggtcactctggttacatcgcttctttcactggtttaatcactggtgctgtttctgtgtacactccagaaaagaagatcgacttagcttctatcagagaagatataactttattaaaagagaactttcgtcacgacaaaggtgaaaacagaaacggtaagttgttggttagaaacgaacaagcttctagcgtatatagcactcaattgttggctgacatcatctctgaagcaagcaagggtaagtttggtgttagaactgctatcccaggccatgttcaacaaggtggtgttccatcttctaaagaccgtgtcaccgcttccagatttgctgtcaaatgtatcaagtttatcgaacaatggaacaagaaaaatgaagcttctccaaacactgacgctaaggttttgagattcaagttcgatactcacggtgaaaaggtaccaactgttgagcacgaagatgactctgctgctgttatctgtgttaatggttctcacgtttccttcaagccaattgctaacctttgggaaaacgaaaccaacgttgaattaagaaagggttttgaagttcactgggctgaatacaacaagattggtgacatcttgtccggtagattaaagttgagagctgaggtagccgctttagccgctgaaaacaaatga

SEQ ID NO: 4615 - DNA, 201 bp, Saccharomyces cerevisiae
atgatactatccaaacatgtaaattttacgtaccatacatataacctcatctataatttttaccctgatctaactaactttggcatgcctggttcaatctacgggttacagtcatcgttgaaaacgatggaaaaacatgtcgagattcctcaatccatacaccattatagtccgttttatcagcttccactaattttttaa

SEQ ID NO: 4616 - DNA, 201 bp, Artificial Sequence
  Description of Artificial Sequence: Synthetic polynucleotide
atgatattatccaaacatgtaaattttacgtaccatacatataacctcatctataatttttaccctgatttgactaactttggcatgcctggttctatctacgggttacagtcttctttgaaaacgatggaaaaacatgtcgagattcctcaatccatacaccattatagtccgttttatcagcttccattgattttttga

SEQ ID NO: 4617 - DNA, 1707 bp, Saccharomyces cerevisiae
atgtcttcattatatactaagttggttaaaggggcgaccaaaataaagatggcccctccaaagcaaaaatatgtggaccctattctctcgggcacttcgagcgcaagaggattgcaagagattacccacgcattggatataaggttgtctgatacagcctggaccattgtttataaggcattgattgtgttgcatctgatgatacaacaaggcgaaaaagatgtcacgctaaggcactattcccataatttggatgttttccaattgagaaagatttcgcatactactaagtggtcttccaatgatatgagggctttgcagagatacgacgaatacctaaaaacacgttgtgaagagtatggcaggctaggtatggatcacctacgagacaattactcctcgctaaagctgggcagtaagaaccagctttcaatggatgaagagctagatcatgttgaatcattggaaattcaaattaatgccttgataaggaataaatactctgtttcagatttagaaaaccatttgttattgtatgcattccaattgttagtacaagatttactaggtctgtacaatgctcttaatgaaggtgtcattacacttttagaatcattcttcgaattgtccattgagcacgcaaaaagaacactggatctctataaggatttcgtggatatgacagaatatgttgttagatacctaaaaataggaaaagctgtcggtttgaaaatccccgttatcaaacatattactacaaagttaattaactcccttgaggagcatttgagagaggaaacaaaaagacaaagaggtgaaccttctgaaccgcagcaagatagaaaaccatctacggccattagctctaccagtagtcacaataacaacagcaatgacaagaataagtctatagcgcagaagaaactggaacagataagggaacaaaaaagactgctggagcaacaattacaaaaccaacagttgctcatttcccccacggtcccacaagatgcttacaacccatttggatcacaacagcaagatttaaataatgacaccttttcattcgaaccaacccagccacaaatgaccgctcaagtccctcaaccaactgctaaccccttcttgataccgcaacaacagcaacaggctttacagttgacatctgcgtctacaatgccacaaccaagtgagatacagattactccaaatttgaataatcaacaaactgggatgtatgcttctaaccttcaatacaccccaaatttcaccggctcagggttcggcggatacacgaccaccgagaacaatgcaattatgaccggcactttagatccaacaaaaacggggtctaacaacccattttcgctagaaaatattgccagagaacagcaacaacaaaatttccaaaactccccaaatccttttaccctccaacaagcacaaaccaccccgattcttgctcatagtcaaacaggtaatccatttcaggctcaaaacgtggtgacatcaccaatgggcacatacatgacgaatcccgtggccggtcaacttcagtatgcctctactggtgcgcagcagcaaccacaaatgatgcagggtcagcaaacagggtatgttatggttcccactgcgtttgtccccatcaatcaacaacagcaacaacagcagcatcagcaagaaaatcctaacttaatagatatatag

SEQ ID NO: 4618 - DNA, 1707 bp, Artificial Sequence
  Description of Artificial Sequence: Synthetic polynucleotide
atgtcttctttatatactaagttggttaaaggggcgaccaaaataaagatggcccctccaaagcaaaaatatgtggaccctattctcagcggcacttccagcgcaagaggattgcaagagattacccacgcattggatataaggttgtctgatacagcctggaccattgtttataaggcattgattgtgttgcatttaatgatacaacaaggcgaaaaagatgtcacgttgaggcactattcccataatttggatgttttccaattgagaaagatttctcatactactaagtggtcttccaatgatatgagggctttgcagagatacgacgaatacttgaaaacacgttgtgaagagtatggcaggcttggtatggatcacttgagagacaattactcctctttgaagttgggcagtaagaaccagctttctatggatgaagagttagatcatgttgaatctttggaaattcaaattaatgccttgataaggaataaatactctgtttctgatttagaaaaccatttgttattgtatgcattccaattgttagtacaagatttattgggtttatacaatgctcttaatgaaggtgtcattacacttttagaatctttcttcgaattgtccattgagcacgcaaaaagaacattagatctctataaggatttcgtggatatgacagaatatgttgttagatacttgaaaataggaaaagctgtcggtttgaaaatccccgttatcaaacatattactacaaagttaattaactcccttgaggagcatttgagagaggaaacaaaaagacaaagaggtgaaccttctgaaccgcagcaagatagaaaaccatctacggccattagctctaccagtagtcacaataacaacagcaatgacaagaataagtctatagcgcagaagaaattagaacagataagggaacaaaaaagattattggagcaacaattacaaaaccaacagttgctcatttcccccacggtcccacaagatgcttacaacccatttggatctcaacagcaagatttaaataatgacaccttttctttcgaaccaacccagccacaaatgaccgctcaagtccctcaaccaactgctaaccccttcttgataccgcaacaacagcaacaggctttacagttgacatctgcgtctacaatgccacaaccaagtgagatacagattactccaaatttgaataatcaacaaactgggatgtatgcttctaaccttcaatacaccccaaatttcaccggctctgggttcggcggatacacgaccaccgagaacaatgcaattatgaccggcactttagatccaacaaaaacggggtctaacaacccattttctttggaaaatattgccagagaacagcaacaacaaaatttccaaaactccccaaatccttttaccctccaacaagcacaaaccaccccgattcttgctcatagtcaaacaggtaatccatttcaggctcaaaacgtggtgacatctccaatgggcacatacatgacgaatcccgtggccggtcaacttcagtatgcctctactggtgcgcagcagcaaccacaaatgatgcagggtcagcaaacagggtatgttatggttcccactgcgtttgtccccatcaatcaacaacagcaacaacagcagcatcagcaagaaaatcctaacttaatagatatatga

SEQ ID NO: 4619 - DNA, 441 bp, Saccharomyces cerevisiae
atgtcagcatcagcttttaattttgcctttagaagattttggaatagtgaaacaggccctaaaacagtacacttctgggccccaactttgaagtgggggctggtcttcgcagggctaaatgatattaagaggcctgttgagaaggtatcaggagcacaaaatttatctttattagcgacggcactgatttggacgcgttggtcgtttgtcatcaagcccaagaactatctgttagcttccgtcaattttttcctgggttgcactgcaggctaccatctaacaagaattgctaactttaggatacggaacggtgattcttttaaacaggttattcactacataataaaaggggagactcctgcagccgtcgcagcaaagcaaactgcatccacatcgatgaacaaaggtgtgatcggtactaatccgccaataacgcactga

SEQ ID NO: 4620 - DNA, 441 bp, Artificial Sequence
  Description of Artificial Sequence: Synthetic polynucleotide
atgtctgcatctgcttttaattttgcctttagaagattttggaatagtgaaacaggccctaaaacagtacacttctgggccccaactttgaagtgggggttagtcttcgcagggttaaatgatattaagaggcctgttgagaaggtatctggagcacaaaatttatctttattagcgacggcattgatttggacgcgttggtcttttgtcatcaagcccaagaactatcttttagcttccgtcaattttttcttgggttgcactgcaggctaccatttaacaagaattgctaactttaggataagaaacggtgattcttttaaacaggttattcactacataataaaaggggagactcctgcagccgtcgcagcaaagcaaactgcatccacatctatgaacaaaggtgtgatcggtactaatccgccaataacgcactga

SEQ ID NO: 4621 - DNA, 1284 bp, Saccharomyces cerevisiae
atgtactcaagaaaatccttatccctaatttcaaagtgtgggcaattaagcaggctaaacgcgcaagctgctttacaagcaaggagacacttgtcaattcatgaatacaggtcagctcagttattgagggaatacggtattggtactccagaaggatttccagcgttcactcccgaagaggctttcgaagcagccaagaaattaaacactaacaaactggtcatcaaggcgcaggcattgaccggaggtagaggtaaaggtcacttcgacaccggttacaaaagcggtgttcacatgatcgaaagtcctcagcaggcagaggatgttgcaaaagaaatgctcaatcataacctgattactaaacagacgggaatagcggggaagccagtatctgctgtatatatagtgaaaagagtagatacaaagcatgaagcttatttatctattctaatggacagacaaaccaagaaaccgatgatcattgcgtccagtcaaggtggtatgaatattgaagaggtggctgagagaaccccagatgctataaagaaattttcaattgaaacttcaaagggattgagcccacaaatggccaaggatgttgccaagagtctcggtttcagtcccgatgcacaagacgaggcagcaaaagctgtttccaatttgtataaaatattcatggaaagggatgctacacaagtggagattaaccctttgagtgaaattgaacatgatccaacccacaaaatcatgtgtacagacgccaaatttgggtttgatgataacgcatcattcagacaggaaaagatatattcctggagggacttatcacaagaagatcctgatgaagttaaggcaaagaagtatgatttgaattttgttaagttgaagggtaacattggatgtttagtcaatggtgctggtttggctatggctactatggatgtcatcaaattaaatggaggcgatcctgcgaactttttggattgtggtggtggtgccacccctgagaccatcaaacaaggtttcgaattgatcttatccaataagaacgtagatgcaattttcgtcaatattttcggcggtatcgtaagatgtgactatgttgccctggggctggtagaagccgccagagaactagaagttagggtccccattgtggcacgtttgcaaggtaccaaagtagaagaaggccgcgacattatcaataagtcaggcgtgaagatttattcgtttgatgaattagatcctgctgctaaaaaggtcgttgaattgacccaaaattaa

SEQ ID NO: 4622 - DNA, 1284 bp, Artificial Sequence
  Description of Artificial Sequence: Synthetic polynucleotide
atgtactctagaaaatccttatccttgatttccaagtgtgggcaattaagcaggttaaacgcgcaagctgctttacaagcaaggagacacttgtctattcatgaatacaggtctgctcagttattgagggaatacggtattggtactccagaaggatttccagcgttcactcccgaagaggctttcgaagcagccaagaaattaaacactaacaaattggtcatcaaggcgcaggcattgaccggaggtagaggtaaaggtcacttcgacaccggttacaaaagcggtgttcacatgatcgaaagtcctcagcaggcagaggatgttgcaaaagaaatgctcaatcataacttgattactaaacagacgggaatagcggggaagccagtatctgctgtatatatagtgaaaagagtagatacaaagcatgaagcttatttatctattttgatggacagacaaaccaagaaaccgatgatcattgcgtccagtcaaggtggtatgaatattgaagaggtggctgagagaaccccagatgctataaagaaattttctattgaaacttctaagggattgagcccacaaatggccaaggatgttgccaagagtctcggtttcagtcccgatgcacaagacgaggcagcaaaagctgtttccaatttgtataaaatattcatggaaagggatgctacacaagtggagattaaccctttgagtgaaattgaacatgatccaacccacaaaatcatgtgtacagacgccaaatttgggtttgatgataacgcatctttcagacaggaaaagatatattcctggagggacttatctcaagaagatcctgatgaagttaaggcaaagaagtatgatttgaattttgttaagttgaagggtaacattggatgtttagtcaatggtgctggtttggctatggctactatggatgtcatcaaattaaatggaggcgatcctgcgaactttttggattgtggtggtggtgccacccctgagaccatcaaacaaggtttcgaattgatcttatccaataagaacgtagatgcaattttcgtcaatattttcggcggtatcgtaagatgtgactatgttgccttggggttggtagaagccgccagagaattggaagttagggtccccattgtggcacgtttgcaaggtaccaaagtagaagaaggccgcgacattatcaataagtctggcgtgaagatttattcttttgatgaattagatcctgctgctaaaaaggtcgttgaattgacccaaaattga

SEQ ID NO: 4623 - DNA, 2304 bp, Saccharomyces cerevisiae
atgggtagaagaagtagagcagctatgctcccaacaaatatcattcttttacagaatttggtaaagcgtgacccagagtcctatcaagaggagtttcttcaacaatatgcacattatgaatcgctaagggacatttttatgttaaatgggcttgctggaggtgattctgcagctgccactaatgggctcgatgtaggaaatggatcttctacaatggcaggtactaacggtaccaccatgagcacttcaacttcgcaacttattgaattggttggcttcgtatctcaagtctgctcatgttttcctcgtgaaactgcaaacttcccgtctgaattaaagcagcttttgctggaacaccataagtccttgccatttgaattgaaagaaaaaatcttaagttgtttgacgatgttaaggaataaggacgtcattactgctgaggaattaattcaaagcttatttcctttattggttgcttactcttcccatggtaattcactcggcgttaattcacacgccaaggaattgaggaaaatcatttatacaaatttaatttctttattaaaaagttgtaatactaatggtaaaaatcaaaaattgaacaaatctacgcaggccgtttgctttaatttgttagatcaaccagattcccagggaatctgggccacaaaattaaccagagaactttggagacgtggtatttgggatgattcaagaacagtagaaattatgacccaagcagcattacatcaggatgttaagattgtcatgtctggtgtgatgttttttttggatgctgacagagaacgtgaagaaaattttgaagaaaattccgaggatgaggatgggtttgatttagatgcattaaggcataagatgcaagtcaataaaaaaacgggtagacgtggtaagaagctggagaatgccataaaaactgtgaagaagaagaagaagaacggaccgggtgctcctcaagggtatttaaacttcagtgctatccaccttttgagagatccacaaggatttgccgaaaaattgtttaaggaacatctttcaggcaaaacgaaaaacaaatttgacatggaacaaaaaatatctttgatgcagctgttatcaaggttgattggtacccataagttaattgttttaggaatttatactttttttttaaagtacttaactccgaaacaaagagatgttacaagaattatgtccgcatgtgcccaagcatgtcatgatcttgtccctcctgaagttataaatgtcatggtgagaaagattgcagacgagtttgtatcagacggtgttgccaatgaagtcgctgctgcaggcattaataccattagagaaatatgctctcgtgcacctttggctatcgatgagattctactacaggatctggtagaatataaggggtctaaagctaaaggtgtcaatatggctgccaagtcattgatagcgttgtatagagacgtggcaccagaaatgctaaagaagaaggatcgtggtaagaatgccgccatggaagtacaagaagccaagaaaggaggtaaagattcaaaaagaccgcaatttggtgccgacaacagtgttcaagggattgctggtatcgaactgttagccaaatggaagaaagaacatggtgaagagagtgaaaatgaagacgctgatgccaactgggaagtagatgtcgatagcgaagaagacgatgtcgacggtgagtgggtcaccatggatagtgataaagaatatgacgttgatatggaagatagtgacgatgaaaaagacaatgctaagggcaaggaatcagattccgatttggaactaagcgatgatgacgatgaaaaagaagtgaaggatgagcaagaagatgcagatatagatcccgaagctgccttccgtgaaattgcttctacacgtattttaactccggcagatttcgctaaactacaagaattgcgtaatgaggaaagcgttgctaaaataatgggtatccacaaacaagacaagcgtgaagagttagttgatgcaagtacactaacaggccctatcaaatacaaacagtctcgtgaggaaagattacaaaaggtgttggaaggtcgtgaaggtagagacaaatttggtagtagacgcggtaagcgtgacaacatgcgttctactaccaacagagaaaaagaaagaaggaagaactttgttatgtctattcacaagagatctgttagaggtaaacaaaaaatgtcactacgagacaagcaaaaagtgttacgtgcacacatcaccaaacaaaagaagaaggggtattag

SEQ ID NO: 4624 - DNA, 2304 bp, Artificial Sequence
  Description of Artificial Sequence: Synthetic polynucleotide
atgggtagaagaagtagagcagctatgctcccaacaaatatcattcttttacagaatttggtaaagcgtgacccagagtcctatcaagaggagtttcttcaacaatatgcacattatgaatctttgagggacatttttatgttaaatgggcttgctggaggtgattctgcagctgccactaatgggctcgatgtaggaaatggatcttctacaatggcaggtactaacggtaccaccatgagcacttctacttctcaacttattgaattggttggcttcgtatctcaagtctgctcttgttttcctcgtgaaactgcaaacttcccgtctgaattaaagcagcttttgttggaacaccataagtccttgccatttgaattgaaagaaaaaatcttaagttgtttgacgatgttaaggaataaggacgtcattactgctgaggaattaattcaaagcttatttcctttattggttgcttactcttcccatggtaatagtctcggcgttaattctcacgccaaggaattgaggaaaatcatttatacaaatttaatttctttattaaaaagttgtaatactaatggtaaaaatcaaaaattgaacaaatctacgcaggccgtttgctttaatttgttagatcaaccagattcccagggaatctgggccacaaaattaaccagagaactttggagacgtggtatttgggatgattccagaacagtagaaattatgacccaagcagcattacatcaggatgttaagattgtcatgtctggtgtgatgttttttttggatgctgacagagaacgtgaagaaaattttgaagaaaattccgaggatgaggatgggtttgatttagatgcattaaggcataagatgcaagtcaataaaaaaacgggtagacgtggtaagaagttggagaatgccataaaaactgtgaagaagaagaagaagaacggaccgggtgctcctcaagggtatttaaacttcagtgctatccaccttttgagagatccacaaggatttgccgaaaaattgtttaaggaacatctttctggcaaaacgaaaaacaaatttgacatggaacaaaaaatatctttgatgcagcttttatctaggttgattggtacccataagttaattgttttaggaatttatactttttttttaaagtacttaactccgaaacaaagagatgttacaagaattatgtccgcatgtgcccaagcatgtcatgatcttgtccctcctgaagttataaatgtcatggtgagaaagattgcagacgagtttgtaagtgacggtgttgccaatgaagtcgctgctgcaggcattaataccattagagaaatatgctctcgtgcacctttggctatcgatgagattttattgcaggatttagtagaatataaggggtctaaagctaaaggtgtcaatatggctgccaagtctttgatagcgttgtatagagacgtggcaccagaaatgttgaagaagaaggatcgtggtaagaatgccgccatggaagtacaagaagccaagaaaggaggtaaagattctaaaagaccgcaatttggtgccgacaacagtgttcaagggattgctggtatcgaattattagccaaatggaagaaagaacatggtgaagagagtgaaaatgaagacgctgatgccaactgggaagtagatgtcgatagcgaagaagacgatgtcgacggtgagtgggtcaccatggatagtgataaagaatatgacgttgatatggaagatagtgacgatgaaaaagacaatgctaagggcaaggaaagtgattccgatttggaattgagcgatgatgacgatgaaaaagaagtgaaggatgagcaagaagatgcagatatagatcccgaagctgccttccgtgaaattgcttctacacgtattttaactccggcagatttcgctaaattacaagaattgcgtaatgaggaaagcgttgctaaaataatgggtatccacaaacaagacaagcgtgaagagttagttgatgcaagtacattaacaggccctatcaaatacaaacagtctcgtgaggaaagattacaaaaggtgttggaaggtcgtgaaggtagagacaaatttggtagtagacgcggtaagcgtgacaacatgcgttctactaccaacagagaaaaagaaagaaggaagaactttgttatgtctattcacaagagatctgttagaggtaaacaaaaaatgtctttaagagacaagcaaaaagtgttacgtgcacacatcaccaaacaaaagaagaaggggtattga

SEQ ID NO: 4625 - DNA, 1791 bp, Saccharomyces cerevisiae
atgccagtgtgtaagaactgtcacggaaccgaatttgagagagatctttccaatgctaacaacgatttagtttgtaaagcttgtggtgttgtctcagaagataatcctatcgtctctgaagttacattcggtgaaacaagtgcaggtgctgctgtagtacaaggttcttttatcggtgcaggacaaagtcatgctgcatttggtggttctagtgctctagaatctagagaagccacattgaacaatgcaagaaggaaattacgcgccgtttcttacgcattacatatcccggaatatatcacagatgctgctttccaatggtataagcttgcattggctaataactttgtacaaggtcgtaggtcccaaaatgttatcgcttcatgtctttacgttgcatgtagaaaggaaaagacgcatcatatgctgatcgacttctcttcaaggttacaggtgagtgtgtattccataggagccacatttttgaaaatggtaaagaaattacatatcacagaattgccgttagcggatccttccttattcattcaacattttgccgaaaaattggatcttgctgacaagaagatcaaagtggtaaaagatgccgtaaaattggctcaaagaatgtccaaggactggatgtttgaaggacgtagacctgcaggtattgccggcgcatgtattctactagcttgcaggatgaataatttgagaagaactcatacagagatcgtcgcagtttcacatgtcgccgaggaaactttacagcaacggttgaacgaattcaaaaatacaaaggctgctaaactttcagttcaaaaatttagagaaaatgatgtggaagacggtgaggctaggcctccctcctttgtgaagaacagaaagaaagaaagaaaaataaaggactctttagacaaagaagagatgtttcaaacaagtgaagaagcattgaataaaaatccaattttgacgcaagtattaggagaacaagaactgtcttccaaggaagtcctgttttacttaaaacaattttcagaaagaagggcccgtgttgtggagaggattaaggctactaatggtatagatggtgaaaatatataccatgaaggttctgaaaacgaaacaaggaaacgcaaactttctgaagtttctatccagaacgagcatgttgaaggggaagacaaagagacggaagggactgaggaaaaagtcaagaaggtaaagacaaaaacatcagaagaaaagaaagagaacgaatctgggcattttcaagatgccattgatggttactctctagaaacagacccatattgtcctcgcaatttacacttgttacccacaacggacacatacctttcgaaagttagtgacgacccagataatttagaagatgttgatgatgaggagttaaacgcgcacctattaaacgaggaagcttctaaattgaaggaaagaatttggattggtctgaacgcagatttcttacttgaacaagagagtaaacgtttgaaacaggaggcagatattgccacaggtaacacatcagtgaaaaaaaaacgtacgagacgtaggaataatactagaagtgacgaacctacaaaaactgtggatgcagcagcagctatcggattgatgtcagacttacaagataagtctggtttacacgctgcattgaaggcagctgaggaaagtggtgatttcacaactgctgatagtgtcaagaacatgttgcagaaggcaagtttctccaagaagattaattacgacgccattgacggtttgtttaggtaa

SEQ ID NO: 4626 - DNA, 1791 bp, Artificial Sequence
  Description of Artificial Sequence: Synthetic polynucleotide
atgccagtgtgtaagaactgtcacggaaccgaatttgagagagatctttccaatgctaacaacgatttagtttgtaaagcttgtggtgttgtcagtgaagataatcctatcgtctctgaagttacattcggtgaaacaagtgcaggtgctgctgtagtacaaggttcttttatcggtgcaggacaaagtcatgctgcatttggtggttctagtgctttggaatctagagaagccacattgaacaatgcaagaaggaaattacgcgccgtttcttacgcattacatatcccggaatatatcacagatgctgctttccaatggtataagcttgcattggctaataactttgtacaaggtcgtaggtcccaaaatgttatcgcttcttgtctttacgttgcatgtagaaaggaaaagacgcatcatatgttgatcgacttctcttccaggttacaggtgagtgtgtattccataggagccacatttttgaaaatggtaaagaaattacatatcacagaattgccgttagcggatccttccttattcattcaacattttgccgaaaaattggatcttgctgacaagaagatcaaagtggtaaaagatgccgtaaaattggctcaaagaatgtccaaggactggatgtttgaaggacgtagacctgcaggtattgccggcgcatgtattttattagcttgcaggatgaataatttgagaagaactcatacagagatcgtcgcagtttctcatgtcgccgaggaaactttacagcaaagattgaacgaattcaaaaatacaaaggctgctaaactttctgttcaaaaatttagagaaaatgatgtggaagacggtgaggctaggcctccctcctttgtgaagaacagaaagaaagaaagaaaaataaaggactctttagacaaagaagagatgtttcaaacaagtgaagaagcattgaataaaaatccaattttgacgcaagtattaggagaacaagaattatcttccaaggaagtcttgttttacttaaaacaattttctgaaagaagggcccgtgttgtggagaggattaaggctactaatggtatagatggtgaaaatatataccatgaaggttctgaaaacgaaacaaggaaacgcaaactttctgaagtttctatccagaacgagcatgttgaaggggaagacaaagagacggaagggactgaggaaaaagtcaagaaggtaaagacaaaaacaagtgaagaaaagaaagagaacgaatctgggcattttcaagatgccattgatggttactctttggaaacagacccatattgtcctcgcaatttacacttgttacccacaacggacacatacctttctaaagttagtgacgacccagataatttagaagatgttgatgatgaggagttaaacgcgcacttattaaacgaggaagcttctaaattgaaggaaagaatttggattggtttgaacgcagatttcttacttgaacaagagagtaaacgtttgaaacaggaggcagatattgccacaggtaacacatctgtgaaaaaaaaacgtacgagacgtaggaataatactagaagtgacgaacctacaaaaactgtggatgcagcagcagctatcggattgatgtctgacttacaagataagtctggtttacacgctgcattgaaggcagctgaggaaagtggtgatttcacaactgctgatagtgtcaagaacatgttgcagaaggcaagtttctccaagaagattaattacgacgccattgacggtttgtttaggtga

SEQ ID NO: 4627 - DNA, 720 bp, Saccharomyces cerevisiae
atggcaatagcattatggtattgtccaccacaaggatcagttgcttacgagacattacagatgcttatattttcgtttcaaacgttgttcccagattcaccagtttttgaacctcatgtgacggtaacgtcccatttggtgtgcaatagtaaagatgatgtcaacaaaatcttgacctcctgtgttgctgccatccaatcgataaggtcacaccaaacagcaaagaaaggacgtaagggacaggtatcccatgctgttgcagctcctttggtatctttcaatggatgcagtgtaggtaaacaatatttcaagaaaattgtgctcgagtgtaacaagaacaaaatactttatggggtcgcacaagtcatgagagagatgtacgtagagatcgatcctgagacgcgaagtagccgtgccgccacttgggtgcacgaggaattccatcctcacgtctcattgctttattcggatattcatccggtaagtcaggcgtcattgcgagtagttcaacaaagaattgaagatgctctagacgtgcaactagttccaagagagaaacgtaagggttccggaaacgctgatgggtccaatgaagtgcaaatgagatgggattttgacgtatcttcatcgctatcttggaatatcccaggaacgtttaaagtggtcaactgtgtggggcccgttcaagaatgggaggtattgggacgggtggacgtttaa

SEQ ID NO: 4628 - DNA, 720 bp, Artificial Sequence
  Description of Artificial Sequence: Synthetic polynucleotide
atggcaatagcattatggtattgtccaccacaaggatctgttgcttacgagacattacagatgcttatattttcttttcaaacgttgttcccagattctccagtttttgaacctcatgtgacggtaacgtcccatttggtgtgcaatagtaaagatgatgtcaacaaaatcttgacctcctgtgttgctgccatccaaagtataaggtctcaccaaacagcaaagaaaggacgtaagggacaggtatcccatgctgttgcagctcctttggtatctttcaatggatgcagtgtaggtaaacaatatttcaagaaaattgtgctcgagtgtaacaagaacaaaatactttatggggtcgcacaagtcatgagagagatgtacgtagagatcgatcctgagacgagaagtagccgtgccgccacttgggtgcacgaggaattccatcctcacgtctctttgctttattctgatattcatccggtaagtcaggcgtctttgagagtagttcaacaaagaattgaagatgctttggacgtgcaattggttccaagagagaaacgtaagggttccggaaacgctgatgggtccaatgaagtgcaaatgagatgggattttgacgtatcttcttctttatcttggaatatcccaggaacgtttaaagtggtcaactgtgtggggcccgttcaagaatgggaggtattgggaagagtggacgtttga

SEQ ID NO: 4629 - DNA, 768 bp, Saccharomyces cerevisiae
atggtgaaattacaaaggtttagcgaaaagaaaagcctcatacacgaattcggcaagtttatccttgaaaagcaagaatcggcgttaacgggcgacgctgatgcagtgttcaatatcgccatcagtggaggatcgatgaaccaagcgctgtacgaaagtttggtaaatgacaaaaacatttttccacatattaagtggccacaatggagaatcttcttctgtgacgaaagattggttccatttgaggatccgcaaagtaactatggtcagttcaaaaaaacagttttggacccgctagtgcatcagggcaaccaattgaacttaggccccactgtatacactatcaacgaatcattaatcggtggcggtgaaacggccaatagaaagattgccgaagaatacgcttccatgctgcctgcatcattcgacctaatcttactcggatgcggagaagatggacatacatgctcgttgtttcccggggttgaatttaattaccttgtagaagagatggaccgcaaggttttatggtgtaataattcgcccaaggcacccaaggacaggatcacctttacattagcagtagtagccgaggctaaaagtgtgtgctttctcgttaggggagctgctaaaaaggctatcatgcatgacgtgttaatcgtaaaaaatagcgaactacctagtgtgctggttaatgaaatggtcggaaccaaagtaacttggtttctcgacgacgaagctggcgccttgattcctgaaaactgctaa

SEQ ID NO: 4630 - DNA, 768 bp, Artificial Sequence
  Description of Artificial Sequence: Synthetic polynucleotide
atggtgaaattacaaaggtttagcgaaaagaaaagcctcatacacgaattcggcaagtttatccttgaaaagcaagaaagtgcgttaacgggcgacgctgatgcagtgttcaatatcgccatcagtggaggatccatgaaccaagcgttgtacgaaagtttggtaaatgacaaaaacatttttccacatattaagtggccacaatggagaatcttcttctgtgacgaaagattggttccatttgaggatccgcaaagtaactatggtcagttcaaaaaaacagttttggacccgttggtgcatcagggcaaccaattgaacttaggccccactgtatacactatcaacgaatctttaatcggtggcggtgaaacggccaatagaaagattgccgaagaatacgcttccatgttgcctgcatctttcgacttgatcttactcggatgcggagaagatggacatacatgctctttgtttcccggggttgaatttaattaccttgtagaagagatggaccgcaaggttttatggtgtaataattctcccaaggcacccaaggacaggatcacctttacattagcagtagtagccgaggctaaaagtgtgtgctttctcgttaggggagctgctaaaaaggctatcatgcatgacgtgttaatcgtaaaaaatagcgaattacctagtgtgcttgttaatgaaatggtcggaaccaaagtaacttggtttctcgacgacgaagctggcgccttgattcctgaaaactgctga

SEQ ID NO: 4631 - DNA, 1371 bp, Saccharomyces cerevisiae
atgcaacctaaaactttcgtccaccaacttcatgcaattcttctggaaccggaagtaaataaatggatatactggtctccgactgataacacggtattttttttgaagccatatgaccctaattttagtacacatgttctgaagcgttatttcaaacatggaaatgtcaatagttttgttcgtcaactacacatgtacgggtttcataaactatctcatccttccccagaccaatcttctgccaacaatggtaacgttaaagaacttgttgaatggaaatttacccacccatctggattcttcttcaaagaggccaacgccggtatcttgaataaaatccaaagaaagagcactggtgtgggaaaagatggtaaaagaaagaatatactgtcaccaatatctgtcagttacgttgatgcttcgaggttaaatgttctctctcagcaatccggaccagtttctgcaagagaaccatcaaacatgtttatgggcagtcccgtccattactcaacatcccaaagtcctccacatatcagtataccgcaacagcaacaaagtagtggaccttacctaatatcttcactgccccctcaacaacccacggtgaacatgatgcgaaggcaaagcatctcggcgaggatgatgaattcttatgactatcccaatcaattttccacccaagatagcatagtccagcctcagcagccgcaacaagtactttctccacaagcattatctggacctccgatgaagaaatcaggaacactatcttcgacagatgatctgaaaacaacttccttgccaattgttaattacccaatgccgtatcatcctggagcttttgcccagcagcagcagcagcagcagcaaccgctccctacagtcccgccatatagcagttactccactccatttccctcaatgatgaactctctttcgaactctgcttctaactcacctgctttaggagtttgtaataataatgtaacactacccaaaaaaagcaatataagtgaaaggcaagctttggataaccatatacaaactttaaagaactctctatcaacaatcactgatttgatagaaaaacatattaacagcgcatcgcaagatgaaaataaaactctaactaatgatgccatgaacaaagaccttcgaacaagcttatccctattacagaattccaaggaggaaatcattcaacttgaaagtaaatggatgtctatgcaatctgttaaaacaactgccctaccccttcaagagactacgaatacatcatcgaccttaacttctctgacgtccagcataattcccaagagtatacctataatcacgaaaggtgaagtcgccactaaaccagcatcttactga

SEQ ID NO: 4632 - DNA, 1371 bp, Artificial Sequence
  Description of Artificial Sequence: Synthetic polynucleotide
atgcaacctaaaactttcgtccaccaacttcatgcaattcttttagaaccggaagtaaataaatggatatactggtctccgactgataacacggtattttttttgaagccatatgaccctaattttagtacacatgttttgaagcgttatttcaaacatggaaatgtcaatagttttgttcgtcaattacacatgtacgggtttcataaattatctcatccttccccagaccaatcttctgccaacaatggtaacgttaaagaacttgttgaatggaaatttacccacccatctggattcttcttcaaagaggccaacgccggtatcttgaataaaatccaaagaaagagcactggtgtgggaaaagatggtaaaagaaagaatatattatctccaatatctgtcagttacgttgatgcttccaggttaaatgttctctctcagcaatccggaccagtttctgcaagagaaccatctaacatgtttatgggcagtcccgtccattactccacatcccaaagtcctccacatatcagtataccgcaacagcaacaaagtagtggaccttacttgatatcttctttaccccctcaacaacccacggtgaacatgatgagaaggcaaagcatcagtgcgaggatgatgaattcttatgactatcccaatcaattttccacccaagatagcatagtccagcctcagcagccgcaacaagtactttctccacaagcattatctggacctccgatgaagaaaagtggaacattatcttctacagatgatttgaaaacaacttccttgccaattgttaattacccaatgccgtatcatcctggagcttttgcccagcagcagcagcagcagcagcaaccgctccctacagtcccgccatatagcagttactccactccatttccctctatgatgaactctctttccaactctgcttctaactctcctgctttaggagtttgtaataataatgtaacattacccaaaaaaagcaatataagtgaaaggcaagctttggataaccatatacaaactttaaagaactctttatctacaatcactgatttgatagaaaaacatattaacagcgcatctcaagatgaaaataaaactttaactaatgatgccatgaacaaagaccttagaacaagcttatccttattacagaattccaaggaggaaatcattcaacttgaaagtaaatggatgtctatgcaatctgttaaaacaactgccttgccccttcaagagactacgaatacatcttccaccttaacttctttgacgtccagcataattcccaagagtatacctataatcacgaaaggtgaagtcgccactaaaccagcatcttactga

SEQ ID NO: 4633 - DNA, 2346 bp, Saccharomyces cerevisiae
atgaatattgcagaagaaccatcagatgaagtaatatctagtggccccgaggatacagatatctgcagccagcagacatcagcgagcgcagaagctggagaccaatcaataaaaattgaaaggaaaacttccactggtcttcaactggaacaattggccaacacaaatttattaaccataagaataaaatggcagttacaagaagaagaagatgatcactgcaactctagaataaccgatcaaataatggacacaatacagcactacaaaggtatctccgttaacaactctgatacagaaacatatgaatttcttccggatacaaggaggttacaggttctcgaacaaaataaagacatctatctttacgagcatggaagtcaagagtatgagaaatcttacaaagataacgaagaggaagatgattggagatacgataccgttttgcaagcacaattcaagtaccccaagtcattagaaaatgcatgtacagatatctcggaattactcaagagcgaacctattggtcagcatattgataaatggtctatcggtgtgaacaagcatgcactaacctatcctggaaatatttttgtcgggggaatagcaaagagcctttctattggtgaactaagtttcttattttcaaaatatggaccaattttatcaatgaaattgatatatgataaaacgaaaggcgaacctaacggatacgggttcatctcctaccccttgggttctcaagcttcactttgcatcaaggaacttaatggaaggacggtaaatggctccacactatttatcaactatcacgttgagcgaaaggagagagaaagaatccattgggaccatgtcaaagaaaacaacaatgatgataatttcaggtgtctctttataggcaacttgccttatcacaatcctgaaaaagtagagactttgattacacctaaagaagtcatagaagtaatcaagaaggagttatcaaaaaagtttccggactttgatatcatttcatattactttccgaagagaagtaatacaagaagcagtagttcagtaagtttcaatgaggaggggtcagtagaatcaaacaaatcttccaataatactaatggaaatgcccaagatgaagatatgttgaagggttatggtttcatcaagcttatcaaccatgaacaagcactagcagccatcgagaccttcaatgggttcatgtggcatggaaacaggctcgttgttaataaggcggttcaacataaagtttacaacaaccacaatagccatgacaggcacccttccatcagtaaccacaatgatatggaggttttggaatttgcaaataacccaatgtatgattacaataattatacatatgatagatattacttcaacaataataaaaacgggaacagcaacgatacctccaatgtacggtattttgattctgtaagatcaacccctgtggcagagaaaatggatctgttctatcctcaaagggaatctttcagtgaaggtcgtggtcaacgtgtgcctagattcatgggcaacaagtttgacatgtaccagtacccatcaacttcttacagcttacctataccaatgagtaatcagcaagaatcaaacctatatgtcaagcacatccctctttcttggacagatgaagatttatatgatttctacaaatctttcggtgaaataatcagcgttaaggtcattactgttgggggtagtaagaacaagtatcgtcaacaatcgaatgatagctcatcagataatgatctgccagtgggatcatcaagaggttatggttttgtttcttttgaaagcccattagatgctgctaaggcaattttgaatacagacgggtatcaagtgagcaaagatcaagtgttatctgtttctttcgctcagaaacgtggtaatttatcttcaagtgatgatgatgatcaatcccaaactgataactcatcaaagttccaaaattttcagccacataatgattatcataaggcttatccaacaaagtataataagaaatttatcaatgccttgatgactcagaaccaatcgcaacagcaagtctcgagggaaaattatttcataccactgcagtaccctaataccaacacaaagcccgtgaacagttacaacttaataagtgcaaaccaaaataacgctaactggatgatgccaatgttcccatcatttgggtttattccacaggtgccgccagtgccctatataatacctccgcagaatcctgcagcaaatcatattcctataatggcaaacggtagtaatgaagaggaagaattttctagtggtgattattctatggactactag

SEQ ID NO: 4634 - DNA, 2346 bp, Artificial Sequence
  Description of Artificial Sequence: Synthetic polynucleotide
atgaatattgcagaagaaccaagtgatgaagtaatatctagtggccccgaggatacagatatctgcagccagcagacatctgcgagcgcagaagctggagaccaaagtataaaaattgaaaggaaaacttccactggtcttcaattggaacaattggccaacacaaatttattaaccataagaataaaatggcagttacaagaagaagaagatgatcactgcaactctagaataaccgatcaaataatggacacaatacagcactacaaaggtatctccgttaacaactctgatacagaaacatatgaatttcttccggatacaaggaggttacaggttctcgaacaaaataaagacatctatctttacgagcatggaagtcaagagtatgagaaatcttacaaagataacgaagaggaagatgattggagatacgataccgttttgcaagcacaattcaagtaccccaagtctttagaaaatgcatgtacagatatcagtgaattactcaagagcgaacctattggtcagcatattgataaatggtctatcggtgtgaacaagcatgcattgacctatcctggaaatatttttgtcgggggaatagcaaagagcctttctattggtgaattaagtttcttattttccaaatatggaccaattttatctatgaaattgatatatgataaaacgaaaggcgaacctaacggatacgggttcatctcctaccccttgggttctcaagcttctctttgcatcaaggaacttaatggaaggacggtaaatggctccacattatttatcaactatcacgttgagagaaaggagagagaaagaatccattgggaccatgtcaaagaaaacaacaatgatgataatttcaggtgtctctttataggcaacttgccttatcacaatcctgaaaaagtagagactttgattacacctaaagaagtcatagaagtaatcaagaaggagttatccaaaaagtttccggactttgatatcatttcttattactttccgaagagaagtaatacaagaagcagtagttctgtaagtttcaatgaggaggggtctgtagaatctaacaaatcttccaataatactaatggaaatgcccaagatgaagatatgttgaagggttatggtttcatcaagcttatcaaccatgaacaagcattggcagccatcgagaccttcaatgggttcatgtggcatggaaacaggctcgttgttaataaggcggttcaacataaagtttacaacaaccacaatagccatgacaggcacccttccatcagtaaccacaatgatatggaggttttggaatttgcaaataacccaatgtatgattacaataattatacatatgatagatattacttcaacaataataaaaacgggaacagcaacgatacctccaatgtaagatattttgattctgtaagatctacccctgtggcagagaaaatggatcttttctatcctcaaagggaatctttcagtgaaggtcgtggtcaacgtgtgcctagattcatgggcaacaagtttgacatgtaccagtacccatctacttcttacagcttacctataccaatgagtaatcagcaagaatctaacttatatgtcaagcacatccctctttcttggacagatgaagatttatatgatttctacaaatctttcggtgaaataatcagcgttaaggtcattactgttgggggtagtaagaacaagtatcgtcaacaaagcaatgatagctcttctgataatgatttaccagtgggaagtagtagaggttatggttttgtttcttttgaaagcccattagatgctgctaaggcaattttgaatacagacgggtatcaagtgagcaaagatcaagtgttatctgtttctttcgctcagaaacgtggtaatttatcttccagtgatgatgatgatcaatcccaaactgataactcttccaagttccaaaattttcagccacataatgattatcataaggcttatccaacaaagtataataagaaatttatcaatgccttgatgactcagaaccaatctcaacagcaagtctccagggaaaattatttcataccattacagtaccctaataccaacacaaagcccgtgaacagttacaacttaataagtgcaaaccaaaataacgctaactggatgatgccaatgttcccatcttttgggtttattccacaggtgccgccagtgccctatataatacctccgcagaatcctgcagcaaatcatattcctataatggcaaacggtagtaatgaagaggaagaattttctagtggtgattattctatggactactga

SEQ ID NO: 4635 - DNA, 591 bp, Saccharomyces cerevisiae
atgagtagggccaaagaattacaagagaagctcaacttgcaagcgaaactccagtctactttcagtaacaatactgctgcagttttggactggctgaaagaatcagatgaaaccggcattagcaatgatacagagcgtaacaaacagttaaaagatcacaaggagttggaggatggtaagaaggcatttttcaagcttcccgttttgcagattggatcgggcctacacttccgcacacaagatgacgcttccgccaaagaagatatacatacgattggtgagtttattgagggtgataaaaaggtaagttcgttggcaaagaaaaagaaaagaagtgacccagggttgcaacgaaataatatgtacaggatcactaaagatgatacgaaagccatgattgcgcttaaaagaaaaatgaggaaaggcgagaaggaaggactaaggaagaaacaagagcatagcaaaagcagcgtttcgaactcatatagtgccagtgatgaagaggatgaagatgcagggacaatgccgcaaaagtccacaaaaaaaaaatttggtttactttttgataaaaaaaagaaggcacgtaaataa

SEQ ID NO: 4636 - DNA, 591 bp, Artificial Sequence
  Description of Artificial Sequence: Synthetic polynucleotide
atgagtagggccaaagaattacaagagaagctcaacttgcaagcgaaactccagtctactttcagtaacaatactgctgcagttttggactggttgaaagaaagtgatgaaaccggcattagcaatgatacagagcgtaacaaacagttaaaagatcacaaggagttggaggatggtaagaaggcatttttcaagcttcccgttttgcagattggatctggcttgcacttccgcacacaagatgacgcttccgccaaagaagatatacatacgattggtgagtttattgagggtgataaaaaggtaagttctttggcaaagaaaaagaaaagaagtgacccagggttgcaaagaaataatatgtacaggatcactaaagatgatacgaaagccatgattgcgcttaaaagaaaaatgaggaaaggcgagaaggaaggattgaggaagaaacaagagcatagcaaaagcagcgtttctaacagttatagtgccagtgatgaagaggatgaagatgcagggacaatgccgcaaaagtccacaaaaaaaaaatttggtttactttttgataaaaaaaagaaggcacgtaaatga

SEQ ID NO: 4637 - DNA, 1320 bp, Saccharomyces cerevisiae
atggtcacaaaacatcagattgaagaggatcacttggatggagctacgacggatcccgaagttaaacgggtaaaattagaaaacaacgttgaagaaatacaacctgagcaggctgagaccaataaacaagagggcaccgataaagagaataaaggaaagttcgagaaagaaactgagagaataggaggatctgaagtggttacagatgtggaaaaaggaattgtcaaatttgaatttgatggtgttgaatacacattcaaagagagacccagtgtcgtagaggaaaatgaaggtaaaattgagtttagggtggtgaataatgataatactaaagaaaacatgatggtcctaactggattaaaaaacatttttcaaaagcaattaccaaaaatgcccaaagaatacattgccaggttagtctatgatcgaagtcatctttccatggctgtcattaggaagccattgactgtcgtaggtggcataacatatcgacctttcgataagagagaattcgcagaaattgttttctgtgccatcagttcgacggaacaggtacgcggttatggtgcgcatctaatgaatcacttaaaagactatgttagaaatacctcgaacataaaatattttttgacatatgcagataattacgctattggatactttaaaaagcaaggcttcactaaagaaatcacgttggataaaagtatatggatgggatatattaaagattatgaaggtggtacgctgatgcaatgttctatgttaccaagaatacgatatttggacgcaggtaagattctattattacaagaagcggccctgcgaagaaaaataagaacgatttcgaaatcgcatattgtaaggcctggtttagagcaattcaaagacttaaacaatatcaaaccgattgatccaatgactattcctggcttgaaagaagccggctggactcccgagatggatgcgttggcacaacgtcccaagcgtggtccacacgatgcagcaatacagaatatactcacagagctacaaaatcatgcagcagcttggcccttcttacaacccgttaataaagaggaggtccccgactattatgattttatcaaagagccaatggacttgagcaccatggaaataaaattagagagcaacaaatatcagaagatggaagacttcatatatgatgccagattggtgtttaacaattgccgaatgtacaatggcgagaatacgtcgtattacaagtatgctaataggctagagaaattcttcaataataaagtaaaagaaatacctgaatattctcaccttattgattaa

SEQ ID NO: 4638 - DNA, 1320 bp, Artificial Sequence
  Description of Artificial Sequence: Synthetic polynucleotide
atggtcacaaaacatcagattgaagaggatcacttggatggagctacgacggatcccgaagttaaaagagtaaaattagaaaacaacgttgaagaaatacaacctgagcaggctgagaccaataaacaagagggcaccgataaagagaataaaggaaagttcgagaaagaaactgagagaataggaggatctgaagtggttacagatgtggaaaaaggaattgtcaaatttgaatttgatggtgttgaatacacattcaaagagagacccagtgtcgtagaggaaaatgaaggtaaaattgagtttagggtggtgaataatgataatactaaagaaaacatgatggtcttgactggattaaaaaacatttttcaaaagcaattaccaaaaatgcccaaagaatacattgccaggttagtctatgatagaagtcatctttccatggctgtcattaggaagccattgactgtcgtaggtggcataacatataggcctttcgataagagagaattcgcagaaattgttttctgtgccatcagttccacggaacaggtacgcggttatggtgcgcatttaatgaatcacttaaaagactatgttagaaataccagtaacataaaatattttttgacatatgcagataattacgctattggatactttaaaaagcaaggcttcactaaagaaatcacgttggataaaagtatatggatgggatatattaaagattatgaaggtggtacgttgatgcaatgttctatgttaccaagaataagatatttggacgcaggtaagattttattattacaagaagcggccttaagaagaaaaataagaacgatttccaaatctcatattgtaaggcctggtttagagcaattcaaagacttaaacaatatcaaaccgattgatccaatgactattcctggcttgaaagaagccggctggactcccgagatggatgcgttggcacaacgtcccaagcgtggtccacacgatgcagcaatacagaatatactcacagagttacaaaatcatgcagcagcttggcccttcttacaacccgttaataaagaggaggtccccgactattatgattttatcaaagagccaatggacttgagcaccatggaaataaaattagagagcaacaaatatcagaagatggaagacttcatatatgatgccagattggtgtttaacaattgcagaatgtacaatggcgagaatacgtcctattacaagtatgctaataggttagagaaattcttcaataataaagtaaaagaaatacctgaatattctcaccttattgattga

SEQ ID NO: 4639 - DNA, 783 bp, Saccharomyces cerevisiae
atgttcttaactagaagtgaatatgatcgtggtgtaagcacattttccccagaagggaggttattccaagttgagtattctttggaggccatcaaattaggatctacagcaattggtattgccacgaaagaaggtgttgtactaggtgtggagaaacgtgccacctcaccactattagaatctgattctattgagaaaatcgtggagattgatcgtcatattggttgtgcaatgagtgggcttacagcagatgctcgttccatgattgaacatgcgcgtactgctgcagtaacgcataatctatactacgatgaagacatcaatgttgagtccttaacgcaatcggtgtgtgatcttgctctaaggttcggtgaaggtgcctctggtgaagaaagactaatgtctcgaccattcggggttgccttgttaattgctggccatgatgcggatgatggttatcaacttttccatgcagaaccatctgggacattttaccgttataatgccaaagccattggttcaggctctgaaggagcacaagcagaattattgaatgaatggcattcttctttaactttgaaagaagctgagcttcttgttctaaaaatcctaaagcaagtgatggaagagaaacttgatgaaaataacgcgcaattgagttgtataacaaagcaagacggattcaaaatatatgataacgaaaaaactgctgaattgataaaagagttgaaagagaaagaagctgcagaaagtccagaagaagcggatgttgaaatgtcataa

SEQ ID NO: 4640 - DNA, 783 bp, Artificial Sequence
  Description of Artificial Sequence: Synthetic polynucleotide
atgttcttaactagaagtgaatatgatcgtggtgtaagcacattttccccagaagggaggttattccaagttgagtattctttggaggccatcaaattaggatctacagcaattggtattgccacgaaagaaggtgttgtattgggtgtggagaaacgtgccacctctccattattagaatctgattctattgagaaaatcgtggagattgatcgtcatattggttgtgcaatgagtgggcttacagcagatgctcgttccatgattgaacatgcgcgtactgctgcagtaacgcataatctttactacgatgaagacatcaatgttgagtccttaacgcaatctgtgtgtgatcttgctttgaggttcggtgaaggtgcctctggtgaagaaagattaatgtctagaccattcggggttgccttgttaattgctggccatgatgcggatgatggttatcaacttttccatgcagaaccatctgggacattttaccgttataatgccaaagccattggttctggctctgaaggagcacaagcagaattattgaatgaatggcattcttctttaactttgaaagaagctgagcttcttgttttgaaaatcttgaagcaagtgatggaagagaaacttgatgaaaataacgcgcaattgagttgtataacaaagcaagacggattcaaaatatatgataacgaaaaaactgctgaattgataaaagagttgaaagagaaagaagctgcagaaagtccagaagaagcggatgttgaaatgtcttga

SEQ ID NO: 4641 - DNA, 1314 bp, Saccharomyces cerevisiae
atggctgtctctaaagtttacgctagatccgtctacgactcccgtggtaacccaaccgtcgaagtcgaattaaccaccgaaaagggtgttttcagatccattgtcccatctggtgcttctaccggtgtccacgaagctttggaaatgagagatggtgacaaatccaagtggatgggtaagggtgttttgcacgctgttaagaacgtcaacgatgtcattgctccagctttcgttaaggctaacattgatgttaaggaccaaaaggccgtcgatgacttcttgatttctttggacggtactgccaacaaatccaagttgggtgctaacgctatcttgggtgtttctttggctgcttccagagctgccgctgctgaaaagaatgtcccattatacaagcacttggctgacttgtctaagtccaagacctctccatacgttttgccagttccattcttgaacgttttgaacggtggttcccacgctggtggtgctttggctttgcaagaatttatgattgctccaactggtgctaagaccttcgctgaagctttgagaattggttccgaagtttaccacaacttgaagtctttgaccaagaagagatacggtgcttctgccggtaacgtcggtgacgaaggtggtgttgctccaaacattcaaactgctgaagaagctttggacttgattgttgacgctatcaaggctgctggtcacgacggtaagatcaagatcggtttggactgtgcttcctctgaattcttcaaggacggtaagtacgacttggacttcaagaatccaaactctgacaaatccaagtggttgactggtcctcaattggctgacttgtaccactccttgatgaagagatacccaattgtctccatcgaagatccatttgctgaagatgactgggaagcttggtctcacttcttcaagaccgctggtattcaaattgttgctgatgacttgactgtcaccaacccaaagagaattgctaccgctatcgaaaagaaggctgccgacgctttgttgttgaaggtcaaccaaatcggtaccttgtctgaatccatcaaggctgctcaagactctttcgctgccggttggggtgttatggtttcccacagatctggtgaaactgaagacactttcattgctgacttggtcgtcggtttgagaactggtcaaatcaagactggtgctccagctagatccgaaagattggctaaattgaaccaattgttgagaatcgaagaagaattaggtgacaacgctgttttcgctggtgaaaacttccaccacggtgacaaattataa

SEQ ID NO: 4642 - DNA, 1314 bp, Artificial Sequence
  Description of Artificial Sequence: Synthetic polynucleotide
atggctgtctctaaagtttacgctagatccgtctacgactcccgtggtaacccaaccgtcgaagtcgaattaaccaccgaaaagggtgttttcagatccattgtcccatctggtgcttctaccggtgtccacgaagctttggaaatgagagatggtgacaaatccaagtggatgggtaagggtgttttgcacgctgttaagaacgtcaacgatgtcattgctccagctttcgttaaggctaacattgatgttaaggaccaaaaggccgtcgatgacttcttgatttctttggacggtactgccaacaaatccaagttgggtgctaacgctatcttgggtgtttctttggctgcttccagagctgccgctgctgaaaagaatgtcccattatacaagcacttggctgacttgtctaagtccaagacctctccatacgttttgccagttccattcttgaacgttttgaacggtggttcccacgctggtggtgctttggctttgcaagaatttatgattgctccaactggtgctaagaccttcgctgaagctttgagaattggttccgaagtttaccacaacttgaagtctttgaccaagaagagatacggtgcttctgccggtaacgtcggtgacgaaggtggtgttgctccaaacattcaaactgctgaagaagctttggacttgattgttgacgctatcaaggctgctggtcacgacggtaagatcaagatcggtttggactgtgcttcctctgaattcttcaaggacggtaagtacgacttggacttcaagaatccaaactctgacaaatccaagtggttgactggtcctcaattggctgacttgtaccactccttgatgaagagatacccaattgtctccatcgaagatccatttgctgaagatgactgggaagcttggtctcacttcttcaagaccgctggtattcaaattgttgctgatgacttgactgtcaccaacccaaagagaattgctaccgctatcgaaaagaaggctgccgacgctttgttgttgaaggtcaaccaaatcggtaccttgtctgaatccatcaaggctgctcaagactctttcgctgccggttggggtgttatggtttcccacagatctggtgaaactgaagacactttcattgctgacttggtcgtcggtttgagaactggtcaaatcaagactggtgctccagctagatccgaaagattggctaaattgaaccaattgttgagaatcgaagaagaattaggtgacaacgctgttttcgctggtgaaaacttccaccacggtgacaaattatga

SEQ ID NO: 4643 - DNA, 1440 bp, Saccharomyces cerevisiae
atgttcttttcaaaagttatgcttactcggcgtattttggtgaggggtttggcaacagccaaatcttcagctccaaagttaacagatgtattaatcgtaggtgggggtcctgcaggtttgactttagctgcatcgattaagaattctccgcaattaaaagatctaaagacaactttagtcgatatggtggacttaaaagataaattatcggacttttataattcacccccagattattttacgaacaggattgtcagtgttacgcctagatctattcattttcttgagaataacgctggggcaactttgatgcatgacaggattcaaagttatgacggactctatgtcacggacggttgttctaaggctactttggatctggcaagggactccatgctttgtatgattgaaattataaatatacaggcctccttatacaacagaatttctcagtacgattcaaagaaggactccattgatattattgataatacaaaagttgtcaatattaaacacagcgaccctaatgatccattgtcctggcctttagtcactctttccaatggtgaagtatacaagacgagattgctagtgggtgcagacgggttcaattctcctaccagaagattttcccagatcccatctaggggctggatgtataatgcctatggtgttgtggccagcatgaagttagagtatcctccctttaaactaaggggctggcagaggttcttacccactggtccaattgcacacttacccatgcctgaaaataatgctactttagtctggagttcatctgaacgtttatcgaggcttttgttgtcattacctccagaatcattcactgcacttatcaatgctgcttttgtcttggaagacgcagacatgaactactattaccgtacattggaagatggctctatggacaccgataaattgatagaagatattaaattcagaactgaggaaatatacgccacgttgaaggacgagtcggatattgatgaaatttacccaccaagagttgttagtataatagataagacaagagcacgttttcccttaaaattaacacatgcagatcgttattgcactgatagagttgcccttgttggggacgcagcacatacgacacatcctctcgctggacaggggttaaacatggggcaaacagacgttcatggtttagtatacgctttagaaaaggcaatggaaagaggtttagacattggctcttcattgagcttagaacccttttgggcagaaagatatccgtcgaacaacgttctattaggaatggcggataaattatttaaattatatcacactaattttcctcctgtggtagccctaagaacttttggtttgaatctgacgaataagatcggtccagttaagaatatgatcattgacacattaggaggaaatgagaaatga

SEQ ID NO: 4644 - DNA, 1440 bp, Artificial Sequence
  Description of Artificial Sequence: Synthetic polynucleotide
atgttcttttccaaagttatgcttactagacgtattttggtgaggggtttggcaacagccaaatcttctgctccaaagttaacagatgtattaatcgtaggtgggggtcctgcaggtttgactttagctgcatctattaagaattctccgcaattaaaagatttgaagacaactttagtcgatatggtggacttaaaagataaattaagtgacttttataattctcccccagattattttacgaacaggattgtcagtgttacgcctagatctattcattttcttgagaataacgctggggcaactttgatgcatgacaggattcaaagttatgacggactctatgtcacggacggttgttctaaggctactttggatttggcaagggactccatgctttgtatgattgaaattataaatatacaggcctccttatacaacagaatttctcagtacgattctaagaaggactccattgatattattgataatacaaaagttgtcaatattaaacacagcgaccctaatgatccattgtcctggcctttagtcactctttccaatggtgaagtatacaagacgagattgttggtgggtgcagacgggttcaattctcctaccagaagattttcccagatcccatctaggggctggatgtataatgcctatggtgttgtggccagcatgaagttagagtatcctccctttaaattgaggggctggcagaggttcttacccactggtccaattgcacacttacccatgcctgaaaataatgctactttagtctggagttcttctgaacgtttatctaggcttttgttgtctttacctccagaatctttcactgcacttatcaatgctgcttttgtcttggaagacgcagacatgaactactattaccgtacattggaagatggctctatggacaccgataaattgatagaagatattaaattcagaactgaggaaatatacgccacgttgaaggacgagtctgatattgatgaaatttacccaccaagagttgttagtataatagataagacaagagcacgttttcccttaaaattaacacatgcagatcgttattgcactgatagagttgcccttgttggggacgcagcacatacgacacatcctctcgctggacaggggttaaacatggggcaaacagacgttcatggtttagtatacgctttagaaaaggcaatggaaagaggtttagacattggctcttctttgagcttagaacccttttgggcagaaagatatccgtctaacaacgttttattaggaatggcggataaattatttaaattatatcacactaattttcctcctgtggtagccttgagaacttttggtttgaatttaacgaataagatcggtccagttaagaatatgatcattgacacattaggaggaaatgagaaatga

SEQ ID NO: 4645 - DNA, 1479 bp, Saccharomyces cerevisiae
atgtcaaaggcagtaggtgatttaggcttagttggtttagccgtgatgggtcaaaatttgatcttaaacgcagcggatcacggatttaccgtggttgcttataataggacgcaatcaaaggtagataggtttctagctaatgaggcaaaaggaaaatcaataattggtgcaacttcaattgaggacttggttgcgaaactaaagaaacctagaaagattatgcttttaatcaaagccggtgctccggtcgacactttaataaaggaacttgtaccacatcttgataaaggcgacattattatcgacggtggtaactcacatttcccggacactaacagacgctacgaagagctaacaaagcaaggaattctttttgtgggctctggtgtctcaggcggtgaagatggtgcacgttttggtccatctttaatgcctggtgggtcagcagaagcatggccgcacatcaagaacatctttcaatctattgccgccaaatcaaacggtgagccatgctgcgaatgggtggggcctgccggttctggtcactatgtgaagatggtacacaacggtatcgagtacggtgatatgcagttgatttgcgaggcttacgatatcatgaaacgaattggccggtttacggataaagagatcagtgaagtatttgacaagtggaacactggagttttggattctttcttgattgaaatcacgagggacattttaaaattcgatgacgtcgacggtaagccattggtggaaaaaattatggatactgccggtcaaaagggtactggtaaatggactgcaatcaacgccttggatttaggaatgccagtcactttaattggggaggctgttttcgctcgttgtttgtcagccataaaggacgaacgtaaaagagcttcgaaacttctggcaggaccaacagtaccaaaggatgcaatacatgatagagaacaatttgtgtatgatttggaacaagcattatacgcttcaaagattatttcatatgctcaaggtttcatgctgatccgcgaagctgccagatcatacggctggaaattaaacaacccagctattgctctaatgtggagaggtggctgtataatcagatctgtgttcttagctgagattacgaaggcttatagggacgatccagatttggaaaatttattattcaacgagttcttcgcttctgcagttactaaggcccaatccggttggagaagaactattgcccttgctgctacttacggtattccaactccagctttctctactgctttagcgttttacgacggctatagatctgagaggctaccagcaaacttgttacaagcgcaacgtgattattttggcgctcatacatttagaattttacctgaatgtgcttctgcccatttgccagtagacaaggatattcatatcaattggactgggcacggaggtaatatatcttcctcaacctaccaagcttaa

SEQ ID NO: 4646 - DNA, 1479 bp, Artificial Sequence
  Description of Artificial Sequence: Synthetic polynucleotide
atgtccaaggcagtaggtgatttaggcttagttggtttagccgtgatgggtcaaaatttgatcttaaacgcagcggatcacggatttaccgtggttgcttataataggacgcaatccaaggtagataggtttttggctaatgaggcaaaaggaaaatctataattggtgcaacttctattgaggacttggttgcgaaattgaagaaacctagaaagattatgcttttaatcaaagccggtgctccggtcgacactttaataaaggaacttgtaccacatcttgataaaggcgacattattatcgacggtggtaactctcatttcccggacactaacagacgctacgaagagttgacaaagcaaggaattctttttgtgggctctggtgtctccggcggtgaagatggtgcacgttttggtccatctttaatgcctggtgggtctgcagaagcatggccgcacatcaagaacatctttcaatctattgccgccaaaagtaacggtgagccatgctgcgaatgggtggggcctgccggttctggtcactatgtgaagatggtacacaacggtatcgagtacggtgatatgcagttgatttgcgaggcttacgatatcatgaaaagaattggcagatttacggataaagagatcagtgaagtatttgacaagtggaacactggagttttggattctttcttgattgaaatcacgagggacattttaaaattcgatgacgtcgacggtaagccattggtggaaaaaattatggatactgccggtcaaaagggtactggtaaatggactgcaatcaacgccttggatttaggaatgccagtcactttaattggggaggctgttttcgctcgttgtttgagtgccataaaggacgaacgtaaaagagcttccaaacttttagcaggaccaacagtaccaaaggatgcaatacatgatagagaacaatttgtgtatgatttggaacaagcattatacgcttccaagattatttcttatgctcaaggtttcatgttgatccgcgaagctgccagatcttacggctggaaattaaacaacccagctattgctttgatgtggagaggtggctgtataatcagatctgtgttcttagctgagattacgaaggcttatagggacgatccagatttggaaaatttattattcaacgagttcttcgcttctgcagttactaaggcccaatccggttggagaagaactattgcccttgctgctacttacggtattccaactccagctttctctactgctttagcgttttacgacggctatagatctgagaggttaccagcaaacttgttacaagcgcaacgtgattattttggcgctcatacatttagaattttacctgaatgtgcttctgcccatttgccagtagacaaggatattcatatcaattggactgggcacggaggtaatatatcttcctccacctaccaagcttga

SEQ ID NO: 4647 - DNA, 1101 bp, Saccharomyces cerevisiae
atgagtgatcgcaatacaagtaacagcctgaccttaaaagaacgaatgttaagtgccggtgctggatcagtactcacttctttgattttgacaccgatggatgtagtgagaatacggctgcaacagcagcagatgattcctgactgttcatgtgatggggctgccgaagtgcccaacgccgttagctcaggctccaaaatgaagacattcaccaacgtcggaggacagaacttgaacaacgcaaaaatattttgggagagtgcttgttttcaagaactgcactgtaaaaattcatcgttgaagttcaacggtactttagaagcattcacgaaaattgccagcgtcgaaggtattacaagtttgtggaggggtatttctttgaccctattaatggctattcctgccaacatggtttattttagtggttatgaatatataagagacgtttctcctatagcctcgacgtacccaacattaaaccccctcttttgtggtgcaattgcgagggtatttgcagcaacaagtattgcacctttagaattggttaaaactaaactgcaaagtataccgagatcatcaaagtccacaaagacatggatgatggttaaagatttattaaacgaaacgaggcaggaaatgaaaatggtgggtccttctcgggccctcttcaaaggtttggagatcactctgtggagagacgttccgtttagtgcaatatattggagttcctatgaactttgcaaggaaagactatggctagattctactcgatttgcatctaaggacgcaaactgggtccattttataaacagttttgccagtggttgcataagtgggatgatagctgctatatgcacacacccttttgatgtcggtaagacgagatggcaaatatccatgatgaacaatagcgatccgaaaggcggcaataggtctagaaacatgttcaagttcttagagactatatggcgtacagaaggtcttgcggccctctacacgggcctggcagccagagtaattaagatacgcccaagttgcgccatcatgatatctagttatgagatctccaaaaaagtatttggaaacaaattgcatcagtga

SEQ ID NO: 4648 - DNA, 1101 bp, Artificial Sequence
  Description of Artificial Sequence: Synthetic polynucleotide
atgagtgatcgcaatacaagtaacagcttgaccttaaaagaaagaatgttaagtgccggtgctggaagtgtactcacttctttgattttgacaccgatggatgtagtgagaataaggttacaacagcagcagatgattcctgactgttcttgtgatggggctgccgaagtgcccaacgccgttagcagtggctccaaaatgaagacattcaccaacgtcggaggacagaacttgaacaacgcaaaaatattttgggagagtgcttgttttcaagaattgcactgtaaaaattcttctttgaagttcaacggtactttagaagcattcacgaaaattgccagcgtcgaaggtattacaagtttgtggaggggtatttctttgaccttattaatggctattcctgccaacatggtttattttagtggttatgaatatataagagacgtttctcctatagcctctacgtacccaacattaaaccccctcttttgtggtgcaattgcgagggtatttgcagcaacaagtattgcacctttagaattggttaaaactaaattacaaagtataccgagaagttccaagtccacaaagacatggatgatggttaaagatttattaaacgaaacgaggcaggaaatgaaaatggtgggtccttctcgtgccctcttcaaaggtttggagatcactttatggagagacgttccgtttagtgcaatatattggagttcctatgaactttgcaaggaaagattatggcttgattctactagatttgcatctaaggacgcaaactgggtccattttataaacagttttgccagtggttgcataagtgggatgatagctgctatatgcacacacccttttgatgtcggtaagacgagatggcaaatatccatgatgaacaatagcgatccgaaaggcggcaataggtctagaaacatgttcaagttcttagagactatatggcgtacagaaggtcttgcggccctctacacgggcttggcagccagagtaattaagatacgcccaagttgcgccatcatgatatctagttatgagatctccaaaaaagtatttggaaacaaattgcatcagtga

SEQ ID NO: 4649 - DNA, 3096 bp, Saccharomyces cerevisiae
atgggtgtgcattcattttgggatattgcaggtcctacggcaagaccggtcaggctggaatccttggaagataagagaatggcagtagatgcctccatttggatatatcagtttttgaaagctgtccgtgatcaggaggggaatgcagtgaagaattctcatattactgggttctttagaagaatttgtaagctattatactttggcattaggccggtattcgtctttgatggtggtgtgcccgtattgaaaagggaaacaatacggcagaggaaagaaagaagacagggaaaacgagagagtgcgaaatccaccgctaggaagctgctggctttacaattgcaaaacggctcaaacgataacgtaaaaaactctacaccgagtagtggcagtagtgtgcagatcttcaaacctcaggacgagtgggacttgcccgatataccgggattcaaatacgataaggaagatgcaagagttaactctaataaaacttttgaaaaactgatgaattcgataaacggtgatggactggaagacattgatttagacactataaatccagcatcggccgaatttgaagagctgccaaaggccacacagtatttgatattatcgtcgttgaggttgaaatcaagactgaggatgggatactcgaaagaacaattggagaccatcttcccaaatagtatggatttctcaagatttcaaatagacatggtgaaaaggaggaatttttttactcaaaagttaatcaacactactgggtttcaggatggtggagcgtctaagctgaacgaggaggtgatcaataggatatccggccaaaagagtaaagagtacaagttgactaagactaataacgggtggattcttggactaggggcaaacgatggctctgatgcgcaaaaagcaatcgtaatagacgataaagatgcaggcgctttggtaaagcagttagatagtaatgctgaggacggggacgtgctccgatgggatgatttggaagataattccttaaaaatagtgcgacatgagtcttctaacgcgacgacagctccacagaaaaggagtaaccggtcagaagatgagggatgtgactctgatgaatgtgagtgggaagaagttgaactcaagcccaagaacgtcaagtttgtggaagatttttctttgaaagctgcaaggttgccttacatgggccaatccctaaacaacgctggcagtaaatcgtttttggacaaaagacatgatcaggcatcgccctccaagactactccaacaatgagaattagcagaatcagcgtggaagacgacgatgaggattacctgaaacaaattgaggaaattgaaatgatggaggcagtgcaactttctaagatggaaaagaaacctgaagcggacgacaaatcaaaaatcgctaagccggtaacgtcaaaaggtacagaggctcgtccaccaatagtacagtatggattacttggcgcacaaccggatagtaagcaaccgtatcatgtcacaaatttgaatagcaaatcagagtcggtcatcaaaaggaccagcaagacagttctttctgagtttaggccaccgtctcagcaggaggataaaggggctattttaacagagggggagcaaaacctgaattttatttctcacaagataccacagtttgattttaacaatgaaaattccctgctttttcaaaagaataccgagagtaatgtgtcccaagaagccacgaaggaaaagtctccaattcctgaaatgccgagctggttttcttcaactgcttcccagcagttgtataatccctataacacaacaaatttcgtggaagataaaaacgtaagaaatgaacaagaaagtggagcagaaactaccaataaagggagtagctatgaactcttgacaggcttaaatgctacggaaatattagaaagagaaagcgagaaagagagctccaatgatgaaaacaaggacgatgacttagaagttttatcagaagaactatttgaggacgttcccactaaatctcagatttcaaaagaagcagaggataacgatagtagaaaagtcgaatctataaataaggagcatagaaagcctcttatattcgactatgacttctccgaagatgaagaagataacatagtagaaaatatgataaaggaacaagaagagtttgatacatttaaaaacacgactttgtccacttctgctgaaagaaacgttgccgagaacgcttttgtggaggatgaattattcgaacaacagatgaaggataaaagagattcggatgaggtaactatggatatgatcaaagaagtgcaagaattactatcgaggtttggaatcccctatatcactgcgcctatggaagctgaagcacagtgtgcggaattgttacaactaaaccttgtcgatggtataattaccgatgacagtgatgttttcctatttggaggtacaaagatctacaaaaatatgttccacgaaaagaactatgttgaattttatgatgcggaatctattttaaaattattgggcttggatagaaagaatatgattgagttggcacagcttttagggagcgattacacgaatggattgaagggtatgggtcccgtttcaagcattgaagtgattgcagaatttggaaacctaaaaaattttaaagactggtataataatgggcagtttgataaacgtaagcaagaaacggaaaataaatttgaaaaagacctgagaaaaaaactggtaaataacgaaattatcttagatgatgattttcctagcgtcatggtttatgatgcgtatatgagaccagaagtcgatcacgataccacgccgtttgtttggggggtaccagatctcgatatgcttcgttcattcatgaagactcaactaggttggccacacgaaaagtctgatgaaattctcattcccttaattagagatgttaataaacgcaaaaagaaggggaagcaaaaaaggattaatgaattttttccaagggagtacatatctggtgataagaagctcaatacaagtaagagaatttcaaccgcaacaggtaaactaaagaaaagaaagatgtaa

SEQ ID NO: 4650 - DNA, 3096 bp, Artificial Sequence
  Description of Artificial Sequence: Synthetic polynucleotide
atgggtgtgcattctttttgggatattgcaggtcctacggcaagaccggtcaggttagaatccttggaagataagagaatggcagtagatgcctccatttggatatatcagtttttgaaagctgtccgtgatcaggaggggaatgcagtgaagaattctcatattactgggttctttagaagaatttgtaagcttttatactttggcattaggccggtattcgtctttgatggtggtgtgcccgtattgaaaagggaaacaataagacagaggaaagaaagaagacagggaaaaagagagagtgcgaaatccaccgctaggaagttattagctttacaattgcaaaacggctctaacgataacgtaaaaaactctacaccgagtagtggcagtagtgtgcagatcttcaaacctcaggacgagtgggacttgcccgatataccgggattcaaatacgataaggaagatgcaagagttaactctaataaaacttttgaaaaattaatgaattctataaacggtgatggattagaagacattgatttagacactataaatccagcatctgccgaatttgaagagttaccaaaggccacacagtatttgatattatcttctttgaggttgaaatctagattaaggatgggatactctaaagaacaattggagaccatcttcccaaatagtatggatttcagtagatttcaaatagacatggtgaaaaggaggaatttttttactcaaaagttaatcaacactactgggtttcaggatggtggagcgtctaagttgaacgaggaggtgatcaataggatatccggccaaaagagtaaagagtacaagttgactaagactaataacgggtggattcttggattaggggcaaacgatggctctgatgcgcaaaaagcaatcgtaatagacgataaagatgcaggcgctttggtaaagcagttagatagtaatgctgaggacggggacgtgctcagatgggatgatttggaagataattccttaaaaatagtgagacatgagtcttctaacgcgacgacagctccacagaaaaggagtaacagaagtgaagatgagggatgtgactctgatgaatgtgagtgggaagaagttgaactcaagcccaagaacgtcaagtttgtggaagatttttctttgaaagctgcaaggttgccttacatgggccaatccttgaacaacgctggcagtaaaagttttttggacaaaagacatgatcaggcatctccctccaagactactccaacaatgagaattagcagaatcagcgtggaagacgacgatgaggattacttgaaacaaattgaggaaattgaaatgatggaggcagtgcaactttctaagatggaaaagaaacctgaagcggacgacaaatctaaaatcgctaagccggtaacgtccaaaggtacagaggctcgtccaccaatagtacagtatggattacttggcgcacaaccggatagtaagcaaccgtatcatgtcacaaatttgaatagcaaaagtgagtctgtcatcaaaaggaccagcaagacagttctttctgagtttaggccaccgtctcagcaggaggataaaggggctattttaacagagggggagcaaaacttgaattttatttctcacaagataccacagtttgattttaacaatgaaaattccttactttttcaaaagaataccgagagtaatgtgtcccaagaagccacgaaggaaaagtctccaattcctgaaatgccgagctggttttcttctactgcttcccagcagttgtataatccctataacacaacaaatttcgtggaagataaaaacgtaagaaatgaacaagaaagtggagcagaaactaccaataaagggagtagctatgaactcttgacaggcttaaatgctacggaaatattagaaagagaaagcgagaaagagagctccaatgatgaaaacaaggacgatgacttagaagttttatctgaagaattatttgaggacgttcccactaaatctcagatttccaaagaagcagaggataacgatagtagaaaagtcgaatctataaataaggagcatagaaagcctcttatattcgactatgacttctccgaagatgaagaagataacatagtagaaaatatgataaaggaacaagaagagtttgatacatttaaaaacacgactttgtccacttctgctgaaagaaacgttgccgagaacgcttttgtggaggatgaattattcgaacaacagatgaaggataaaagagattctgatgaggtaactatggatatgatcaaagaagtgcaagaattattatctaggtttggaatcccctatatcactgcgcctatggaagctgaagcacagtgtgcggaattgttacaattgaaccttgtcgatggtataattaccgatgacagtgatgttttcttatttggaggtacaaagatctacaaaaatatgttccacgaaaagaactatgttgaattttatgatgcggaatctattttaaaattattgggcttggatagaaagaatatgattgagttggcacagcttttagggagcgattacacgaatggattgaagggtatgggtcccgtttccagcattgaagtgattgcagaatttggaaacttgaaaaattttaaagactggtataataatgggcagtttgataaacgtaagcaagaaacggaaaataaatttgaaaaagacttgagaaaaaaattagtaaataacgaaattatcttagatgatgattttcctagcgtcatggtttatgatgcgtatatgagaccagaagtcgatcacgataccacgccgtttgtttggggggtaccagatctcgatatgcttcgttctttcatgaagactcaattgggttggccacacgaaaagtctgatgaaattctcattcccttaattagagatgttaataaacgcaaaaagaaggggaagcaaaaaaggattaatgaattttttccaagggagtacatatctggtgataagaagctcaatacaagtaagagaatttctaccgcaacaggtaaattgaagaaaagaaagatgtga

SEQ ID NO: 4651 - DNA, 1605 bp, Saccharomyces cerevisiae
atgagcaacaaatttacaatggagtcacctaagcatttggtggatgatgtgcttttcatatcacccaccaatgatggatcagaagaaaagcctacggaagtcacgttccaggaagatgaaggccatgacgctagcttgcataatcgcagccatgacaagaagtcggaacttgccaccgaacgggaaattatggctactaccacggatgatgacggcatcccctccccttcccatccaatggaaaagcgtgtcttgcgcaaaatggatatatacttgattcctcttatggggatgctatatttcctttctaacctggataaatcgaatattggtaacgcagaagttgcaggtctatccaaggatatccaccttgtaggaacgcaatataacacatgtgtcacagtttttttcgcgacgtatgttcttttcgaccccataggtactaaccttctgaaaattatgggtccgccattaatgatgagtatctgtttgacctgtttcggtgctatttcgctcggaactgcttgggttaagaattatgctcaattgatcgttgtcagactactactgggtgcctttgaaggtatgatttatcccgctattaacatgtacctttcagtctgctatagaagagaacaatatgctctgaggttcgcttttgtcttcagtgcagcctgtttgtcttcatcttttggtgggctgattgcttatggttgttccaaaatcagcggttctctaaaggactggcaatacatttacattgtcgaaggttgtatctctttggggttcgtaccattctatgccttcgggttgagcaaaaatttggaggattcgtggtttttcaataaggaggaaaaagagtacatttccgaaagatacaagactatgaacacttttgacccggacgaaaaatttgaatggttccaagtgtggcaagcagttaaggatgtcaagacttgggctagtgctgtggcattattcggtatcgatttgactacttttggtctaacagtcttcttgccgatcatcattaccagtatggggttcactaatgtcagagctcaattaatgaccgtgcccatctatttccttacagcaattgtgttcttcatttgtgccgtttggtctgatcgtataaagttgagatctccattcatcctgggtgcttgtctgacgacttcgataggcatagctatcgtccttggttctcaagttcatggtgtgagatattttggcgtttacattctttgtatgggtatttacgttaatgctgcctgtaactgtttatggttaagtggtaacactggtaattacttcaagagagccaccgctttaggaattaatctatttttcgggtctggttcagggttggtctctggtcaaatttttgttgccaaagacaagccaagatatatcaaagggctgtcgattagtctggcctttcaagtcttctccatatttatgacggttgtgcaaattttcctatacaagagggaaaacgataaaaagaaagcaataatagatcgctgtaatgaattgggagagcctattccatacgacgaaaggttaagcgacaaaaaccctgagtttaagtacatgtattag

SEQ ID NO: 4652 - DNA, 1605 bp, Artificial Sequence
  Description of Artificial Sequence: Synthetic polynucleotide
atgagcaacaaatttacaatggagtctcctaagcatttggtggatgatgtgcttttcatatctcccaccaatgatggatctgaagaaaagcctacggaagtcacgttccaggaagatgaaggccatgacgctagcttgcataatcgcagccatgacaagaagtctgaacttgccaccgaaagagaaattatggctactaccacggatgatgacggcatcccctccccttcccatccaatggaaaagcgtgtcttgcgcaaaatggatatatacttgattcctcttatggggatgctttatttcctttctaaccttgataaatctaatattggtaacgcagaagttgcaggtttatccaaggatatccaccttgtaggaacgcaatataacacatgtgtcacagtttttttcgcgacgtatgttcttttcgaccccataggtactaaccttttgaaaattatgggtccgccattaatgatgagtatctgtttgacctgtttcggtgctatttctctcggaactgcttgggttaagaattatgctcaattgatcgttgtcagattattattgggtgcctttgaaggtatgatttatcccgctattaacatgtacctttctgtctgctatagaagagaacaatatgctttgaggttcgcttttgtcttcagtgcagcctgtttgtcttcttcttttggtgggttgattgcttatggttgttccaaaatcagcggttctttgaaggactggcaatacatttacattgtcgaaggttgtatctctttggggttcgtaccattctatgccttcgggttgagcaaaaatttggaggattcttggtttttcaataaggaggaaaaagagtacatttccgaaagatacaagactatgaacacttttgacccggacgaaaaatttgaatggttccaagtgtggcaagcagttaaggatgtcaagacttgggctagtgctgtggcattattcggtatcgatttgactacttttggtttaacagtcttcttgccgatcatcattaccagtatggggttcactaatgtcagagctcaattaatgaccgtgcccatctatttccttacagcaattgtgttcttcatttgtgccgtttggtctgatcgtataaagttgagatctccattcatcttgggtgcttgtttgacgacttccataggcatagctatcgtccttggttctcaagttcatggtgtgagatattttggcgtttacattctttgtatgggtatttacgttaatgctgcctgtaactgtttatggttaagtggtaacactggtaattacttcaagagagccaccgctttaggaattaatttatttttcgggtctggttctgggttggtctctggtcaaatttttgttgccaaagacaagccaagatatatcaaagggctttctattagtttggcctttcaagtcttctccatatttatgacggttgtgcaaattttcttgtacaagagggaaaacgataaaaagaaagcaataatagatcgctgtaatgaattgggagagcctattccatacgacgaaaggttaagcgacaaaaaccctgagtttaagtacatgtattga

SEQ ID NO: 4653 - DNA, 2430 bp, Saccharomyces cerevisiae
atggtagattcaattcaccgtattgcatcggcgttggatacggccaaagtaataacgagggaagctgccgcggtagccacctctaagctgggtgaatcctcctatacttattattctcaaaacatcaatcctcaacagttagtcaccttgttaaattctaggaactctagagaagttagagatgcaatgaagagaataatatctataatggcttccgatgatgactctattgacgttcaattatactttgctgatgttgtaaagaatatcaccactaatgacaccaaagtgaaaagacttattcacctgtatttacttagatttgcagaaaatgacccaaacctgaccctgttatctattaattctcttcaaaaatcattgtctgattcgaattccgaactgagatgctttgctttgagtgccctttctgacatgaaaatgtcatcattagcacctataattttgcatactgtcaagaaattggttacagatccatctgcaatggttcgtggtgaagtcgccttggccattatcaaattatatagggctggaaagaatgactatcatgaagaattgttggatattctgaaagaattaatggcagatacagatcctaaggtgatatcctgtgctgtcctagcttacaaagaatgttatgcggatcacttggagctattgcatggacattttcgcagatattgtagaataattaagcaactagattcgtggtcacaatcatatttaattgagctgctaatcaagtactgtaagcagtatttaccaaaaccaactgtggtcgataaatcatcagaaggttccccaaggagttgtcctttaccagataaatacaacgagattgaatacccatcttacgaggtggtaaatgaccctgatttagatttatttctacagagtttgaattgcttaatttatagttccaaccctacagtgattttatcgtgttgcaatgcgctatatcagttagcttcaccattgcagatgaaaaatactaaatttattgaagcattggttagaacggtaaccatgacagaaaaccaaggtaacaaagaaatgcttttacaagcaattcacttcttatcgatcttagaccagacactatttttaccctacaccaagaaattttacgttttccccaaagatcctattgtggcatcaatttggaagatccaaattttgtccacgttaataaatgaatcaaacgttaaagaaatattcaaagaattgaaatattatgttgccagtgctcatttcccagaaaatgttgttattatggcggttaagtcattatctcgatgtggccaattgtcaacgagttgggaatcacatgtaatgaagtggttaattgatcatatggaatcccacaacctctctgcttctgtcctagatgcatacgtgaatgttatcaggatgctggtgcaaaaaaatcctacaaaacatcttcgcataatcttcaagcttgcagatttattaacagttcaaacgagtttggctgataatgctcgtgcaggtattgtttggttatttggtgaaattgcctcgattgaatttaagatatgtccggacgttttgaggaggctaatccagaatttttcaaatgagggtcctgagacaagatgtcagatcttagtgttatcagcaaaactgttgtcatatgacattgataattttaagcaagcgcaagttactggaagcgaagaaaataaccaaaatcccccatactatgattttagtggttcaagaatctctcaaatgtacaatgcggtcctttacttggcaaaatatgatgacgaatttgatattagggatagagccaggatgatttcatccttgtttgattcagggaaatatgaaattgtgtcactactattacaagcacctaaacctacggcaagaagtgacgattttatcgtttctgcaagattggaaacacataccccagaaataaaagaattttttagaatgcttccttggaatactgaaattactgaggttggcgagacaggtaacgatattagagaaggcgcagaattgaaagactataacaaatacaaaaaaagtttttcatcgcagtcttttattaccaacaactcagcaagatctttcacatctagctccaacgcaaaattgactgggatcaatgacggcgatagcaatagcatctcaggtaaaggtaacgtaaacaccttcacatctcaaaacgggaagaaatatcgtttgcaaagcctggacgagtttttttccgacattccagaaaggaagagtaaaccaaggaaaattataaaggtggtggaagaaagcagtgacgaggatgaagacgaatcggaagagagcagtgacgatgatgagtatagtgactcttctttgggaacgtcttcttcgggaacgtcttcttcgcatctggagctttag

SEQ ID NO: 4654 - DNA, 2430 bp, Artificial Sequence
  Description of Artificial Sequence: Synthetic polynucleotide
atggtagattctattcaccgtattgcaagtgcgttggatacggccaaagtaataacgagggaagctgccgcggtagccacctctaagttgggtgaatcctcctatacttattattctcaaaacatcaatcctcaacagttagtcaccttgttaaattctaggaactctagagaagttagagatgcaatgaagagaataatatctataatggcttccgatgatgactctattgacgttcaattatactttgctgatgttgtaaagaatatcaccactaatgacaccaaagtgaaaagacttattcacttgtatttacttagatttgcagaaaatgacccaaacttgaccttattatctattaattctcttcaaaaatctttgtctgattctaattccgaattgagatgctttgctttgagtgccctttctgacatgaaaatgtcttctttagcacctataattttgcatactgtcaagaaattggttacagatccatctgcaatggttcgtggtgaagtcgccttggccattatcaaattatatagggctggaaagaatgactatcatgaagaattgttggatattttgaaagaattaatggcagatacagatcctaaggtgatatcctgtgctgtcttggcttacaaagaatgttatgcggatcacttggagttattgcatggacattttcgcagatattgtagaataattaagcaattggattcttggtctcaaagttatttaattgagttattgatcaagtactgtaagcagtatttaccaaaaccaactgtggtcgataaatcttctgaaggttccccaaggagttgtcctttaccagataaatacaacgagattgaatacccatcttacgaggtggtaaatgaccctgatttagatttatttttgcagagtttgaattgcttaatttatagttccaaccctacagtgattttaagttgttgcaatgcgttatatcagttagcttctccattgcagatgaaaaatactaaatttattgaagcattggttagaacggtaaccatgacagaaaaccaaggtaacaaagaaatgcttttacaagcaattcacttcttatctatcttagaccagacattatttttaccctacaccaagaaattttacgttttccccaaagatcctattgtggcatctatttggaagatccaaattttgtccacgttaataaatgaatctaacgttaaagaaatattcaaagaattgaaatattatgttgccagtgctcatttcccagaaaatgttgttattatggcggttaagtctttatctcgttgtggccaattgagcacgagttgggaaagtcatgtaatgaagtggttaattgatcatatggaatcccacaacctctctgcttctgtcttggatgcatacgtgaatgttatcaggatgttggtgcaaaaaaatcctacaaaacatcttcgcataatcttcaagcttgcagatttattaacagttcaaacgagtttggctgataatgctcgtgcaggtattgtttggttatttggtgaaattgcctctattgaatttaagatatgtccggacgttttgaggaggttgatccagaatttttctaatgagggtcctgagacaagatgtcagatcttagtgttaagtgcaaaacttttgagttatgacattgataattttaagcaagcgcaagttactggaagcgaagaaaataaccaaaatcccccatactatgattttagtggttccagaatctctcaaatgtacaatgcggtcctttacttggcaaaatatgatgacgaatttgatattagggatagagccaggatgatttcttccttgtttgattctgggaaatatgaaattgtgtctttattattacaagcacctaaacctacggcaagaagtgacgattttatcgtttctgcaagattggaaacacataccccagaaataaaagaattttttagaatgcttccttggaatactgaaattactgaggttggcgagacaggtaacgatattagagaaggcgcagaattgaaagactataacaaatacaaaaaaagtttttcttctcagtcttttattaccaacaactctgcaagatctttcacatctagctccaacgcaaaattgactgggatcaatgacggcgatagcaatagcatcagtggtaaaggtaacgtaaacaccttcacatctcaaaacgggaagaaatatcgtttgcaaagcttggacgagtttttttccgacattccagaaaggaagagtaaaccaaggaaaattataaaggtggtggaagaaagcagtgacgaggatgaagacgaaagtgaagagagcagtgacgatgatgagtatagtgactcttctttgggaacgtcttcttctggaacgtcttcttctcatttagagctttga

SEQ ID NO: 4655 - DNA, 786 bp, Saccharomyces cerevisiae
atgacgcaagaattcattgataaagtatcttcctacctgactcctgatgtggacattgcacctatttctcaaggtgcagaagccattgttttcacaacgactactcacccatatctcccaagagcaaaggattctcatcaaaagtatattatcaaatataggccaccaaagcgttatagacatccacaaatagaccaggcactaacaaaacatcgtacgttgaatgagtcgcgtttattggccaaattatacttgattccagggctatgtgtccctcaactgatagcgtgtgatccatacaatggattcatttggttagagttccttggagaagatcttcccggagggcacggttttagtaacctaaagaacttcctttggatgcatgaccaagatccatatagtgatcttgtagcaactacactacggaaagtggggcgccaaattgggttgttgcactggaatgactactgtcatggtgatttgacaagttctaacattgttctcgtgcgagatggtgcgagatggacgcctcatttgattgatttcggtctgggctcagtttcaaacctggtcgaagataaaggcgtcgatttatacgtcttagagagagctattttaagtacacattcgaagcatgcggaaaaatacaatgcttggatcatggaggggttcgaagaggtctatcgtgaacaaggtgcgaaaggtgccaagaaactgaaagaagttaccaaaagattcgaagaggtcaggttgcgtggtcgtaagagaagtatgctaggataa

SEQ ID NO: 4656 - DNA, 786 bp, Artificial Sequence
  Description of Artificial Sequence: Synthetic polynucleotide
atgacgcaagaattcattgataaagtatcttcctacttgactcctgatgtggacattgcacctatttctcaaggtgcagaagccattgttttcacaacgactactcacccatatctcccaagagcaaaggattctcatcaaaagtatattatcaaatataggccaccaaagcgttatagacatccacaaatagaccaggcattaacaaaacatcgtacgttgaatgagtctcgtttattggccaaattatacttgattccagggctttgtgtccctcaattgatagcgtgtgatccatacaatggattcatttggttagagttccttggagaagatcttcccggagggcacggttttagtaacttgaagaacttcctttggatgcatgaccaagatccatatagtgatcttgtagcaactacattgagaaaagtggggcgccaaattgggttgttgcactggaatgactactgtcatggtgatttgacaagttctaacattgttctcgtgagagatggtgcgagatggacgcctcatttgattgatttcggtcttggctctgtttctaacttggtcgaagataaaggcgtcgatttatacgtcttagagagagctattttaagtacacattctaagcatgcggaaaaatacaatgcttggatcatggaggggttcgaagaggtctatcgtgaacaaggtgcgaaaggtgccaagaaattgaaagaagttaccaaaagattcgaagaggtcaggttgcgtggtcgtaagagaagtatgcttggatga

SEQ ID NO: 4657 - DNA, 1275 bp, Saccharomyces cerevisiae
atggcagccaactctggtctcgactcaaaagttgaatattatcggcttcaagagaatgaaattattagcgctgtatcaagtgaggatgcagatcaaaatgatgcgggctttcgattgagtaccatccatttgcatttgttccatggattgaaatttgccgctctattgttcacagtggtgcctgtatttataatcctcgacagtatgaagatcatttttcaacgcaaacgtaggttttgccttgaccatgtcaacagaagttttttaagacaaagttcttggatcctcgatgaacgcatctgtcaatacgtgctcaatcctttatttgtttgtttatatccttctacattttctagtccaacatatgtcaaatgcaacattcctatagaagatcagaaatctccagaaaacaatattttccaagaccatcaattaaacgcacccaaaatagttagcacaaagttttatcaatatgttatgccggaaggatttgaccccacgacagatccagttttagtattctatcatgggggtggttatgctcttaaattgacgcctacgtcgttttctttcttgaataatatgcgaaatgcctttcctaaaatggccattcttgtaccagattataccgttacagctaccgatgaccagtcgaaaaagtaccctctgcaaattttacaaaatgtggccatttttgattacgttgttaagactatggggtgcaaaaatgtagtgattatgggggattctgctggtggcaatgctgttttgaacattgttttatatttaagaaagtgtcacagagaaatatacccgaaaaaagtcatagccataagtccctgggccaatgccactttcttccacgagggagaaaaggaatatatgcaaggaacacaagaatgggatggtctatgtttgaagagtcattcgatgtttgggcgaatgtttgtaggaaacaacccaaacgtcgattttaccagcgacccttttgttaatattgaaaagaatttcgaaactaaaatgtggcaagatattctgaaaaagtgctctgtgatgattacttatggtagtgatgagttgttgagctttcaaaacaagatcttggcaaagaaaatgagtgacgctagcgagggatgtaaccactttaccgccaaaaatgtgctggttgaacaccaaggttatcatacgggcccaatattaaactactctcgtaatatggatcgctggaccaacataccatctatcgctcgcattcttgagtttatgcaatcctga

SEQ ID NO: 4658 - DNA, 1275 bp, Artificial Sequence
  Description of Artificial Sequence: Synthetic polynucleotide
atggcagccaactctggtctcgactctaaagttgaatattatagacttcaagagaatgaaattattagcgctgtatctagtgaggatgcagatcaaaatgatgcgggctttagattgagtaccatccatttgcatttgttccatggattgaaatttgccgctttattgttcacagtggtgcctgtatttataatcctcgacagtatgaagatcatttttcaacgcaaacgtaggttttgccttgaccatgtcaacagaagttttttaagacaaagttcttggatcctcgatgaacgcatctgtcaatacgtgctcaatcctttatttgtttgtttatatccttctacattttctagtccaacatatgtcaaatgcaacattcctatagaagatcagaaatctccagaaaacaatattttccaagaccatcaattaaacgcacccaaaatagttagcacaaagttttatcaatatgttatgccggaaggatttgaccccacgacagatccagttttagtattctatcatgggggtggttatgctcttaaattgacgcctacgtctttttctttcttgaataatatgagaaatgcctttcctaaaatggccattcttgtaccagattataccgttacagctaccgatgaccagtccaaaaagtaccctttacaaattttacaaaatgtggccatttttgattacgttgttaagactatggggtgcaaaaatgtagtgattatgggggattctgctggtggcaatgctgttttgaacattgttttatatttaagaaagtgtcacagagaaatatacccgaaaaaagtcatagccataagtccctgggccaatgccactttcttccacgagggagaaaaggaatatatgcaaggaacacaagaatgggatggtttgtgtttgaagagtcattctatgtttgggagaatgtttgtaggaaacaacccaaacgtcgattttaccagcgacccttttgttaatattgaaaagaatttcgaaactaaaatgtggcaagatattttgaaaaagtgctctgtgatgattacttatggtagtgatgagttgttgagctttcaaaacaagatcttggcaaagaaaatgagtgacgctagcgagggatgtaaccactttaccgccaaaaatgtgcttgttgaacaccaaggttatcatacgggcccaatattaaactactctcgtaatatggatcgctggaccaacataccatctatcgctcgcattcttgagtttatgcaatcctga

SEQ ID NO: 4659 - DNA, 2256 bp, Saccharomyces cerevisiae
atgtctttcctcatttcctttgataaatcgaagaaacatcctgcccatttgcagttagcgaacaatttgaagattgccctagcacttgaatatgcaagcaaaaatttaaagcctgaagttgacaatgataatgctgccatggaattgcgcaatacaaaggaacctttccttttgtttgatgctaacgctattctaagatatgtcatggatgattttgaaggtcaaacttccgacaagtatcaatttgcattggcatctttacaaaacctgttatatcataaagaattacctcaacaacatgtcgaggttttgacaaataaggccattgaaaattacttggtcgaattaaaagaaccattgactactacagatttgatcctgtttgctaacgtttatgctctaaattcttctttagttcattctaaattcccagaattgccatccaaagtgcataacgctgtagcattggctaaaaagcatgttccacgtgattcttcttctttcaaaaacatcggcgcagtgaaaatccaagctgacttaacagttaagccaaaggattcagaaattttgcctaagccaaacgaaagaaacatcttgatcacttcggcattaccttatgtcaacaacgttccacacttgggtaatatcatcggtagtgttctttcagcagacatttttgctcgttactgtaagggacgtaattataatgccttgtttatttgtggtactgatgaatatggtactgccacggaaactaaagctttggaggaaggtgtgacaccaagacaattatgtgacaaatatcacaaaatccacagtgacgtttacaagtggttccaaattggatttgattatttcggtagaactacgacggacaagcaaacggagattgctcaacatatttttacaaagctaaattcgaatggttatctagaagaacaatctatgaagcaattgtactgtccagttcataattcttatctggctgatcgttacgtggaaggtgaatgtccaaaatgtcactacgatgatgctcgtggggatcaatgtgacaaatgtggtgccctgttagatccatttgaattgatcaatccacgttgtaaattagatgatgcttctccagaaccaaaatattctgatcatattttcctatcgctggataaattagaaagccaaatttctgaatgggttgaaaaggcctctgaagaaggtaactggtcaaaaaattcaaaaacaattacgcaatcatggttgaaggatggtttgaagccacgttgtattacaagagatttagtttggggtacgccagtgcctttagaaaaatataaagacaaagtcttgtacgtttggtttgacgctacaatcggctacgtttccatcacttccaactacaccaaagaatggaaacaatggtggaataatccagagcatgtttcattgtatcaattcatgggtaaggacaatgttcctttccatacagttgttttccctggttctcaattgggtacggaagagaactggactatgttgcaccatttgaatactacagaatacttacaatatgagaacggtaaattttctaaaagtaggggtgttggtgtttttggtaataacgctcaagactctggaatttctccaagtgtttggagatactacctggcatctgttagaccagaatctagtgattctcatttctcatgggatgactttgttgctagaaacaacagtgaattgttggctaacttgggtaactttgttaacagattaattaagtttgttaatgccaaatataatggtgttgttccaaaattcgaccccaagaaggtttccaattatgatggtttagttaaagatatcaacgaaattttatcaaattacgtcaaggaaatggaacttggacatgaaagacgtggtctagaaattgccatgtcgttaagtgctcgtggtaaccagtttttgcaagaaaataagttggacaataccttgttttcacagtccccagaaaagtcagatgctgttgtcgcagttggtttgaatattatttacgctgttagctctattatcacaccatatatgccagaaataggtgagaaaataaacaagatgttaaatgcaccagctttaaaaattgatgatagattccatttggcaatcctagaaggacataatataaacaaggcagaatacttgttccaacgtattgatgaaaagaaaatcgatgaatggagagccaaatatggtggtcaacaagtgtaa

SEQ ID NO: 4660 - DNA, 2256 bp, Artificial Sequence
  Description of Artificial Sequence: Synthetic polynucleotide
atgtctttcctcatttcctttgataaatccaagaaacatcctgcccatttgcagttagcgaacaatttgaagattgccttggcacttgaatatgcaagcaaaaatttaaagcctgaagttgacaatgataatgctgccatggaattgcgcaatacaaaggaacctttccttttgtttgatgctaacgctattttaagatatgtcatggatgattttgaaggtcaaacttccgacaagtatcaatttgcattggcatctttacaaaacttattatatcataaagaattacctcaacaacatgtcgaggttttgacaaataaggccattgaaaattacttggtcgaattaaaagaaccattgactactacagatttgatcttatttgctaacgtttatgctttgaattcttctttagttcattctaaattcccagaattgccatccaaagtgcataacgctgtagcattggctaaaaagcatgttccacgtgattcttcttctttcaaaaacatcggcgcagtgaaaatccaagctgacttaacagttaagccaaaggattctgaaattttgcctaagccaaacgaaagaaacatcttgatcacttctgcattaccttatgtcaacaacgttccacacttgggtaatatcatcggtagtgttctttctgcagacatttttgctcgttactgtaagggacgtaattataatgccttgtttatttgtggtactgatgaatatggtactgccacggaaactaaagctttggaggaaggtgtgacaccaagacaattatgtgacaaatatcacaaaatccacagtgacgtttacaagtggttccaaattggatttgattatttcggtagaactacgacggacaagcaaacggagattgctcaacatatttttacaaagttgaatagtaatggttatttggaagaacaatctatgaagcaattgtactgtccagttcataattcttatttggctgatcgttacgtggaaggtgaatgtccaaaatgtcactacgatgatgctcgtggggatcaatgtgacaaatgtggtgccttattagatccatttgaattgatcaatccacgttgtaaattagatgatgcttctccagaaccaaaatattctgatcatattttcttgtctttagataaattagaaagccaaatttctgaatgggttgaaaaggcctctgaagaaggtaactggtccaaaaattctaaaacaattacgcaaagttggttgaaggatggtttgaagccacgttgtattacaagagatttagtttggggtacgccagtgcctttagaaaaatataaagacaaagtcttgtacgtttggtttgacgctacaatcggctacgtttccatcacttccaactacaccaaagaatggaaacaatggtggaataatccagagcatgtttctttgtatcaattcatgggtaaggacaatgttcctttccatacagttgttttccctggttctcaattgggtacggaagagaactggactatgttgcaccatttgaatactacagaatacttacaatatgagaacggtaaattttctaaaagtaggggtgttggtgtttttggtaataacgctcaagactctggaatttctccaagtgtttggagatactacttggcatctgttagaccagaatctagtgattctcatttcagttgggatgactttgttgctagaaacaacagtgaattgttggctaacttgggtaactttgttaacagattaattaagtttgttaatgccaaatataatggtgttgttccaaaattcgaccccaagaaggtttccaattatgatggtttagttaaagatatcaacgaaattttatccaattacgtcaaggaaatggaacttggacatgaaagacgtggtttggaaattgccatgtctttaagtgctcgtggtaaccagtttttgcaagaaaataagttggacaataccttgttttcccagtccccagaaaagagtgatgctgttgtcgcagttggtttgaatattatttacgctgttagctctattatcacaccatatatgccagaaataggtgagaaaataaacaagatgttaaatgcaccagctttaaaaattgatgatagattccatttggcaatcttggaaggacataatataaacaaggcagaatacttgttccaacgtattgatgaaaagaaaatcgatgaatggagagccaaatatggtggtcaacaagtgtga

SEQ ID NO: 4661 - DNA, 2106 bp, Saccharomyces cerevisiae
atgcatgctacaaactggttcgacgattggaacccagaagctctttatagagacgatgtcactggctgcgatgactgttccgaaacttcgccaattccaaagtctggtattatatgtggaccgatattaagactcatcaacatggattttaaggaaaaaacctacgaggggtctattatggtggtagttagaggcgaggaaaactttccgaaaattacctatcagctagggccctctttgccctctgaggatgaagacatcgaagttaacgaggcattcttcgaaggtaaactttttcataaggacattttaaaagatgataatatatggttttacaggtatgagattaagttgcccatgtccaactatgagcagatggtaaaatatgctgttgacggtactatggaaccacattataggttcttcgttccctctttcactcaaaattcgaacgttatctcctattcatgcaacggattttcactgagcgtagatacatcgaaattcaaaggttctctatggtatgatgtccttaaaaagcatcgatacgttcattatcatgccattctcggcggcggagatcaaatttactccgataatattaaactgcatgcgccaaatcttaaagcttggctggagacaaaggacccaattaagaagtataatactcagaccactgaagaaacaaaagagcagattaggcagttttatttagaacactatttaaactggtacggttacggtcactggtatggttctaccccaaaatccaagaccacccaaaaatgctttgtcaagtcactagcttgtattcctgccattaatgtctgggatgaccacgatattattgatggctatggatcgtacaacgattccttcatgaagactgaaaatttcctcacagtgggaagaatggcttaccgatactatatgcttttccagcagcatgtcagtgcttctaaacaagatggcgatgagtatgcttatctcaagagcaaacaatggattctaggtaatgaaaaagggagttcttatatcggtgaaaggtctcactcaatattctcttggttgggtccgaaaatggccatgttagggttggactgtagaactgagaggaaattacacgagattttctcagaaagaagttattccttaatttgggaacgtgtcgaaagggaaataaaaaatttaaaaggtggccacttattgctgatgctcggtatcccgattgcatatccaaggttagtatggttagaatggctttttacctcaaaactactggctccaattaaatatttatctaaaaaagggatatttgctagtggcttcgttaacgaatttaatggagatgtagaactgttggatgatttaaatgatcattggtgcgcgagacatcataaaaaagaaagaaactacttgataatgaaattgcaagacataggtgctaaatatggcgtcagaataaccatattatcaggcgatgtacatttggcatctgttgggagatttagggcaaaaattcatagacaccatctcatcatgtctgaggagaaggaaaaggaaaacaccagaattattgaagaaccaacgaaagacgtaaggctgatttttaatatcattgctagcgccatagtaaataccccaccgccagatgcaatggccacgctattgcaaaaaagatgtcgcttgcatcatttcgatttggaaacggatgaagatgccgtaccaatttttgccaaggaagtggatggagtacataaacgtaaagaatcatgtttcatgaacaagagaaactggtcagatattatacctatagaaaacctgttgaataatccccaattgagtaaagaattaggcgtaaaggttggtgatatagtcattcctggtatcatcacagaacagcaaaagctacagaaattggaaaacgatgaccaaattaactcttatccagtaacttctggtggcttgtttaccaccattcatgttgaaagagatgcaaatcaaacaaactcacaaactgtgagctactgtttacccattccagagttaacagttacctgcgaacggttgtctcacaagggtatcaaacatctgaatatcacatag

SEQ ID NO: 4662 - DNA, 2106 bp, Artificial Sequence
  Description of Artificial Sequence: Synthetic polynucleotide
atgcatgctacaaactggttcgacgattggaacccagaagctctttatagagacgatgtcactggctgcgatgactgttccgaaacttctccaattccaaagtctggtattatatgtggaccgatattaagactcatcaacatggattttaaggaaaaaacctacgaggggtctattatggtggtagttagaggcgaggaaaactttccgaaaattacctatcagttagggccctctttgccctctgaggatgaagacatcgaagttaacgaggcattcttcgaaggtaaactttttcataaggacattttaaaagatgataatatatggttttacaggtatgagattaagttgcccatgtccaactatgagcagatggtaaaatatgctgttgacggtactatggaaccacattataggttcttcgttccctctttcactcaaaatagcaacgttatctcctattcttgcaacggattttctttaagcgtagatacaagtaaattcaaaggttctctttggtatgatgtccttaaaaagcatcgttacgttcattatcatgccattctcggcggcggagatcaaatttactccgataatattaaattgcatgcgccaaatcttaaagcttggttggagacaaaggacccaattaagaagtataatactcagaccactgaagaaacaaaagagcagattaggcagttttatttagaacactatttaaactggtacggttacggtcactggtatggttctaccccaaaatccaagaccacccaaaaatgctttgtcaagtctttggcttgtattcctgccattaatgtctgggatgaccacgatattattgatggctatggatcttacaacgattccttcatgaagactgaaaatttcctcacagtgggaagaatggcttacagatactatatgcttttccagcagcatgtcagtgcttctaaacaagatggcgatgagtatgcttatctcaagagcaaacaatggattttgggtaatgaaaaagggagttcttatatcggtgaaaggtctcactccatattctcttggttgggtccgaaaatggccatgttagggttggactgtagaactgagaggaaattacacgagattttctctgaaagaagttattccttaatttgggaacgtgtcgaaagggaaataaaaaatttaaaaggtggccacttattgttgatgctcggtatcccgattgcatatccaaggttagtatggttagaatggctttttacctccaaattattagctccaattaaatatttatctaaaaaagggatatttgctagtggcttcgttaacgaatttaatggagatgtagaattattggatgatttaaatgatcattggtgcgcgagacatcataaaaaagaaagaaactacttgataatgaaattgcaagacataggtgctaaatatggcgtcagaataaccatattaagtggcgatgtacatttggcatctgttgggagatttagggcaaaaattcatagacaccatctcatcatgtctgaggagaaggaaaaggaaaacaccagaattattgaagaaccaacgaaagacgtaaggttgatttttaatatcattgctagcgccatagtaaataccccaccgccagatgcaatggccacgttattgcaaaaaagatgtcgcttgcatcatttcgatttggaaacggatgaagatgccgtaccaatttttgccaaggaagtggatggagtacataaacgtaaagaaagttgtttcatgaacaagagaaactggtctgatattatacctatagaaaaccttttgaataatccccaattgagtaaagaattaggcgtaaaggttggtgatatagtcattcctggtatcatcacagaacagcaaaagttacagaaattggaaaacgatgaccaaattaactcttatccagtaacttctggtggcttgtttaccaccattcatgttgaaagagatgcaaatcaaacaaactctcaaactgtgagctactgtttacccattccagagttaacagttacctgcgaaagattgtctcacaagggtatcaaacatttgaatatcacatga

SEQ ID NO: 4663 - DNA, 732 bp, Saccharomyces cerevisiae
atgcataacatccaattagtgcaagagatagaaagacatgaaaccccgttaaacattagacctacctctccatacactttaaaccctcctgtcgagagagatgggttttcttggccaagtgtgggtacaagacaacgtgcagaggaaactgaagaggaggaaaaggaacgaattcaacgcatttcaggcgctatcaagacaattttgaccgaactgggtgaagatgtcaacagagaaggtctactagatactccacaaagatacgctaaagccatgctttatttcactaaaggttaccaaacgaacattatggacgatgtcattaagaatgctgtctttgaagaagatcatgatgaaatggttattgttcgtgatattgaaatttactcgttatgtgaacatcatttggtgccatttttcggcaaggttcatatcgggtatataccaaataaaaaagtcatcgggttaagtaagttggccagattggcagaaatgtatgcgagaaggctccaagttcaagaaagacttacaaagcaaattgcaatggccctaagtgatattctaaaaccattaggtgtagccgttgttatggaagcttctcatatgtgcatggtttcaagaggcattcaaaaaacgggatcttctacggtaacttcttgtatgcttggagggtttagggctcataaaacaagagaagagtttttaactcttttaggaagaagaagtatttga

SEQ ID NO: 4664 - DNA, 732 bp, Artificial Sequence
  Description of Artificial Sequence: Synthetic polynucleotide
atgcataacatccaattagtgcaagagatagaaagacatgaaaccccgttaaacattagacctacctctccatacactttaaaccctcctgtcgagagagatgggttttcttggccaagtgtgggtacaagacaacgtgcagaggaaactgaagaggaggaaaaggaaagaattcaacgcatttctggcgctatcaagacaattttgaccgaattgggtgaagatgtcaacagagaaggtttattagatactccacaaagatacgctaaagccatgctttatttcactaaaggttaccaaacgaacattatggacgatgtcattaagaatgctgtctttgaagaagatcatgatgaaatggttattgttcgtgatattgaaatttactctttatgtgaacatcatttggtgccatttttcggcaaggttcatatcgggtatataccaaataaaaaagtcatcgggttaagtaagttggccagattggcagaaatgtatgcgagaaggctccaagttcaagaaagacttacaaagcaaattgcaatggccttgagtgatattttgaaaccattaggtgtagccgttgttatggaagcttctcatatgtgcatggtttctagaggcattcaaaaaacgggatcttctacggtaacttcttgtatgcttggagggtttagggctcataaaacaagagaagagtttttaactcttttaggaagaagaagtatttga

SEQ ID NO: 4665 - DNA, 597 bp, Saccharomyces cerevisiae
atgtctaaagacacgcatgatgatgaactgccgagctacgaggacgtaatcaaggaagaggagagattgcaatctcaaccgccacgaccaccaagaccagcagctaacttggcgcaagggcaccaatcaagaccccaccaaaggccctcgacaatgccagcaacgtcctcatcccaaacatatgctcactcacactcttatacgcctacaagttcccaaccacggcctccaccgaggccacaacagaatcctagcttgccctggacataccctcccaggttttactgttccaagtgtggaaatacgggttacaagttgaagaatggacgatcttgcaagtcgtgttggaggaggtttgcacctcaaaataacgttgtttctgcaccgacatattacacaaactatacaatgcccgtgtacaccaacgcatggcagggtaataggcccttgtacgttcaaccaggggatcctcgcctgggtggcgtgctatgtggtgaatgcagagggtccggacgcaccagattcctgttggacgaagatatatgtcctctttgtcatggtgtaggcagaattatcacccagcctcaacgctattag

SEQ ID NO: 4666 - DNA, 597 bp, Artificial Sequence
  Description of Artificial Sequence: Synthetic polynucleotide
atgtctaaagacacgcatgatgatgaattaccgagctacgaggacgtaatcaaggaagaggagagattgcaatctcaaccgccaagaccaccaagaccagcagctaacttggcgcaagggcaccaatctagaccccaccaaaggccctccacaatgccagcaacgtcctcctcccaaacatatgctcactctcactcttatacgcctacaagttcccaaccaagacctccaccgaggccacaacagaatcctagcttgccctggacataccctcccaggttttactgttccaagtgtggaaatacgggttacaagttgaagaatggaagatcttgcaagagttgttggaggaggtttgcacctcaaaataacgttgtttctgcaccgacatattacacaaactatacaatgcccgtgtacaccaacgcatggcagggtaataggcccttgtacgttcaaccaggggatcctcgcttgggtggcgtgttgtgtggtgaatgcagagggtccggacgcaccagattcttgttggacgaagatatatgtcctctttgtcatggtgtaggcagaattatcacccagcctcaacgctattga

SEQ ID NO: 4667 - DNA, 4140 bp, Saccharomyces cerevisiae
atggcacgaaatttaaggaatagacgcggtagcgacgttgaagatgcaagcaacgcaaaggttgggtatgaaacacagattaaagacgaaaatggcataatccatacaacaactcgctctttgagaaaaataaactacgcagaaattgagaaagtgtttgattttttggaagatgaccaggtcatggacaaagatgagacgcccgttgatgttactagtgatgaacatcataacaacaaccagaaaggcgatgatgaagacgatgatgttgatcttgtatcaccgcacgaaaacgccagaacgaacgaagagcttactaatgaaaggaacttgagaaaaagaaaagcgcatgatccagaagaagatgacgaaagttttcatgaggaagatgtcgacgatgatgaagaggaggaagaagcagacgaatttgaagatgagtatttggatgaagactcgaaggataacaaccgtcggcgcagagcggccgataggaaatttgtagtaccagaccctgatgacgatgaagaatacgatgaggatgacgaagaaggagacagaataagccattcggcttcttctaaacgtttgaaaagggcaaattctcgaagaacaagatcgtcacgtcacccagaaactccaccaccggtaagaagagctttaagaagtaggacaagacattcgcgtacttcaaatgaagaaaatgacgatgagaatgataatagcaggaatgaagcgttaactttagctgatgaaattagagagttacaggaagatagtcctatcagggaaaaaagatttcttcgcgaaagaactaagccggtaaattacaaattaccaccaccactaactgctagcaacgcagaagaatttatagataagaataacaatgcactttcttttcataacccatcacctgcacggcgtggtcgcggtggttggaatgctagtcaaaattctggtcccacaagaaggctttttcccactggtggaccttttggtggcaatgacgtaactacaatatttggtaagaatactaatttttacaaccaagtcccatctgcattcagtgataataacaacaataaattaatactggattcagactcttccgatgatgagatattacctcttggcgtgacaccgaaaacaaagaaagagaacacgcaaaaaaagaagaagaaaaaaccagaaattgcagacctcgatccattaggcgtagacatgaatgtaaattttgacgatataggtggtttagacaactacattgaccaattaaaggaaatggtggccttaccactattatacccagaattgtatcaaaattttaatatcacgcccccaaggggtgttcttttccatggtcctcctggtacgggtaaaacacttatggcaagagcgttagcagcaagttgttcttctgatgaaaggaagatcacattttttatgcgtaaaggtgcagatattttatccaagtgggttggtgaagctgaaagacaactccgtttgttattcgaagaagctaaaaaacatcaaccttccatcattttttttgatgaaatcgacggattagcgcctgtgagaagttccaaacaagaacagatccatgctagtattgtttccacattattagcgctgatggatggtatggacaatagaggccaagtcattgtcatcggagccacaaatcgacccgatgcagtggatcccgcattaagaaggccgggaagatttgatagagaattttattttccattacctgatgttaaagcacgttttaaaattttgcaaattcagaccaggaaatggagttcaccgttgtcaaccaacttcattgataaattggcttttttgaccaaaggatatggtggtgctgatctgaggtccctatgcactgaggctgcactaataagtatacaaagaagctttcctcaaatttataggtcaaatgataaactcttggtggacccttctaagattaaagtcaaagttagcgatttcatgttagctttgaaaaaaattgttccgtcatctgcgagatctactggtagttctcctcagccactacctgaattaatcaaaccattactggcagatcaacttaataatttaaagaacaagctggattatatgctgaacattaaagacacaacttttcagagaaacacatcattgctacaaaatttcatcgattatgaagaatacagtggagaggaagaagagcatgacaaatatggaggaaatgaagatacatccagttttagatcatatgagtttttcgaatcgatggcggaatcacaaatttgtaaacctcggttattaataaatgggcccaagggaaatggtcaacaatatgtcggagccgcaattttaaattatttagaagaattcaacgtccaaaacctggaccttgcctctttggtttcggaaagttctaggactattgaagctgctgtagtgcaaagttttatggaagcaaagaaaagacagccctcagttgtatttattcctaatttagacatttggatcaacactattccagaaaacgttattttagtcttatcaggtttgttcagatctttacaaagcaatgaaaaaattcttctattatgcttagctgaaaatcttgatatatctgaagttaaaaatggtattttatctgattttgcttttgataaaaatatctttcaactgcataaaccatccaaagagaatataacgaggtatttttctaatttaattgaactactgaaaacaaagccaagtgatattcccatgaaaaagagaagagtcaaaccgttacctgaattacaaaaagtaacttcaaacgcagctccaacaaattttgatgaaaatggtgagccactgtctgaaaaagtggtattaagaaggaagttgaaatcttttcaacaccaagatatgagattgaaaaatgtgttaaaaatcaaactctcaggcttgatggatctttttaaaaacagatataaaaggtttagaaaaccacctattgatgatgccttcttggttcatcttttcgaaccagagacaagcaatgatcccaattggcaacctgcatatataaaagatgagaacatgattctggaggtttcaacagggcgaaagttttttaacatggatttggatattgtcgaagagagactttggaatggctattactcagaaccaaaacagtttttaaaagacattgaactgatatacagggatgcaaataccattggggacagagaacgtgtcattaaggcctctgagatgtttgccaacgcgcaaatgggtatcgaagaaatttcaaccccggattttattcaagagtgtaaagctactcgccaaagggatttggaaaggcaggaacttttcttagaagatgaagagaaaagagctgcaatggaattagaagccaaagaacagagtcaagaaaatatactgcaagaacctgatttaaaggataacaaggctaatgagtttggtgtagctgctggtaatcaattgcaagctcagctgcaaacaactatcaatacagcctctatcgttaataacagcgaggtccctcaaccaattgataccaacctgtataaaaaggagattcctgcggcaattccctctgcagtagataaagaaaaagcggtcatccctgaggatagcggtgcaaatgaagaatacacaacggaactgatacaggccacttgcacgtcagagataaccaccgatgatgatgaaagggccagaaaagaaccaaaagagaatgaagactctttgcaaacgcaggttacggaagaaaacttcagcaaaatagacgctaatactaataatataaatcacgtaaaggaaattcaatcggttaacaaaccaaattccctccacgaaacggtagaaaaaagggaacgaagtccgataccaaaagaggttgtggaaccggagcaagggaagaagagcgacaaggagcttattttgacgcccgaacaaataaaaaaagtatctgcatgcttaatcgaacactgtcagaattttacggtttctcaattagaagatgttcattcgtccgttgcaaaaataatatggaaaagtaaatcagcatgggataaaacaggaactgtcgatgaaataataaaatttttatctgaataa

SEQ ID NO: 4668 - DNA, 4140 bp, Artificial Sequence
  Description of Artificial Sequence: Synthetic polynucleotide
atggcaagaaatttaaggaatagacgcggtagcgacgttgaagatgcaagcaacgcaaaggttgggtatgaaacacagattaaagacgaaaatggcataatccatacaacaactcgctctttgagaaaaataaactacgcagaaattgagaaagtgtttgattttttggaagatgaccaggtcatggacaaagatgagacgcccgttgatgttactagtgatgaacatcataacaacaaccagaaaggcgatgatgaagacgatgatgttgatcttgtatccccgcacgaaaacgccagaacgaacgaagagcttactaatgaaaggaacttgagaaaaagaaaagcgcatgatccagaagaagatgacgaaagttttcatgaggaagatgtcgacgatgatgaagaggaggaagaagcagacgaatttgaagatgagtatttggatgaagactccaaggataacaaccgtcgccgcagagcggccgataggaaatttgtagtaccagaccctgatgacgatgaagaatacgatgaggatgacgaagaaggagacagaataagccattctgcttcttctaaacgtttgaaaagggcaaattctagaagaacaagaagttctcgtcacccagaaactccaccaccggtaagaagagctttaagaagtaggacaagacattctcgtacttccaatgaagaaaatgacgatgagaatgataatagcaggaatgaagcgttaactttagctgatgaaattagagagttacaggaagatagtcctatcagggaaaaaagatttcttcgcgaaagaactaagccggtaaattacaaattaccaccaccattgactgctagcaacgcagaagaatttatagataagaataacaatgcactttcttttcataacccatctcctgcaagacgtggtcgcggtggttggaatgctagtcaaaattctggtcccacaagaaggctttttcccactggtggaccttttggtggcaatgacgtaactacaatatttggtaagaatactaatttttacaaccaagtcccatctgcattcagtgataataacaacaataaattaatattggattctgactcttccgatgatgagatattacctcttggcgtgacaccgaaaacaaagaaagagaacacgcaaaaaaagaagaagaaaaaaccagaaattgcagacctcgatccattaggcgtagacatgaatgtaaattttgacgatataggtggtttagacaactacattgaccaattaaaggaaatggtggccttaccattattatacccagaattgtatcaaaattttaatatcacgcccccaaggggtgttcttttccatggtcctcctggtacgggtaaaacacttatggcaagagcgttagcagcaagttgttcttctgatgaaaggaagatcacattttttatgcgtaaaggtgcagatattttatccaagtgggttggtgaagctgaaagacaactccgtttgttattcgaagaagctaaaaaacatcaaccttccatcattttttttgatgaaatcgacggattagcgcctgtgagaagttccaaacaagaacagatccatgctagtattgtttccacattattagcgttaatggatggtatggacaatagaggccaagtcattgtcatcggagccacaaataggcccgatgcagtggatcccgcattaagaaggccgggaagatttgatagagaattttattttccattacctgatgttaaagcacgttttaaaattttgcaaattcagaccaggaaatggagttctccgttgtccaccaacttcattgataaattggcttttttgaccaaaggatatggtggtgctgatttaaggtccttatgcactgaggctgcattaataagtatacaaagaagctttcctcaaatttataggtctaatgataaactcttggtggacccttctaagattaaagtcaaagttagcgatttcatgttagctttgaaaaaaattgttccgtcttctgcgagatctactggtagttctcctcagccattgcctgaattaatcaaaccattattggcagatcaacttaataatttaaagaacaagttggattatatgttgaacattaaagacacaacttttcagagaaacacatctttgttgcaaaatttcatcgattatgaagaatacagtggagaggaagaagagcatgacaaatatggaggaaatgaagatacatccagttttagatcttatgagtttttcgaaagtatggcggaatctcaaatttgtaaacctagattattaataaatgggcccaagggaaatggtcaacaatatgtcggagccgcaattttaaattatttagaagaattcaacgtccaaaacttggaccttgcctctttggtttctgaaagttctaggactattgaagctgctgtagtgcaaagttttatggaagcaaagaaaagacagccctctgttgtatttattcctaatttagacatttggatcaacactattccagaaaacgttattttagtcttatctggtttgttcagatctttacaaagcaatgaaaaaattcttttattatgcttagctgaaaatcttgatatatctgaagttaaaaatggtattttatctgattttgcttttgataaaaatatctttcaattgcataaaccatccaaagagaatataacgaggtatttttctaatttaattgaattattgaaaacaaagccaagtgatattcccatgaaaaagagaagagtcaaaccgttacctgaattacaaaaagtaacttctaacgcagctccaacaaattttgatgaaaatggtgagccattatctgaaaaagtggtattaagaaggaagttgaaatcttttcaacaccaagatatgagattgaaaaatgtgttaaaaatcaaactcagcggcttgatggatctttttaaaaacagatataaaaggtttagaaaaccacctattgatgatgccttcttggttcatcttttcgaaccagagacaagcaatgatcccaattggcaacctgcatatataaaagatgagaacatgattttagaggtttctacagggagaaagttttttaacatggatttggatattgtcgaagagagactttggaatggctattactctgaaccaaaacagtttttaaaagacattgaattgatatacagggatgcaaataccattggggacagagaacgtgtcattaaggcctctgagatgtttgccaacgcgcaaatgggtatcgaagaaatttctaccccggattttattcaagagtgtaaagctactcgccaaagggatttggaaaggcaggaacttttcttagaagatgaagagaaaagagctgcaatggaattagaagccaaagaacagagtcaagaaaatatattgcaagaacctgatttaaaggataacaaggctaatgagtttggtgtagctgctggtaatcaattgcaagctcagttacaaacaactatcaatacagcctctatcgttaataacagcgaggtccctcaaccaattgataccaacttatataaaaaggagattcctgcggcaattccctctgcagtagataaagaaaaagcggtcatccctgaggatagcggtgcaaatgaagaatacacaacggaattgatacaggccacttgcacgagtgagataaccaccgatgatgatgaaagggccagaaaagaaccaaaagagaatgaagactctttgcaaacgcaggttacggaagaaaacttcagcaaaatagacgctaatactaataatataaatcacgtaaaggaaattcaatctgttaacaaaccaaattccctccacgaaacggtagaaaaaagggaaagaagtccgataccaaaagaggttgtggaaccggagcaagggaagaagagcgacaaggagcttattttgacgcccgaacaaataaaaaaagtatctgcatgcttaatcgaacactgtcagaattttacggtttctcaattagaagatgttcattcttccgttgcaaaaataatatggaaaagtaaatctgcatgggataaaacaggaactgtcgatgaaataataaaatttttatctgaatga

SEQ ID NO: 4669 - DNA, 5904 bp, Saccharomyces cerevisiae
atgtcaactgaatactctgctgattcatctaaatcatttatgattgcaatgcaatctatgattgatacttcacaaacctttaatctagatagatcgaaaatctctttaccagattttgatgacgagctaaaaaaagtccaaaaggatgaacaaaatcaaagaactgaactaactgttctctcacaagatagaaatgattgggatgatatatttgaggagtttaaagacatttcatttgctcaactgcaatctataattgattcatacaaaacaaagaatgcagttgcagtatataaaaaaattggaaaactaatcaatgaagctgaaacgacactaagcagcaatgtattattagaaactgtactgcaaatggtttataaacatcaaaagcaagagttagagaaagaattgttggattttttaggaacagggaatatagaccttgtttctctgttacttcagcatagaagaatgatcgttgctacacctatagaaacgacgattctgctaataaaaaatgcggtcaattcaacgccagagttcctgacacagcaagatatcaggaatcaagttttgaaaagtgcagaggatgccaagaataggaaattaaatcccgccactaaaataatcaagtacccacacgtcttcagaaaatatgaagcaggatccactacagctatggcctttgccggtcaaaaattcactttgccagtagggactacaaggatgtcgtacaatacccatgaagaaattataattccggcagcagatcaggcatccaacaagaactatctctatacaaaactattgaaaataagtgatttggatcatttttgcaagactgtatttccctatgaaactttaaaccaaatacaatcccttgtttaccccgtagcttataaaacaaatgaaaatatgctaatttgtgcacctactggtgcaggtaaaacagacattgcattactgacaataattaatacaataaaacaattctccgtggtcaacggggaaaatgaaattgatattcaatatgatgattttaaagttatttatgttgcccctttgaaagcactcgctgctgaaatcgtcgacaagtttagtaagaaattggcgccttttaatatacaagtaagggagttaacaggcgatatgcaattgacaaaggcggaaattttagccactcaagtaatagtcacaacccctgagaaatgggacgttgtcacccgtaaagcaaacggcgacaacgatttggtttcaaaggtcaaattactaattattgatgaagttcatttactgcacgaagatagaggttcggttattgaaactttagttgcacgtaccttgagacaggtagaaagctctcaatcaatgattcgtattatcggtctatcagctacattacccaattttatggatgtagcagatttcttaggagtaaatagacagatcggaatgttctattttgatcaatcattccgtccaaagcctctagagcagcaacttttgggctgtagaggtaaggcaggtagtagacaaagtaaagagaatatcgataaagtcgcttacgacaaattgagtgaaatgattcaaagagggtaccaggtaatggtatttgtccactcaagaaaggaaactgttaaaagtgcaagaaactttatcaaactagcagaatctaaccacgaagttgacctttttgcacctgaccctatcgaaaaggataaatattctagaagtttagtgaagaacagagacaaggatatgaaggagatttttcaatttggttttggtatccatcatgctggtatggcccgttcagatagaaatcttactgaaaaaatgtttaaagacggtgctatcaaggtactgtgttgtactgcaacattagcatggggtgttaatttacctgctgattgtgttatcatcaagggtacacaagtatatgattctaaaaagggtggattcatagatctaggtatttcagatgttattcagatttttggcaggggtggtaggccgggcttcggttccgcaaatggtacgggtattttatgtacttccaatgatcgtctggatcattatgtttccttaattactcaacaacaccctatcgaatctagattcggttccaagttggttgataacctgaacgccgaaatttcattggggagcgtgacaaatgtagatgaagcaatcgaatggcttggttacacatacatgtttgttcgtatgagaaaaaatccttttacttacggtattgattgggaggaaattgcaaatgacccgcaattatatgaacggaggagaaaaatgatcgtagtagctgcaaggcgattacatgctctccaaatgattgtgttcgatgaagtgtcaatgcatttcattgcaaaggatttgggcagggtgtcctctgatttttatcttttgaacgaatccgtcgagatattcaatcaaatgtgtgatcccagagccaccgaagctgatgtattgtccatgatcagtatgagcagtgaatttgacggtataaaatttagagaagaagaatccaaggagttgaagagactttctgatgaatctgttgagtgccagattggaagccaacttgacacccctcaaggtaaagcaaacgtgctattacaggcttatatttcccagactagaatttttgactcagcactatcatccgattcgaattatgttgctcagaactctgttagaatttgtagagcattgtttttaataggtgtcaatagaagatggggtaaattttcaaacgtcatgctaaatatttgcaaatctattgaaaagaggctctgggcctttgatcaccctctctgtcagtttgatttgcctgaaaatattatcagacgcatcagagatactaaaccttccatggagcatcttttagaattagaggcagatgagctcggagagctggtgcataataagaaggccgggtctaggttatataaaatattgagccgatttccaaagattaatatagaagctgagattttccccattacaacaaatgtaatgaggatacatattgcattaggtccagactttgtatgggattcccggatacatggtgatgcacagtttttttgggttttcgttgaagaatctgataagtcgcaaatccttcattttgaaaagttcatcttaaacagaaggcagttgaataatcagcatgaaatggacttcatgatcccattgtcagaccctttgcctccgcaggttgtcgtaaaggttgtgtcggatacttggattggctgtgaatcgacccatgccatctcttttcaacatttaatcagaccatttaacgaaactttacagacaaaattgttgaagttacgtcctctacctacatcagccctccagaatcctttaattgagtcaatttatcctttcaagtatttcaatcccatgcaaactatgacattttatacactttacaataccaatgagaatgcgtttgttggctcgcctacaggttctggtaaaacgattgtggctgaattggctatatggcatgccttcaaaacatttcctgggaaaaagattgtttatatcgcaccaatgaaagcattagtacgtgaaagggttgatgactggagaaagaaaataacaccagtgaccggagataaagttgtagagttaaccggtgattctttgccagatcctaaagatgtgcatgatgccaccattgttattacaactccagaaaagtttgatggtatttcccgtaattggcaaactcgtaagtttgttcaagatgtatctttaattatcatggatgaaattcatttgttggctagtgatcgtggtcctatcttagaaatgattgttagtcgtatgaattatatttcctctcaaaccaagcaaccggtcagactgctaggtatgtcaactgctgtttcaaacgcctacgacatggctggctggttgggagttaaggaccacggactgtataacttcccgtcaagcgtccgtccggttccattgaaaatgtacattgatggatttccagataatttggcattctgtcctctgatgaaaacaatgaacaaacctgtgtttatggccattaaacaacattcacctgataaaccagcattaatatttgttgcatcgcgtagacaaactagactaacggctttagacttgatccacttatgtggaatggaagataatccacgtaggtttttgaatatagacgatgaggaggaactgcaatattacttatcacaggtcactgacgacactttaaagttatcactccagttcggtattggattgcatcatgcaggtctagtgcaaaaagatcgttctatttctcatcagttgtttcaaaaaaacaaaattcagattctgatcgctacatcaaccctagcgtggggtgtcaatttgccagctcacttggttatcatcaaaggtacacaattttttgatgcaaaaattgaaggatatagagatatggatttaacagatatcttgcaaatgatggggagagctggtagaccggcttatgacactacaggtactgctatcgtttatacaaaagagtccaaaaaaatgttttataaacatttcctaaacgttggttttcctgtcgagtcctccttgcacaaggtattagatgatcatttaggtgcagaaataacgtcaggtagcataactaataagcaagaagcgttagattttttgagttggacatttttgtttcgtagagcgcatcataacccgacatattatggcattgaagatgatacaagtacagcaggagtcagtgaacatttgagttctttgatagatagcacattagaaaatctgcgagaatcacaatgtgttttattacatggagatgatattgttgctacgccattcttaagtatatcctcatactactatatttcacatttaacgatacgccaattattgaaacagatacatgatcatgcgacttttcaagaggtattacgatggttatcgttggctgttgagtataatgaattgcctgtaagaggtggtgaaattatcatgaatgaagaaatgtcgcagcaatcgaggtactccgttgaaagcacttttaccgatgaattcgaattaccgatgtgggatccacatgtaaaaacatttttattacttcaagctcatttaagccgtgtagatttaccgattgcagattatatccaggataccgtatcagttttggatcaatctctacgtattctacaggcttatattgatgtcgccagtgaattgggttactttcatacggtattgaccatgataaagatgatgcaatgcataaagcaagggtattggtatgaagacgatcctgttagtgtacttccaggattacaactgagaagaatcaaagattacacttttagcgagcaggggttcattgaaatgacgccgcagcaaaagaagaaaaagctgttaaccttggaggaaataggaaggtttggatataagaaattattaaatgtttttgatcaactaacttttggaatgacagaaagcgaagatacgaaaaaacgtttcgtcagtgtctgccaaagattaccggttttagaaggcatgaaatttgaagaacaggaaaataacgaggtgttaacattttatagcaagcacctttctagtaagcataataatgggtttgaagtatattgtgataaattccctaagatacaaaaagaactatggtttttaattggacacaaaggcgatgaactgctgatgattaaaaggtgtcaaccaaaacaaatgaataaagaggtcataatacattgtgatctatttattcccgaagaaattcgtggcgaagaattgcaattttcccttattaatgacgctttaggattacgttatgatatggtccataaactaatctcttag

SEQ ID NO: 4670 - DNA, 5904 bp, Artificial Sequence
  Description of Artificial Sequence: Synthetic polynucleotide
atgtctactgaatactctgctgattcttctaaaagttttatgattgcaatgcaatctatgattgatacttctcaaacctttaatttggatagaagtaaaatctctttaccagattttgatgacgagttgaaaaaagtccaaaaggatgaacaaaatcaaagaactgaattgactgttctctctcaagatagaaatgattgggatgatatatttgaggagtttaaagacatttcctttgctcaattacaatctataattgattcttacaaaacaaagaatgcagttgcagtatataaaaaaattggaaaattaatcaatgaagctgaaacgacattgagcagcaatgtattattagaaactgtattacaaatggtttataaacatcaaaagcaagagttagagaaagaattgttggattttttaggaacagggaatatagaccttgtttctttattacttcagcatagaagaatgatcgttgctacacctatagaaacgacgattttattgataaaaaatgcggtcaattctacgccagagttcttaacacagcaagatatcaggaatcaagttttgaaaagtgcagaggatgccaagaataggaaattaaatcccgccactaaaataatcaagtacccacacgtcttcagaaaatatgaagcaggatccactacagctatggcctttgccggtcaaaaattcactttgccagtagggactacaaggatgagttacaatacccatgaagaaattataattccggcagcagatcaggcatccaacaagaactatctctatacaaaacttttgaaaataagtgatttggatcatttttgcaagactgtatttccctatgaaactttaaaccaaatacaatcccttgtttaccccgtagcttataaaacaaatgaaaatatgttgatttgtgcacctactggtgcaggtaaaacagacattgcattattaacaataattaatacaataaaacaattctccgtggtcaacggggaaaatgaaattgatattcaatatgatgattttaaagttatttatgttgcccctttgaaagcactcgctgctgaaatcgtcgacaagtttagtaagaaattggcgccttttaatatacaagtaagggagttaacaggcgatatgcaattgacaaaggcggaaattttagccactcaagtaatagtcacaacccctgagaaatgggacgttgtcacccgtaaagcaaacggcgacaacgatttggtttccaaggtcaaattattgattattgatgaagttcatttattacacgaagatagaggttctgttattgaaactttagttgcacgtaccttgagacaggtagaaagctctcaatctatgattcgtattatcggtttatctgctacattacccaattttatggatgtagcagatttcttaggagtaaatagacagatcggaatgttctattttgatcaaagtttccgtccaaagcctttagagcagcaacttttgggctgtagaggtaaggcaggtagtagacaaagtaaagagaatatcgataaagtcgcttacgacaaattgagtgaaatgattcaaagagggtaccaggtaatggtatttgtccactccagaaaggaaactgttaaaagtgcaagaaactttatcaaattggcagaatctaaccacgaagttgacctttttgcacctgaccctatcgaaaaggataaatattctagaagtttagtgaagaacagagacaaggatatgaaggagatttttcaatttggttttggtatccatcatgctggtatggcccgttctgatagaaatcttactgaaaaaatgtttaaagacggtgctatcaaggtattatgttgtactgcaacattagcatggggtgttaatttacctgctgattgtgttatcatcaagggtacacaagtatatgattctaaaaagggtggattcatagatttaggtatttctgatgttattcagatttttggcaggggtggtaggccgggcttcggttccgcaaatggtacgggtattttatgtacttccaatgatcgtttggatcattatgtttccttaattactcaacaacaccctatcgaatctagattcggttccaagttggttgataacttgaacgccgaaatttctttggggagcgtgacaaatgtagatgaagcaatcgaatggcttggttacacatacatgtttgttcgtatgagaaaaaatccttttacttacggtattgattgggaggaaattgcaaatgacccgcaattatatgaaagaaggagaaaaatgatcgtagtagctgcaaggagattacatgctctccaaatgattgtgttcgatgaagtgtccatgcatttcattgcaaaggatttgggcagggtgtcctctgatttttatcttttgaacgaatccgtcgagatattcaatcaaatgtgtgatcccagagccaccgaagctgatgtattgtccatgatcagtatgagcagtgaatttgacggtataaaatttagagaagaagaatccaaggagttgaagagactttctgatgaatctgttgagtgccagattggaagccaacttgacacccctcaaggtaaagcaaacgtgttattacaggcttatatttcccagactagaatttttgactctgcattatcttccgattctaattatgttgctcagaactctgttagaatttgtagagcattgtttttaataggtgtcaatagaagatggggtaaattttccaacgtcatgttgaatatttgcaaatctattgaaaagaggctctgggcctttgatcaccctctctgtcagtttgatttgcctgaaaatattatcagacgcatcagagatactaaaccttccatggagcatcttttagaattagaggcagatgagctcggagagttggtgcataataagaaggccgggtctaggttatataaaatattgagcagatttccaaagattaatatagaagctgagattttccccattacaacaaatgtaatgaggatacatattgcattaggtccagactttgtatgggattccagaatacatggtgatgcacagtttttttgggttttcgttgaagaatctgataagtctcaaatccttcattttgaaaagttcatcttaaacagaaggcagttgaataatcagcatgaaatggacttcatgatcccattgagtgaccctttgcctccgcaggttgtcgtaaaggttgtgtctgatacttggattggctgtgaaagtacccatgccatctcttttcaacatttaatcagaccatttaacgaaactttacagacaaaattgttgaagttacgtcctttgcctacatctgccctccagaatcctttaattgagtctatttatcctttcaagtatttcaatcccatgcaaactatgacattttatacactttacaataccaatgagaatgcgtttgttggctctcctacaggttctggtaaaacgattgtggctgaattggctatatggcatgccttcaaaacatttcctgggaaaaagattgtttatatcgcaccaatgaaagcattagtacgtgaaagggttgatgactggagaaagaaaataacaccagtgaccggagataaagttgtagagttaaccggtgattctttgccagatcctaaagatgtgcatgatgccaccattgttattacaactccagaaaagtttgatggtatttcccgtaattggcaaactcgtaagtttgttcaagatgtatctttaattatcatggatgaaattcatttgttggctagtgatcgtggtcctatcttagaaatgattgttagtcgtatgaattatatttcctctcaaaccaagcaaccggtcagattattgggtatgtctactgctgtttctaacgcctacgacatggctggctggttgggagttaaggaccacggattgtataacttcccgtctagcgtccgtccggttccattgaaaatgtacattgatggatttccagataatttggcattctgtcctttgatgaaaacaatgaacaaacctgtgtttatggccattaaacaacattctcctgataaaccagcattaatatttgttgcatctcgtagacaaactagattgacggctttagacttgatccacttatgtggaatggaagataatccacgtaggtttttgaatatagacgatgaggaggaattacaatattacttatctcaggtcactgacgacactttaaagttatctctccagttcggtattggattgcatcatgcaggtttagtgcaaaaagatcgttctatttctcatcagttgtttcaaaaaaacaaaattcagattttgatcgctacatctaccttagcgtggggtgtcaatttgccagctcacttggttatcatcaaaggtacacaattttttgatgcaaaaattgaaggatatagagatatggatttaacagatatcttgcaaatgatggggagagctggtagaccggcttatgacactacaggtactgctatcgtttatacaaaagagtccaaaaaaatgttttataaacatttcttgaacgttggttttcctgtcgagtcctccttgcacaaggtattagatgatcatttaggtgcagaaataacgtctggtagcataactaataagcaagaagcgttagattttttgagttggacatttttgtttcgtagagcgcatcataacccgacatattatggcattgaagatgatacaagtacagcaggagtcagtgaacatttgagttctttgatagatagcacattagaaaatttaagagaatctcaatgtgttttattacatggagatgatattgttgctacgccattcttaagtatatcctcttactactatatttctcatttaacgatacgccaattattgaaacagatacatgatcatgcgacttttcaagaggtattaagatggttatctttggctgttgagtataatgaattgcctgtaagaggtggtgaaattatcatgaatgaagaaatgtctcagcaatccaggtactccgttgaaagcacttttaccgatgaattcgaattaccgatgtgggatccacatgtaaaaacatttttattacttcaagctcatttaagccgtgtagatttaccgattgcagattatatccaggataccgtatctgttttggatcaatctttacgtattttacaggcttatattgatgtcgccagtgaattgggttactttcatacggtattgaccatgataaagatgatgcaatgcataaagcaagggtattggtatgaagacgatcctgttagtgtacttccaggattacaattgagaagaatcaaagattacacttttagcgagcaggggttcattgaaatgacgccgcagcaaaagaagaaaaagcttttaaccttggaggaaataggaaggtttggatataagaaattattaaatgtttttgatcaattgacttttggaatgacagaaagcgaagatacgaaaaaacgtttcgtcagtgtctgccaaagattaccggttttagaaggcatgaaatttgaagaacaggaaaataacgaggtgttaacattttatagcaagcacctttctagtaagcataataatgggtttgaagtatattgtgataaattccctaagatacaaaaagaattatggtttttaattggacacaaaggcgatgaattattgatgattaaaaggtgtcaaccaaaacaaatgaataaagaggtcataatacattgtgatttatttattcccgaagaaattcgtggcgaagaattgcaattttcccttattaatgacgctttaggattacgttatgatatggtccataaattaatctcttga

SEQ ID NO: 4671 - DNA, 702 bp, Saccharomyces cerevisiae
atggctaaattacagaggaagagaagcaaggctcttgggtcatctctagagatgtcccagataatggatgcaggaacaaacaaaattaaaagaagaataagagatttagagaggttattaaaaaagaagaaagatatacttccatccacagtaataatagaaaaggaaagaaatttgcaagctttacggttggaattgcagaataatgaactcaagaataagattaaagccaacgctaaaaaatatcatatggtgagattctttgaaaaaaaaaaagcattgagaaaatataacagattattgaagaaaataaaagaatctggcgcagatgataaagatttacaacaaaagttgagagccactaaaattgaattatgttacgtgataaattttcccaaaactgaaaagtatattgcactatatccgaatgatacaccatctacagacccaaagggcgtagaattgacaaatcttagaagagaacaatttcttaaattagtagctgaaagaatggatgcgaacaccttaaacgtatctttcgaagagatattgaagggaaagaaattggatgaagattccatcggattaacattatcacctgataaagatcatgaggatggatcacaagtatcacctacacaggatagaaaagaattggatcaagttgtgggagaagatgaaaaggatgacttttttgagtaa

SEQ ID NO: 4672 - DNA, 702 bp, Artificial Sequence
  Description of Artificial Sequence: Synthetic polynucleotide
atggctaaattacagaggaagagaagcaaggctcttgggagttctttggagatgtcccagataatggatgcaggaacaaacaaaattaaaagaagaataagagatttagagaggttattaaaaaagaagaaagatatacttccatccacagtaataatagaaaaggaaagaaatttgcaagctttaagattggaattgcagaataatgaactcaagaataagattaaagccaacgctaaaaaatatcatatggtgagattctttgaaaaaaaaaaagcattgagaaaatataacagattattgaagaaaataaaagaatctggcgcagatgataaagatttacaacaaaagttgagagccactaaaattgaattatgttacgtgataaattttcccaaaactgaaaagtatattgcattatatccgaatgatacaccatctacagacccaaagggcgtagaattgacaaatcttagaagagaacaatttcttaaattagtagctgaaagaatggatgcgaacaccttaaacgtatctttcgaagagatattgaagggaaagaaattggatgaagattccatcggattaacattatctcctgataaagatcatgaggatggatctcaagtatctcctacacaggatagaaaagaattggatcaagttgtgggagaagatgaaaaggatgacttttttgagtga

SEQ ID NO: 4673 - DNA, 525 bp, Saccharomyces cerevisiae
atgcaacatttcgaaagttcagataagatagaaaaggatgatgatacatcaagaattaaattacgctcttcttctttggccgctccaatcctcgaggctgttcaagaagcccagccttttgaagaagccactttctctaacttacagaagatacatccgttaacagaaaactcaacttgcaatggttatgttatttacgataaagatggaaatttgaaatccatgaaggatacatttggtaggaatataaaaacacctgatatttcaaatcctacaagagcaagaaatgaaaggccattggatacaatacgtggatttgaatactccataacaaaagatccccgctggttgcaagagctagaaacatctaagttgggatttaaacctagacctggatttgccgtcattaatcaagactcacaggcttcaataaatttatctcaactggaagaaaaagttatggaaagccaaaaaaaaaaggagaaaagacacatatcacggctttctcggttactctgcagatga

SEQ ID NO: 4674 - DNA, 525 bp, Artificial Sequence
  Description of Artificial Sequence: Synthetic polynucleotide
atgcaacatttcgaaagttctgataagatagaaaaggatgatgatacatctagaattaaattacgctcttcttctttggccgctccaatcctcgaggctgttcaagaagcccagccttttgaagaagccactttctctaacttacagaagatacatccgttaacagaaaactctacttgcaatggttatgttatttacgataaagatggaaatttgaaatccatgaaggatacatttggtaggaatataaaaacacctgatatttctaatcctacaagagcaagaaatgaaaggccattggatacaatacgtggatttgaatactccataacaaaagatccccgctggttgcaagagttagaaacatctaagttgggatttaaacctagacctggatttgccgtcattaatcaagactctcaggcttctataaatttatctcaattggaagaaaaagttatggaaagccaaaaaaaaaaggagaaaagacacatatcccgtctttctagattactctgcagatga

SEQ ID NO: 4675 - DNA, 3201 bp, Saccharomyces cerevisiae
atggtaaagcagcagggatccggcaagaccaacttggccaacgaagatgaagcatatgaagctatttttggcggagagtttggctctttagaaatcgggtcatacattggcggggatgaaggtgccaattcaaaggactatacggagcatttgccggatgctgtagattttgaagatgaagatgaacttgctgatgacgatgacgatttgccagaagaatctgatgctaatttgcatccagctatgatgactatgggcgcgtatgatgatgtaaacgagaacggtgccgtactcggtatcgactcaaatagtttgaatatgcaactgcctgaaattaatggtgatttgtctcaacagtttattttggaggatgatgggggtactcccgcaactagcaatgctttgtttatgggaatggatgcaaatgaaattcatctcgccactgaaactggagttcttgatggtagtggcgcaaatgaaattgggcattctcaactttccattggtggcgttaatggaaatgatatgtcgataaatggtggatttatcatggaaccagatatgtcagatggcaagcataagaaagccaccaaattagacttgataaaccatgagaagtatcttctaaaaaaatactttcctgattttgaaaagggtaaaattttaaaatggaacaagctgatttatagaagatctgttccttatcattggcacagtgaaatatctagggtaaagaaaccgtttatgcctttaaatttgaaattcaaggttcaacaggatgataagaggctattcaactcaaggacaatatcttacgtcgctccgatttatcaagggaaaaacaatttacttcaaagtaactcttctgcatcccgaagaggtttaattcatgtttccattgatgaacttttccctatcaaagagcaacaaaaaaaaagaaagattattcatgatgaaaagaccatatcggaagacttgcttattgccactgatgattgggaccaagaaaaaatcatcaaccaaggtacttcatcaacagcaaccttggcggattcgtctatgacacccaacttaaagttctccggcggttataaattgaagagcttgattgaggatgttgctgaagattggcagtgggatgaagacatgatcattgatgcaaaattgaaagagtctaaacatgctgaattaaatatgaatgacgaaaaactgttgctgatgattgagaaaacaaataatttagcgcagcaaaagcaacaactggatagtagtaacttgatattgcccctcaacgaaactattttgcaacaaaaattcaatttatctaatgatgataaatatcaaatcttgaaaaaaacccatcaaacaaaagttcgttctaccatctcgaacttaaatattcagcattctcaacctgcgattaatttacaatctccattttacaaagtggctgttcctagataccagttgaggcatttccaccgtgaaaactttggttcgcacatcagaccaggtactaaaattgtcttcagtaagttaaaagcgcgtaaaaggaaaagagataaaggtaaagatgtcaaagaatcattttctacatctcaagatctaaccatcggggatactgctcctgtttatttaatggaatattctgaacaaacaccggtagctttgtctaaatttggtatggccaataaattaattaattattatcggaaagccaatgaacaagatactctaaggcccaaattgcctgttggcgaaactcacgttttgggagttcaagacaaatcaccattttggaactttggatttgttgaacctggtcatatcgtccccacattatacaataacatgattagagcacccgttttcaaacatgatatatcaggaacagattttcttctgacaaaaagttccggatttggtataagcaatcgattttacttacgtaatattaaccatctttttacggttggacaaacttttcctgtcgaggagattcccggacctaattcaagaaaggtgacatcaatgaaagctacaagactgaaaatgattatttatagaattctaaaccataatcacagcaaggcaatttctattgatcccattgcaaagcactttcccgaccaagattatggacaaaacagacaaaaagtgaaggagttcatgaaatatcaaagagatggtcctgaaaaaggtctgtggaggcttaaagatgatgaaaaattgttagacaatgaagcagtgaaaagtttaattacgccagagcagatcagccaagttgaatcaatgagtcagggcttacaattccaagaagataatgaagcatataattttgattctaagctaaaatctctagaagaaaacttgttaccatggaacattacaaaaaattttattaattcaacacaaatgcgagctatgatacaaatacatggtgttggtgacccaacgggctgtggtgaaggtttttctttcttgaaaacttcaatgaaaggtggttttgttaagtctggttctccttccagtaataacaatagttcaaacaaaaaaggcactaacacgcatagctacaatgtggctcaacagcaaaaagcttacgacgaagaaattgcgaagacctggtatacacatacaaaatcgttgagcataagcaatccttttgaggaaatgaccaatcctgatgagattaatcagaccaacaagcatgttaagacggatagagatgataagaaaattctgaagattgttagaaagaaaagagatgaaaatggtataattcaaaggcagacaattttcataagagatcctagggtcattcaaggatatataaaaatcaaagaacaggataaagaagatgttaacaaattgttagaggaggacacttcaaagataaataacttggaagaacttgagaaacagaaaaaactgttgcaactagaattagctaatttggaaaaatcacagcaacgtagagcagcaaggcaaaattcgaagagaaatggtggtgccacgagaacagaaaactctgtggataatggtagcgaccttgccggtgtaactgacgggaaagcagccaggaataaaggtaagaacactacaaggagatgtgctacatgcggacaaatcgggcacattagaacaaataaatcttgtccaatgtatagcagtaaagataaccctgcttcaccaaagtag

SEQ ID NO: 4676 - DNA, 3201 bp, Artificial Sequence
  Description of Artificial Sequence: Synthetic polynucleotide
atggtaaagcagcagggatccggcaagaccaacttggccaacgaagatgaagcatatgaagctatttttggcggagagtttggctctttagaaatcgggtcttacattggcggggatgaaggtgccaattctaaggactatacggagcatttgccggatgctgtagattttgaagatgaagatgaacttgctgatgacgatgacgatttgccagaagaatctgatgctaatttgcatccagctatgatgactatgggcgcgtatgatgatgtaaacgagaacggtgccgtactcggtatcgactctaatagtttgaatatgcaattacctgaaattaatggtgatttgtctcaacagtttattttggaggatgatgggggtactcccgcaactagcaatgctttgtttatgggaatggatgcaaatgaaattcatctcgccactgaaactggagttcttgatggtagtggcgcaaatgaaattgggcattctcaactttccattggtggcgttaatggaaatgatatgagtataaatggtggatttatcatggaaccagatatgagtgatggcaagcataagaaagccaccaaattagacttgataaaccatgagaagtatcttttgaaaaaatactttcctgattttgaaaagggtaaaattttaaaatggaacaagttgatttatagaagatctgttccttatcattggcacagtgaaatatctagggtaaagaaaccgtttatgcctttaaatttgaaattcaaggttcaacaggatgataagaggttgttcaacagcaggacaatatcttacgtcgctccgatttatcaagggaaaaacaatttacttcaaagtaactcttctgcatccagaagaggtttaattcatgtttccattgatgaacttttccctatcaaagagcaacaaaaaaaaagaaagattattcatgatgaaaagaccatatctgaagacttgcttattgccactgatgattgggaccaagaaaaaatcatcaaccaaggtacttcttctacagcaaccttggcggattcttctatgacacccaacttaaagttctccggcggttataaattgaagagcttgattgaggatgttgctgaagattggcagtgggatgaagacatgatcattgatgcaaaattgaaagagtctaaacatgctgaattaaatatgaatgacgaaaaacttttgttgatgattgagaaaacaaataatttagcgcagcaaaagcaacaattggatagtagtaacttgatattgcccctcaacgaaactattttgcaacaaaaattcaatttatctaatgatgataaatatcaaatcttgaaaaaaacccatcaaacaaaagttcgttctaccatctccaacttaaatattcagcattctcaacctgcgattaatttacaatctccattttacaaagtggctgttcctagataccagttgaggcatttccaccgtgaaaactttggttctcacatcagaccaggtactaaaattgtcttcagtaagttaaaagcgcgtaaaaggaaaagagataaaggtaaagatgtcaaagaaagtttttctacatctcaagatttgaccatcggggatactgctcctgtttatttaatggaatattctgaacaaacaccggtagctttgtctaaatttggtatggccaataaattaattaattattatagaaaagccaatgaacaagatactttgaggcccaaattgcctgttggcgaaactcacgttttgggagttcaagacaaatctccattttggaactttggatttgttgaacctggtcatatcgtccccacattatacaataacatgattagagcacccgttttcaaacatgatatatctggaacagattttcttttaacaaaaagttccggatttggtataagcaatagattttacttacgtaatattaaccatctttttacggttggacaaacttttcctgtcgaggagattcccggacctaattctagaaaggtgacatctatgaaagctacaagattgaaaatgattatttatagaattttgaaccataatcacagcaaggcaatttctattgatcccattgcaaagcactttcccgaccaagattatggacaaaacagacaaaaagtgaaggagttcatgaaatatcaaagagatggtcctgaaaaaggtttatggaggcttaaagatgatgaaaaattgttagacaatgaagcagtgaaaagtttaattacgccagagcagatcagccaagttgaaagtatgagtcagggcttacaattccaagaagataatgaagcatataattttgattctaagttgaaatctttggaagaaaacttgttaccatggaacattacaaaaaattttattaattctacacaaatgagagctatgatacaaatacatggtgttggtgacccaacgggctgtggtgaaggtttttctttcttgaaaacttctatgaaaggtggttttgttaagtctggttctccttccagtaataacaatagtagtaacaaaaaaggcactaacacgcatagctacaatgtggctcaacagcaaaaagcttacgacgaagaaattgcgaagacctggtatacacatacaaaatctttgagcataagcaatccttttgaggaaatgaccaatcctgatgagattaatcagaccaacaagcatgttaagacggatagagatgataagaaaattttgaagattgttagaaagaaaagagatgaaaatggtataattcaaaggcagacaattttcataagagatcctagggtcattcaaggatatataaaaatcaaagaacaggataaagaagatgttaacaaattgttagaggaggacacttctaagataaataacttggaagaacttgagaaacagaaaaaacttttgcaattggaattagctaatttggaaaaatctcagcaacgtagagcagcaaggcaaaattctaagagaaatggtggtgccacgagaacagaaaactctgtggataatggtagcgaccttgccggtgtaactgacgggaaagcagccaggaataaaggtaagaacactacaaggagatgtgctacatgcggacaaatcgggcacattagaacaaataaatcttgtccaatgtatagcagtaaagataaccctgcttctccaaagtga

SEQ ID NO: 4677 - DNA, 474 bp, Saccharomyces cerevisiae
atggacccacagacgctcattactaaggccaataaggtttcttactatggcaaccctacgagtaaggaatcatggaggtatgattggtaccaaccatctaaggtgagctccaatgtgcagcaaccacaacaacagctaggggacatggagaataacttggagaaatatccattcaggtataaaacatggttgaggaaccaggaagatgagaaaaatctacagagggagagctgtgaggatatattagatttgaaagaatttgatagaagaatactgaaaaagtcgttgatgacatcgcacactaagggtgatacaagtaaggccaccggtgctccttctgctaatcaaggagatgaagctcttagtgtggatgatataagaggcgctgtcggtaatagtgaagccattcctgggttatctgcgggagtgaacaatgataatacaaaggagagtaaagatgtgaaaatgaattaa

SEQ ID NO: 4678 - DNA, 474 bp, Artificial Sequence
  Description of Artificial Sequence: Synthetic polynucleotide
atggacccacagacgctcattactaaggccaataaggtttcttactatggcaaccctacgagtaaggaaagttggaggtatgattggtaccaaccatctaaggtgagctccaatgtgcagcaaccacaacaacagttaggggacatggagaataacttggagaaatatccattcaggtataaaacatggttgaggaaccaggaagatgagaaaaatttacagagggagagctgtgaggatatattagatttgaaagaatttgatagaagaatattgaaaaagtctttgatgacaagtcacactaagggtgatacaagtaaggccaccggtgctccttctgctaatcaaggagatgaagctcttagtgtggatgatataagaggcgctgtcggtaatagtgaagccattcctgggttatctgcgggagtgaacaatgataatacaaaggagagtaaagatgtgaaaatgaattga

SEQ ID NO: 4679 - DNA, 1662 bp, Saccharomyces cerevisiae
atgcaagtagaagggcctgacactaacttcgtgagtgatttggctttgggatcaaagaaaagaaggttatccaagacttctgtacaagaggatgatcatacaaatgtggtatcggaagtgaataagaataagaagaaaaaaaaggcaaagcctatgacatgcacattgctaaagtctgtggttgaaaaaggtattggtataaaggatgtaagagacatgactcaatacttgttgcaggctgaaaacaactctcccaaatggattgatatttgtaacaggtcaagtttacagaaaatgatagttctgttcattccaggtttacaaccagatgattttgagaacggaaaaaatacctttaatgaaatcagtgatgataacttcaaatatattcctggagaaattgcctccacgtttcatacatttcccgtgatggcacctggttccaagatgacgctcttttcgccctacaattcatttattaatgttggattgtccaaaatggagaaaataaataaattgaaagagttacaaaagaagaagaaaattactattaacgatttggttctatccgaacaacagttagtggcaaacgattacccactggattctggagacaccaattttgatacagactgggtacaaactgttgactttacccatggtggctcccacatctttgcactagactgtgaaatgtgtctttccgaacaaggtttagttctaactaggatttctctagtgaattttgacaatgaagttatctatgaagagttggtgaaacctgatgtccccatagtggactatttgacacgttacagtggtataactgaagagaaactaactgttggtgccaagaaaacattgcgagaagtacaaaaagatttactaaagataataagtcgttcagatattttgataggacattcgctacagaatgatttgaaagtcatgaaattgaaacatccattggtcgtggatacagctattatataccatcataaagctggcgatcctttcaagccaagtttaaaatacttgagcgaaacctttctgaataaaagcattcaaaacggagaacacgattctgtcgaagatgcaagggcttgtcttgaattgacgaaattaaaaatcttaaatgggttagcatttgggataggtatcaatacggagaacttgttcaccaaattacatcgttttgaagtgaaaaccgttcttctcaacgatatgattattaaaaatcatactgaggacgattctaagggccagttaatccgttgcgtcgaagatgatgagacatggacccatattcacgagaatctaaataaagatgtcaaacttattgtggggagaatcaagaacttagagaggtcacgcaactataataaaaagccacggaaggaaactccttcgttcgatgcgtccatggttcttcatgatatagggcaacatctaacacaattatacgagaatgctacaccaggtactatgattttgatcatgtcgggtacaggcgacacaagaccatggaacaatctttcaactgagttagagtttattcaagacaaaaaggaaagattagataaaagacgcgaaagggaacctgaaatagtagaagccataaagttagcccggggtggtgtagcatcctttactgtaaaataa

SEQ ID NO: 4680 - DNA, 1662 bp, Artificial Sequence
  Description of Artificial Sequence: Synthetic polynucleotide
atgcaagtagaagggcctgacactaacttcgtgagtgatttggctttgggatccaagaaaagaaggttatccaagacttctgtacaagaggatgatcatacaaatgtggtatctgaagtgaataagaataagaagaaaaaaaaggcaaagcctatgacatgcacattgttgaagtctgtggttgaaaaaggtattggtataaaggatgtaagagacatgactcaatacttgttgcaggctgaaaacaactctcccaaatggattgatatttgtaacaggtctagtttacagaaaatgatagttttgttcattccaggtttacaaccagatgattttgagaacggaaaaaatacctttaatgaaatcagtgatgataacttcaaatatattcctggagaaattgcctccacgtttcatacatttcccgtgatggcacctggttccaagatgacgctcttttctccctacaattcttttattaatgttggattgtccaaaatggagaaaataaataaattgaaagagttacaaaagaagaagaaaattactattaacgatttggttttatccgaacaacagttagtggcaaacgattacccattagattctggagacaccaattttgatacagactgggtacaaactgttgactttacccatggtggctcccacatctttgcattggactgtgaaatgtgtctttccgaacaaggtttagttttaactaggatttctttggtgaattttgacaatgaagttatctatgaagagttggtgaaacctgatgtccccatagtggactatttgacacgttacagtggtataactgaagagaaattaactgttggtgccaagaaaacattgagagaagtacaaaaagatttattgaagataataagtcgttctgatattttgataggacattctttgcagaatgatttgaaagtcatgaaattgaaacatccattggtcgtggatacagctattatataccatcataaagctggcgatcctttcaagccaagtttaaaatacttgagcgaaacctttttgaataaaagcattcaaaacggagaacacgattctgtcgaagatgcaagggcttgtcttgaattgacgaaattaaaaatcttaaatgggttagcatttgggataggtatcaatacggagaacttgttcaccaaattacatcgttttgaagtgaaaaccgttcttctcaacgatatgattattaaaaatcatactgaggacgattctaagggccagttaatccgttgcgtcgaagatgatgagacatggacccatattcacgagaatttgaataaagatgtcaaacttattgtggggagaatcaagaacttagagaggtctcgcaactataataaaaagccaagaaaggaaactccttctttcgatgcgtccatggttcttcatgatatagggcaacatttaacacaattatacgagaatgctacaccaggtactatgattttgatcatgagtggtacaggcgacacaagaccatggaacaatctttctactgagttagagtttattcaagacaaaaaggaaagattagataaaagacgcgaaagggaacctgaaatagtagaagccataaagttagccagaggtggtgtagcatcctttactgtaaaatga

SEQ ID NO: 4681 - DNA, 918 bp, Saccharomyces cerevisiae
atggttgaggaaaattccagagttttgattgttcttccttatacaccgcctagtgctactttgcagaggattatagggcaaactattccgttcttaagagaatgtcaaagtcaactagacatcgtgattgtacctgaattcaaaacctcattccagttggattctgcgctagggaagatgtacagtattaccagggatgtccttttgggctatggaatgatcaacagcggaatcaacatcatattcaacaatattcatttcgtcgagagtaatttgcaatggaaagtggttttattgccacaggaatccacttttgaaacttggaagctagagttgggacaaggacaataccatagtatagaacattatgcattacacgataatataatggaagagatagaaggtcccaaagatgctaacaaatttcatgtcaccgcattgggcggaacgttcgaccacattcacgatggacataaaatattgttgagcgtctctacattcatcacgtcacaaaggttaatttgtggaattacgtgcgatgagctcttgcaaaacaagaaatacaaagagttgattgaaccttatgatacacgatgcaggcacgtacatcaattcatcaagttgttaaaaccggatctctccgtagaactagttcccttaagggacgtgtgcggccccacagggaaagtacccgagatagaatgtttagttgtgagtagagaaaccgtcagtggggcagagactgtgaataagactaggattgaaaaaggcatgagcccattggcagtacatgtggttaatgtacttggaggaagggaggaagacggctggagcgagaagttaagcagcacggaaatcagacgcctacttaagtcctctgcttcgccaacgtgcactccacaaaacccttgcgtataa

SEQ ID NO: 4682 - DNA, 918 bp, Artificial Sequence
  Description of Artificial Sequence: Synthetic polynucleotide
atggttgaggaaaattccagagttttgattgttcttccttatacaccgcctagtgctactttgcagaggattatagggcaaactattccgttcttaagagaatgtcaaagtcaattggacatcgtgattgtacctgaattcaaaaccagtttccagttggattctgcgttggggaagatgtacagtattaccagggatgtccttttgggctatggaatgatcaacagcggaatcaacatcatattcaacaatattcatttcgtcgagagtaatttgcaatggaaagtggttttattgccacaggaatccacttttgaaacttggaagttggagttgggacaaggacaataccatagtatagaacattatgcattacacgataatataatggaagagatagaaggtcccaaagatgctaacaaatttcatgtcaccgcattgggcggaacgttcgaccacattcacgatggacataaaatattgttgagcgtctctacattcatcacgtctcaaaggttaatttgtggaattacgtgcgatgagctcttgcaaaacaagaaatacaaagagttgattgaaccttatgatacaaggtgcaggcacgtacatcaattcatcaagttgttaaaaccggatctctccgtagaattggttcccttaagggacgtgtgcggccccacagggaaagtacccgagatagaatgtttagttgtgagtagagaaaccgtcagtggggcagagactgtgaataagactaggattgaaaaaggcatgagcccattggcagtacatgtggttaatgtacttggaggaagggaggaagacggctggagcgagaagttaagcagcacggaaatcagacgcttacttaagtcctctgcttctccaacgtgcactccacaaaacccttgcgtatga

SEQ ID NO: 4683 - DNA, 1734 bp, Saccharomyces cerevisiae
atgtctaccgctaccatacaggatgaagacattaaatttcagagagaaaactgggaaatgataaggtcacacgtttcacccataatatccaatttaacaatggacaacttacaggaatcgcacagagacttatttcaagtcaatatacttattggccgcaacataatttgtaaaaatgttgtggattttactctgaacaaacagaatggcaggctaatccctgctttatccgctttgattgccttgctaaattctgatattccagatattggagaaactttagcaaaagaactaatgttaatgttcgtgcagcaattcaatcgcaaagattacgtgtcctgcggaaatatccttcaatgtctgtccattttatttctttatgatgtaattcatgaaatcgtgatcttacagattctattgctactccttgaaaagaattctttacgactggtcattgccgtgatgaaaatatgtggctggaaacttgcacttgtcagtaagaaaacccatgatatgatttgggagaagttaagatatattttgcaaacacaggagttatctagtacactacgtgagtcgttagagactctgtttgaaataaggcaaaaagattataaatctgggtctcaaggtctgtttatattggacccaactagttacacagttcatacgcactcctatattgttagtgatgaggatgaagccaacaaagaactgggaaattttgaaaagtgtgaaaatttcaatgaactaaccatggcgtttgatacgctacgacagaagctgctgataaataatacgtccgacacaaatgaaggtagtaacagtcaattacaaatctatgacatgacatctaccaatgatgtcgagtttaaaaagaagatttatttggttctgaaaagttcattatcaggtgacgaagcggctcacaaattgctaaaattaaagattgcgaacaatttgaaaaaaagcgtggtagatataatcatcaaatctagtttgcaggaatctacattctctaaattttattctattttgtccgaacgtatgataacgttccacaggagttggcagacagcttacaatgaaacttttgagcagaattatacacaagatatcgaagattatgaaactgaccaactgcgaatcttaggtaagttttggggacacttaatatcttatgaatttcttccaatggactgtcttaagataattaagttaactgaggaagaatcgtgtcctcaaggaagaattttcatcaaatttttatttcaagagctcgtaaatgagctcggattagatgagctgcaattaaggctaaactccagcaagcttgacggaatgtttccgctggaaggagacgccgaacatataagatactccataaatttctttactgccataggattgggcctgctcacagaggacatgagaagccggttgacaattattcaagaagttgaggatgcagaggaagaagaaaaaaaattgagagaagaggaggaacttgaaaagttacggaagaaggccagagagtcacaaccaacccaagggccaaaaattcacgaatccaggttatttttacagaaggacaccagagaaaatagtagatcaagatcgccattcacagtggaaacaagaaaacgtgctagatccagaactccaccaagaggatcgagaaaccatcgtaacagatccaggactccgcctgcaagaaggcaacggcatagatga

SEQ ID NO: 4684 - DNA, 1734 bp, Artificial Sequence
  Description of Artificial Sequence: Synthetic polynucleotide
atgtctaccgctaccatacaggatgaagacattaaatttcagagagaaaactgggaaatgataaggtctcacgtttctcccataatatccaatttaacaatggacaacttacaggaatctcacagagacttatttcaagtcaatatacttattggccgcaacataatttgtaaaaatgttgtggattttactttgaacaaacagaatggcaggttgatccctgctttatccgctttgattgccttgttgaattctgatattccagatattggagaaactttagcaaaagaattgatgttaatgttcgtgcagcaattcaatcgcaaagattacgtgtcctgcggaaatatccttcaatgtttatccattttatttctttatgatgtaattcatgaaatcgtgatcttacagattttattgttgctccttgaaaagaattctttaagattggtcattgccgtgatgaaaatatgtggctggaaacttgcacttgtcagtaagaaaacccatgatatgatttgggagaagttaagatatattttgcaaacacaggagttatctagtacattacgtgagtctttagagactttatttgaaataaggcaaaaagattataaatctgggtctcaaggtttatttatattggacccaactagttacacagttcatacgcactcctatattgttagtgatgaggatgaagccaacaaagaattaggaaattttgaaaagtgtgaaaatttcaatgaattgaccatggcgtttgatacgcttcgtcagaagttattgataaataatacgtccgacacaaatgaaggtagtaacagtcaattacaaatctatgacatgacatctaccaatgatgtcgagtttaaaaagaagatttatttggttttgaaaagttctttatctggtgacgaagcggctcacaaattgttgaaattaaagattgcgaacaatttgaaaaaaagcgtggtagatataatcatcaaatctagtttgcaggaatctacattctctaaattttattctattttgtccgaacgtatgataacgttccacaggagttggcagacagcttacaatgaaacttttgagcagaattatacacaagatatcgaagattatgaaactgaccaattaagaatcttaggtaagttttggggacacttaatatcttatgaatttcttccaatggactgtcttaagataattaagttaactgaggaagaaagttgtcctcaaggaagaattttcatcaaatttttatttcaagagctcgtaaatgagctcggattagatgagttacaattaaggttaaactccagcaagcttgacggaatgtttccgttggaaggagacgccgaacatataagatactccataaatttctttactgccataggattgggcttgctcacagaggacatgagaagcagattgacaattattcaagaagttgaggatgcagaggaagaagaaaaaaaattgagagaagaggaggaacttgaaaagttaagaaagaaggccagagagtctcaaccaacccaagggccaaaaattcacgaatccaggttatttttacagaaggacaccagagaaaatagtagatctagatctccattcacagtggaaacaagaaaacgtgctagatccagaactccaccaagaggaagcagaaaccatcgtaacagatccaggactccgcctgcaagaaggcaaagacatagatga

SEQ ID NO: 4685 - DNA, 1161 bp, Saccharomyces cerevisiae
atgcgtctctctaacctaattgcttctgcctctcttttatctgctgctactcttgctgctcccgctaaccacgaacacaaggacaagcgtgctgtggtcactaccactgttcaaaaacaaaccactatcattgttaatggtgccgcttcaactccagttgctgctttggaagaaaatgctgttgtcaactccgctccagctgccgctaccagtacaacatcgtctgctgcttctgtagctaccgctgctgcttcctcttctgagaacaactcacaagtttctgctgccgcatctccagcctccagctctgctgctacatctactcaatcttcctcttcctcccaagcttcttcctctagttcttccggcgaagacgtcagcagctttgcctctggtgtcagaggtatcacttataccccatacgagtccagcggtgcttgtaaatccgcttcggaagttgcttccgatttagctcaattgactgacttcccagtcattagattgtacggtaccgactgtaaccaagttgaaaatgttttcaaggctaaggcttcgaaccaaaaagtctttttaggtatttactacgttgaccaaatccaagacggtgtcaacaccatcaagtctgctgttgaatcttacggttcttgggacgatgtcaccactgtttccattggtaacgaattggttaacggtaaccaagctaccccatcccaagtcggtcaatacattgactctggtagatctgccttgaaggctgccggttacactggtccagttgtttctgttgatacttttattgctgtgatcaacaaccctgaattgtgtgactactccgactacatggctgttaatgcccatgcttactttgacaagaacacagttgcccaagactccggtaaatggttactagaacaaatccaaagagtctggactgcttgtgatggtaagaagaatgttgttatcactgagtctggttggccatcaaagggtgagacttacggtgttgctgttccatctaaggaaaatcaaaaggacgctgtttccgccattaccagctcctgtggtgctgataccttcttattcactgccttcaacgactactggaaggccgacggtgcttacggtgttgaaaaatactggggtattctatccaatgaataa

SEQ ID NO: 4686 - DNA, 1161 bp, Artificial Sequence
  Description of Artificial Sequence: Synthetic polynucleotide
atgcgtctctctaacttgattgcttctgcctctcttttatctgctgctactcttgctgctcccgctaaccacgaacacaaggacaagcgtgctgtggtcactaccactgttcaaaaacaaaccactatcattgttaatggtgccgcttccactccagttgctgctttggaagaaaatgctgttgtcaactccgctccagctgccgctaccagtacaacatcttctgctgcttctgtagctaccgctgctgcttcctcttctgagaacaactctcaagtttctgctgccgcatctccagcctccagctctgctgctacatctactcaatcttcctcttcctcccaagcttcttcctctagttcttccggcgaagacgtcagcagctttgcctctggtgtcagaggtatcacttataccccatacgagtccagcggtgcttgtaaatccgcttctgaagttgcttccgatttagctcaattgactgacttcccagtcattagattgtacggtaccgactgtaaccaagttgaaaatgttttcaaggctaaggcttctaaccaaaaagtctttttaggtatttactacgttgaccaaatccaagacggtgtcaacaccatcaagtctgctgttgaatcttacggttcttgggacgatgtcaccactgtttccattggtaacgaattggttaacggtaaccaagctaccccatcccaagtcggtcaatacattgactctggtagatctgccttgaaggctgccggttacactggtccagttgtttctgttgatacttttattgctgtgatcaacaaccctgaattgtgtgactactccgactacatggctgttaatgcccatgcttactttgacaagaacacagttgcccaagactccggtaaatggttattggaacaaatccaaagagtctggactgcttgtgatggtaagaagaatgttgttatcactgagtctggttggccatctaagggtgagacttacggtgttgctgttccatctaaggaaaatcaaaaggacgctgtttccgccattaccagctcctgtggtgctgataccttcttattcactgccttcaacgactactggaaggccgacggtgcttacggtgttgaaaaatactggggtattttatccaatgaatga

SEQ ID NO: 4687 - DNA, 816 bp, Saccharomyces cerevisiae
atgggtttggcagctacaagaaccaaacagcggtttggtttagaccccagaaatacggcatggagtaacgacacctcgagattcgggcaccaatttctagaaaagtttggatggaaacccggtatgggtctggggttatcccccatgaattcgaacacttcgcatatcaaagtgtcaattaaggacgacaacgttgggctcggtgctaaattaaaacgtaaagacaaaaaagacgagtttgataatggtgaatgcgcagggttggatgtcttccagcgaattcttggtaggctgaacggaaaggaaagcaaaatatcagaggaattggacacgcagagaaagcagaagattattgacggaaaatggggtatccattttgtgaagggtgaagttttagcaagcacgtgggatccaaagactcacaagttaagaaattactccaacgcgaagaaacgaaagagggaaggagacgatagcgaagatgaagatgatgacgacaaagaggataaagacagtgataaaaagaagcacaagaagcacaaaaagcataagaaagacaagaaaaaagacaagaaggacaaaaaggagcataagaaacataaaaaggaagagaagagattgaagaaggaaaaaagggcggaaaagaccaaagaaacgaaaaagacgtcaaaattaaaatctagtgaatctgcatccaatatccccgatgcggtaaacacaagactatcggtgcgctccaaatggataaaacaaaagagggccgcgttgatggactccaaggcactgaatgagatctttatgataacaaacgactaa

SEQ ID NO: 4688 - DNA, 816 bp, Artificial Sequence
  Description of Artificial Sequence: Synthetic polynucleotide
atgggtttggcagctacaagaaccaaacagagatttggtttagaccccagaaatacggcatggagtaacgacacctccagattcgggcaccaatttttggaaaagtttggatggaaacccggtatgggtttggggttatcccccatgaatagcaacacttctcatatcaaagtgtccattaaggacgacaacgttgggctcggtgctaaattaaaacgtaaagacaaaaaagacgagtttgataatggtgaatgcgcagggttggatgtcttccagcgtattcttggtaggttaaacggaaaggaaagcaaaatatctgaggaattggacacgcagagaaagcagaagattattgacggaaaatggggtatccattttgtgaagggtgaagttttagcaagcacgtgggatccaaagactcacaagttaagaaattactccaacgcgaagaaaagaaagagggaaggagacgatagcgaagatgaagatgatgacgacaaagaggataaagacagtgataaaaagaagcacaagaagcacaaaaagcataagaaagacaagaaaaaagacaagaaggacaaaaaggagcataagaaacataaaaaggaagagaagagattgaagaaggaaaaaagggcggaaaagaccaaagaaacgaaaaagacgtccaaattaaaatctagtgaatctgcatccaatatccccgatgcggtaaacacaagattatctgtgcgctccaaatggataaaacaaaagagggccgcgttgatggactccaaggcattgaatgagatctttatgataacaaacgactga

SEQ ID NO: 4689 - DNA, 4434 bp, Saccharomyces cerevisiae
atgacgattaccgtgggggatgcagtttcggagacggagctggaaaacaaaagtcaaaacgtggtactatctcccaaggcatctgcttcttcagacataagcacagatgttgataaggacacatcgtcttcttgggatgacaaatctttgctgcctacaggtgaatatattgtggacagaaataagccccaaacctacttgaatagcgatgatatcgaaaaagtgacagaatctgatattttccctcagaaacgtctgttttcattcttgcactctaagaaaattccagaagtaccacaaaccgatgacgagaggaagatatatcctctgttccatacaaatattatctctaacatgtttttttggtgggttctacccatcctgcgagttggttataagagaacgatacagccgaacgatctcttcaaaatggatccgaggatgtctatagagaccctttatgacgactttgaaaaaaacatgatttactattttgagaagacgaggaaaaaataccgtaaaagacatccagaagcgacagaagaagaggttatggaaaatgccaaactacctaaacatacagttctgagagctttattattcacttttaagaaacagtacttcatgtcgatagtgtttgcaattctcgctaattgtacatccggttttaaccccatgattaccaagaggctaattgagtttgtcgaagaaaaggctatttttcatagcatgcatgttaacaaaggtattggttacgctattggtgcatgtttgatgatgttcgttaacgggttgacgttcaaccatttctttcatacatcccaactgactggtgtgcaagctaagtctattcttactaaagctgccatgaagaaaatgtttaatgcatctaattatgcgagacattgttttcctaacggtaaagtgacttcttttgtaacaacagatctcgctagaattgaatttgccttatcttttcagccgtttttggctgggttccctgcaattttggctatttgcattgttttattgatcgttaaccttggacccattgccttagttgggattggtatttttttcggtgggtttttcatatccttatttgcatttaagttaattctgggctttagaattgctgcgaacatcttcactgatgctagagttaccatgatgagagaagtgctgaataatataaaaatgattaaatattatacgtgggaggatgcgtatgaaaaaaatattcaagatattaggaccaaagagatttctaaagttagaaaaatgcaactatcaagaaatttcttgattgctatggccatgtctttgcctagtattgcttcattggtcactttccttgcaatgtacaaagttaataaaggaggcaggcaacctggtaatatttttgcctctttatctttatttcaggtcttgagtttgcaaatgtttttcttacctattgctattggtactggaattgacatgatcattggattgggccgtttgcaaagcttattggaggctccagaagatgatccaaatcagatgattgaaatgaagccttctcctggctttgatccaaaattggctttaaaaatgacacattgctcatttgagtgggaagattatgaattaaacgacgctattgaagaagcaaaaggagaagctaaagatgaaggtaaaaagaacaaaaaaaagcgtaaggatacatggggtaagccatctgcaagtactaataaggcgaaaagattggacaatatgttgaaagacagagacggcccggaagatttagaaaaaacttcgtttaggggtttcaaggacttgaacttcgatattaaaaagggcgaatttattatgattacgggacctattggtactggtaaatcttcattattgaatgcgatggcaggatcaatgagaaaaactgatggtaaggttgaagtcaacggggacttattaatgtgtggttatccatggattcaaaatgcatctgtaagagataacatcatattcggttcaccattcaataaagaaaagtatgatgaagtagttcgtgtttgctctttgaaagctgatctggatattttaccggcaggcgatatgaccgaaattggggaacgtggtattactttatctggtggtcaaaaggcacgtatcaatttagccaggtctgtttataagaagaaggatatttatctattcgacgatgtcctaagtgctgtcgattctcgtgttggtaaacacatcatggatgaatgtctaaccggaatgcttgctaataaaaccagaattttagcaacgcatcaattgtcactgattgagagagcttctagagtcatcgttttaggtactgatggccaagtcgatattggtactgttgatgagctaaaagctcgtaatcaaactttgataaatcttttacaattctcttctcaaaattcggagaaagaggatgaagaacaggaagcggttgttgccggtgaattgggacaactaaaatatgaatcagaggtaaaggaattgactgaactgaagaaaaaggctacagaaatgtcacaaactgcaaatagtggtaaaattgtagcggatggtcatactagtagtaaagaagaaagagcagtcaatagtatcagtctgaaaatataccgtgaatacattaaagctgcagtaggtaagtggggttttatcgcactaccgttgtatgcaattttagtcgttggaaccacattctgctcacttttttcttccgtttggttatcttactggactgagaataaattcaaaaacagaccacccagtttttatatgggtctttactccttctttgtgtttgctgctttcatattcatgaatggccagttcaccatactttgcgcaatgggtattatggcatcgaaatggttaaatttgagggctgtgaaaagaattttacacactccaatgtcatacatagataccacacctttgggacgtattctgaacagattcacaaaagatacagatagcttagataatgagttaaccgaaagtttacggttgatgacatctcaatttgctaatattgtaggtgtttgcgtcatgtgtattgtttacttgccgtggtttgctatcgcaattccgtttcttttggtcatctttgttctgattgctgatcattatcagagttctggtagagaaattaaaagacttgaagctgtgcaacggtcttttgtttacaataatttaaatgaagttttgggtgggatggatacaatcaaagcataccgaagtcaggaacgatttttggcgaaatcagattttttgatcaacaagatgaatgaggcgggataccttgtagttgtcctgcaaagatgggtaggtattttccttgatatggttgctatcgcatttgcactaattattacgttattgtgtgttacgagagcctttcctatttccgcggcttcagttggtgttttgttgacttatgtattacaattgcctggtctattaaataccattttaagggcaatgactcaaacagagaatgacatgaatagtgccgaaagattggtaacatatgcaactgaactaccactagaggcatcctatagaaagcccgaaatgacacctccagagtcatggccctcaatgggcgaaataatttttgaaaatgttgattttgcctatagacctggtttacctatagttttaaaaaatcttaacttgaatatcaagagtggggaaaaaattggtatctgtggtcgtacaggtgctggtaagtccactattatgagtgccctttacaggttgaatgaattgaccgcaggtaaaattttaattgacaatgttgatataagtcagctgggacttttcgatttaagaagaaaattagccatcattccacaagatccagtattatttaggggtacgattcgcaagaacttagatccatttaatgagcgtacagatgacgaattatgggatgcattggtgagaggtggtgctatcgccaaggatgacttgccggaagtgaaattgcaaaaacctgatgaaaatggtactcatggtaaaatgcataagttccatttagatcaagcagtggaagaagagggctccaatttctccttaggtgagagacaactattagcattaacaagggcattggtccgccaatcaaaaatattgattttggatgaggctacatcctcagtggactacgaaacggatggcaaaatccaaacacgtattgttgaggaatttggagattgtacaattttgtgtattgctcacagactgaagaccattgtaaattatgatcgtattcttgttttagagaagggtgaagtcgcagaattcgatacaccatggacgttgtttagtcaagaagatagtattttcagaagcatgtgttctagatctggtattgtggaaaatgatttcgagaacagaagttaa

SEQ ID NO: 4690 - DNA, 4434 bp, Artificial Sequence
  Description of Artificial Sequence: Synthetic polynucleotide
atgacgattaccgtgggggatgcagtttctgagacggagttagaaaacaaaagtcaaaacgtggtattatctcccaaggcatctgcttcttctgacataagcacagatgttgataaggacacatcttcttcttgggatgacaaatctttgttacctacaggtgaatatattgtggacagaaataagccccaaacctacttgaatagcgatgatatcgaaaaagtgacagaatctgatattttccctcagaaacgtttgttttctttcttgcactctaagaaaattccagaagtaccacaaaccgatgacgagaggaagatatatcctcttttccatacaaatattatctctaacatgtttttttggtgggttttgcccatcttgagagttggttataagagaacgatacagccgaacgatctcttcaaaatggatccgaggatgtctatagagaccctttatgacgactttgaaaaaaacatgatttactattttgagaagacgaggaaaaaataccgtaaaagacatccagaagcgacagaagaagaggttatggaaaatgccaaattacctaaacatacagttttgagagctttattattcacttttaagaaacagtacttcatgagtatagtgtttgcaattctcgctaattgtacatccggttttaaccccatgattaccaagaggttgattgagtttgtcgaagaaaaggctatttttcatagcatgcatgttaacaaaggtattggttacgctattggtgcatgtttgatgatgttcgttaacgggttgacgttcaaccatttctttcatacatcccaattgactggtgtgcaagctaagtctattcttactaaagctgccatgaagaaaatgtttaatgcatctaattatgcgagacattgttttcctaacggtaaagtgacttcttttgtaacaacagatctcgctagaattgaatttgccttatcttttcagccgtttttggctgggttccctgcaattttggctatttgcattgttttattgatcgttaaccttggacccattgccttagttgggattggtatttttttcggtgggtttttcatatccttatttgcatttaagttaattttgggctttagaattgctgcgaacatcttcactgatgctagagttaccatgatgagagaagtgttgaataatataaaaatgattaaatattatacgtgggaggatgcgtatgaaaaaaatattcaagatattaggaccaaagagatttctaaagttagaaaaatgcaattatctagaaatttcttgattgctatggccatgtctttgcctagtattgcttctttggtcactttccttgcaatgtacaaagttaataaaggaggcaggcaacctggtaatatttttgcctctttatctttatttcaggtcttgagtttgcaaatgtttttcttacctattgctattggtactggaattgacatgatcattggattgggccgtttgcaaagcttattggaggctccagaagatgatccaaatcagatgattgaaatgaagccttctcctggctttgatccaaaattggctttaaaaatgacacattgctcttttgagtgggaagattatgaattaaacgacgctattgaagaagcaaaaggagaagctaaagatgaaggtaaaaagaacaaaaaaaagcgtaaggatacatggggtaagccatctgcaagtactaataaggcgaaaagattggacaatatgttgaaagacagagacggcccggaagatttagaaaaaacttcttttaggggtttcaaggacttgaacttcgatattaaaaagggcgaatttattatgattacgggacctattggtactggtaaatcttctttattgaatgcgatggcaggatccatgagaaaaactgatggtaaggttgaagtcaacggggacttattaatgtgtggttatccatggattcaaaatgcatctgtaagagataacatcatattcggttctccattcaataaagaaaagtatgatgaagtagttcgtgtttgctctttgaaagctgatttggatattttaccggcaggcgatatgaccgaaattggggaacgtggtattactttatctggtggtcaaaaggcacgtatcaatttagccaggtctgtttataagaagaaggatatttatcttttcgacgatgtcttaagtgctgtcgattctcgtgttggtaaacacatcatggatgaatgtttgaccggaatgcttgctaataaaaccagaattttagcaacgcatcaattgtctttgattgagagagcttctagagtcatcgttttaggtactgatggccaagtcgatattggtactgttgatgagttgaaagctcgtaatcaaactttgataaatcttttacaattctcttctcaaaattctgagaaagaggatgaagaacaggaagcggttgttgccggtgaattgggacaattgaaatatgaaagtgaggtaaaggaattgactgaattgaagaaaaaggctacagaaatgtctcaaactgcaaatagtggtaaaattgtagcggatggtcatactagtagtaaagaagaaagagcagtcaatagtatcagtttgaaaatataccgtgaatacattaaagctgcagtaggtaagtggggttttatcgcattaccgttgtatgcaattttagtcgttggaaccacattctgcagccttttttcttccgtttggttatcttactggactgagaataaattcaaaaacagaccacccagtttttatatgggtctttactccttctttgtgtttgctgctttcatattcatgaatggccagttcaccatactttgcgcaatgggtattatggcatccaaatggttaaatttgagggctgtgaaaagaattttacacactccaatgagttacatagataccacacctttgggacgtattttgaacagattcacaaaagatacagatagcttagataatgagttaaccgaaagtttaagattgatgacatctcaatttgctaatattgtaggtgtttgcgtcatgtgtattgtttacttgccgtggtttgctatcgcaattccgtttcttttggtcatctttgttttgattgctgatcattatcagagttctggtagagaaattaaaagacttgaagctgtgcaaagatcttttgtttacaataatttaaatgaagttttgggtgggatggatacaatcaaagcatacagaagtcaggaaagatttttggcgaaatctgattttttgatcaacaagatgaatgaggcgggataccttgtagttgtcttacaaagatgggtaggtattttccttgatatggttgctatcgcatttgcattgattattacgttattgtgtgttacgagagcctttcctatttccgcggcttctgttggtgttttgttgacttatgtattacaattgcctggtttattaaataccattttaagggcaatgactcaaacagagaatgacatgaatagtgccgaaagattggtaacatatgcaactgaattaccattggaggcatcctatagaaagcccgaaatgacacctccagagagttggccctctatgggcgaaataatttttgaaaatgttgattttgcctatagacctggtttacctatagttttaaaaaatcttaacttgaatatcaagagtggggaaaaaattggtatctgtggtcgtacaggtgctggtaagtccactattatgagtgccctttacaggttgaatgaattgaccgcaggtaaaattttaattgacaatgttgatataagtcagttaggacttttcgatttaagaagaaaattagccatcattccacaagatccagtattatttaggggtacgattcgcaagaacttagatccatttaatgagcgtacagatgacgaattatgggatgcattggtgagaggtggtgctatcgccaaggatgacttgccggaagtgaaattgcaaaaacctgatgaaaatggtactcatggtaaaatgcataagttccatttagatcaagcagtggaagaagagggctccaatttctccttaggtgagagacaattattagcattaacaagggcattggtccgccaaagtaaaatattgattttggatgaggctacatcctctgtggactacgaaacggatggcaaaatccaaacacgtattgttgaggaatttggagattgtacaattttgtgtattgctcacagattaaagaccattgtaaattatgatcgtattcttgttttagagaagggtgaagtcgcagaattcgatacaccatggacgttgtttagtcaagaagatagtattttcagaagcatgtgttctagatctggtattgtggaaaatgatttcgagaacagaagttga

SEQ ID NO: 4691 - DNA, 942 bp, Saccharomyces cerevisiae
atgcgtttctctactacactcgctactgcagctactgcgctatttttcacagcctcccaagtttcagctattggtgaactagcctttaacttgggtgtcaagaacaacgatggtacttgtaagtccacttccgactatgaaaccgaattacaagctttgaagagctacacttccaccgtcaaagtttacgctgcctcagattgtaacactttgcaaaacttaggtcctgctgctgaagctgagggatttactatctttgtcggtgtttggccaacagacgacagtcattacgctgctgaaaaggctgctttgcaaacctatttgccaaaaattaaagaatccactgttgctggtttcttggttggttctgaagccttataccgtaacgatttgactgcctctcaattatcagacaaaattaatgacgtccgtagtgtcgttgctgacatttccgattctgacggaaagtcatactctggtaagcaagtcggtactgtcgattcctggaatgttttggttgctggttacaattctgccgttatcgaagcttccgattttgttatggctaacgcgttctcctactggcaaggtcaaaccatgcaaaatgcctcttactcattctttgatgatattatgcaagctctacaggttatccaatctactaaaggttctaccgatattaccttctgggttggtgagaccggttggccaactgatggtaccaactttgaaagttcttacccatctgttgacaacgccaaacaattctggaaagaaggtatctgttccatgagagcttggggtgttaacgttattgtttttgaagcctttgatgaagattggaagccaaacacctctggtacctctgatgtcgagaagcactggggtgttttcacttcaagtgacaatttgaaatactccttggactgtgacttttcatga

SEQ ID NO: 4692 - DNA, 942 bp, Artificial Sequence
  Description of Artificial Sequence: Synthetic polynucleotide
atgcgtttctctactacactcgctactgcagctactgcgttatttttcacagcctcccaagtttctgctattggtgaattggcctttaacttgggtgtcaagaacaacgatggtacttgtaagtccacttccgactatgaaaccgaattacaagctttgaagagctacacttccaccgtcaaagtttacgctgcctctgattgtaacactttgcaaaacttaggtcctgctgctgaagctgagggatttactatctttgtcggtgtttggccaacagacgacagtcattacgctgctgaaaaggctgctttgcaaacctatttgccaaaaattaaagaatccactgttgctggtttcttggttggttctgaagccttataccgtaacgatttgactgcctctcaattaagtgacaaaattaatgacgtccgtagtgtcgttgctgacatttccgattctgacggaaagtcctactctggtaagcaagtcggtactgtcgattcctggaatgttttggttgctggttacaattctgccgttatcgaagcttccgattttgttatggctaacgcgttctcctactggcaaggtcaaaccatgcaaaatgcctcttactctttctttgatgatattatgcaagctttacaggttatccaatctactaaaggttctaccgatattaccttctgggttggtgagaccggttggccaactgatggtaccaactttgaaagttcttacccatctgttgacaacgccaaacaattctggaaagaaggtatctgttccatgagagcttggggtgttaacgttattgtttttgaagcctttgatgaagattggaagccaaacacctctggtacctctgatgtcgagaagcactggggtgttttcacttctagtgacaatttgaaatactccttggactgtgactttagttga

SEQ ID NO: 4693 - DNA, 1026 bp, Saccharomyces cerevisiae
atggcagtaaaacataaatccgagagccttaagcacgaagagggggctgccaaaaaggcaaagacaggcctattgaagctaaaaaaaatcatggatatagaatctaatgtggtcaaatattccatatgcataccgacaactgttatcgacaattgtaataatttggagcaagttacatttactgcatatcaaatagctcggacagctgtattgttcaatgttcaagaaatcatagttctagaccagtcaaaagataaaaagcatgaaaaaaaatcaagatcaaaggagactatctctgattgtttattacttgccacactattacaatattttgtaacgcctccaaacttactggatactacattcaaaaaaaaaaacaagttatatttaaagtgtgcatctacctttccgccattgaaccagctaccttttatgaacgcatctgccgaacaacactacaaggaaggcttatcaatcgcacgagatagctcaaaaggtaaatctgatgatgctctaacaaatttggtgtatataggaaagaatcaaattattacgttatctaaccaaaatattcccaatactgcgcgtgtaacagttgatacagagcgcaaagaagtagtgtcacccatagatgcttacaaaggaaaaccactcggctatcatgttcgaatggcaagcactttgaatgaggtgtccgaaggttacacaaagatcgtttgggtcaacagtggtgacttccactacgacgaagagttgtcaaagtaccacaaggtagaaacaaagctaccatacatcgcaaaactgaaaaaaagttcaacatcagaaaaaccctgtaatatcctgcttatcttcgggaaatggggccatttaaaacgttgtttcaggagatctgacttagaatcctcttctttgcatcattacttttctggtcaactgcaattccctgcttccgtaccccagggaaatatacccattcaagatagcctacccatagctcttaccatgtttcagcgttgggcaagttga

SEQ ID NO: 4694 - DNA, 1026 bp, Artificial Sequence
  Description of Artificial Sequence: Synthetic polynucleotide
atggcagtaaaacataaatccgagagccttaagcacgaagagggggctgccaaaaaggcaaagacaggccttttgaagttgaaaaaaatcatggatatagaatctaatgtggtcaaatattccatatgcataccgacaactgttatcgacaattgtaataatttggagcaagttacatttactgcatatcaaatagctagaacagctgtattgttcaatgttcaagaaatcatagttttggaccagtccaaagataaaaagcatgaaaaaaaatctagatccaaggagactatctctgattgtttattacttgccacattattacaatattttgtaacgcctccaaacttattagatactacattcaaaaaaaaaaacaagttatatttaaagtgtgcatctacctttccgccattgaaccagttgccttttatgaacgcatctgccgaacaacactacaaggaaggcttatctatcgcaagagatagcagtaaaggtaaatctgatgatgctttaacaaatttggtgtatataggaaagaatcaaattattacgttatctaaccaaaatattcccaatactgcgcgtgtaacagttgatacagagcgcaaagaagtagtgtctcccatagatgcttacaaaggaaaaccactcggctatcatgttagaatggcaagcactttgaatgaggtgtccgaaggttacacaaagatcgtttgggtcaacagtggtgacttccactacgacgaagagttgtccaagtaccacaaggtagaaacaaagttaccatacatcgcaaaattgaaaaaaagttctacaagtgaaaaaccctgtaatatcttacttatcttcgggaaatggggccatttaaaacgttgtttcaggagatctgacttagaatcctcttctttgcatcattacttttctggtcaattacaattccctgcttccgtaccccagggaaatatacccattcaagatagcttgcccatagctcttaccatgtttcagcgttgggcaagttga

SEQ ID NO: 4695 - DNA, 933 bp, Saccharomyces cerevisiae
atgtcttacagaggacctattggaaattttggcggtatgccaatgtcatcatcgcaaggaccatactctggcggtgcacaattcagatcaaaccagaaccaatccacttctggcatcttaaagcaatggaagcattcttttgaaaagtttgcctccagaattgaggggctcactgacaatgcagttgtttataaattgaagccttacattccaagtttgtcaagatttttcattgtggccaccttttatgaagattcgtttaggatcttatcacaatggtcagatcaaattttttatctgaataagtggaagcattacccatacttctttgtcgttgtgtttctagtggttgttaccgtttccatgttgattggcgccagtttgttagttttaagaaagcaaaccaattatgccaccggtgtgttatgtgcttgcgttatttctcaagcattagtttatgggttgtttacgggttcatcatttgtcctaagaaactttagtgttattggtgggttgttaattgcattcagcgattcaattgttcaaaacaagacaacattcggtatgcttcctgaattaaacagcaaaaacgacaaagcgaagggttacctgttgtttgctggtagaattttaattgttttaatgtttatcgctttcactttcagtaaatcatggtttactgttgttttgaccattatcggcacaatatgtttcgccattggttacaagacaaaattcgcatccattatgttgggtttgatactaactttttacaatatcacgctaaacaactactggttttataacaatactaagagagatttcttgaagtatgagttttaccagaacttaagcatcattggtgggcttctattagttactaatactggcgctggtgaattatccgttgatgaaaagaagaagatttactag

SEQ ID NO: 4696 - DNA, 933 bp, Artificial Sequence
  Description of Artificial Sequence: Synthetic polynucleotide
atgtcttacagaggacctattggaaattttggcggtatgccaatgtcttcttctcaaggaccatactctggcggtgcacaattcagatctaaccagaaccaatccacttctggcatcttaaagcaatggaagcattcttttgaaaagtttgcctccagaattgaggggctcactgacaatgcagttgtttataaattgaagccttacattccaagtttgtccagatttttcattgtggccaccttttatgaagattcttttaggatcttatctcaatggtctgatcaaattttttatttgaataagtggaagcattacccatacttctttgtcgttgtgtttttagtggttgttaccgtttccatgttgattggcgccagtttgttagttttaagaaagcaaaccaattatgccaccggtgtgttatgtgcttgcgttatttctcaagcattagtttatgggttgtttacgggttcttcttttgtcttgagaaactttagtgttattggtgggttgttaattgcattcagcgattctattgttcaaaacaagacaacattcggtatgcttcctgaattaaacagcaaaaacgacaaagcgaagggttacttgttgtttgctggtagaattttaattgttttaatgtttatcgctttcactttcagtaaaagttggtttactgttgttttgaccattatcggcacaatatgtttcgccattggttacaagacaaaattcgcatccattatgttgggtttgatattgactttttacaatatcacgttgaacaactactggttttataacaatactaagagagatttcttgaagtatgagttttaccagaacttaagcatcattggtgggcttttattagttactaatactggcgctggtgaattatccgttgatgaaaagaagaagatttactga

SEQ ID NO: 4697 - DNA, 1302 bp, Saccharomyces cerevisiae
atgttttctttacctaccctaacctcagacatcactgttgaagtcaacagttccgctaccaaaaccccattcgtccgtcgtccggtcgaaccggttggtaagttctttttgcaacatgctcaaagaactttgagaaaccacacctggtctgaatttgaaagaattgaagctgaaaagaacgtcaaaaccgttgatgaatccaatgtcgacccagatgagttgttattcgacactgaattggccgatgaagatttactgactcatgatgctagagactggaaaactgccgatttgtatgctgctatgggtttgtctaagttgcgtttcagagctactgaaagtcaaatcatcaaggctcacagaaaacaagttgtcaagtaccatccagacaagcaatctgctgctggtggtagtttggaccaagatggctttttcaagattattcaaaaggcctttgaaactttgactgattccaacaagagagctcagtacgactcatgtgattttgttgccgatgttcctcctccaaagaagggtaccgattatgacttttatgaagcttggggccccgttttcgaagctgaagctcgtttttctaagaagactcctattccttctctaggtaacaaagattcttccaagaaggaagttgaacaattctatgctttctggcacagatttgactcctggagaacctttgagttcttggacgaagatgtcccagatgactcttctaacagagaccacaagcgttacattgaaagaaagaacaaggccgcaagagacaagaagaagactgctgataacgctagattggtcaaacttgttgaaagagctgtcagtgaagatccccgtatcaaaatgttcaaagaagaagagaagaaggaaaaggaaagaagaaaatgggaaagagaagccggtgccagagctgaagctgaagctaaggccaaggccgaagctgaagcgaaggctaaagctgaatctgaagccaaggctaacgcctccgcaaaagctgacaaaaagaaggctaaggaagctgctaaggccgccaagaaaaagaacaagagagccatccgtaactctgctaaggaagctgactactttggtgatgctgacaaggccaccacgattgacgaacaagttggtttgatcgttgacagtttgaatgacgaagagttagtgtccaccgccgataagatcaaggccaatgctgctggtgccaaggaagttttgaaggaatctgcaaagactattgtcgattctggcaaactaccatccagcttgttgtcctacttcgtgtga

SEQ ID NO: 4698 - DNA, 1302 bp, Artificial Sequence
  Description of Artificial Sequence: Synthetic polynucleotide
atgttttctttacctaccttaaccagtgacatcactgttgaagtcaacagttccgctaccaaaaccccattcgtccgtcgtccggtcgaaccggttggtaagttctttttgcaacatgctcaaagaactttgagaaaccacacctggtctgaatttgaaagaattgaagctgaaaagaacgtcaaaaccgttgatgaatccaatgtcgacccagatgagttgttattcgacactgaattggccgatgaagatttattaactcatgatgctagagactggaaaactgccgatttgtatgctgctatgggtttgtctaagttgcgtttcagagctactgaaagtcaaatcatcaaggctcacagaaaacaagttgtcaagtaccatccagacaagcaatctgctgctggtggtagtttggaccaagatggctttttcaagattattcaaaaggcctttgaaactttgactgattccaacaagagagctcagtacgactcttgtgattttgttgccgatgttcctcctccaaagaagggtaccgattatgacttttatgaagcttggggccccgttttcgaagctgaagctcgtttttctaagaagactcctattccttctttgggtaacaaagattcttccaagaaggaagttgaacaattctatgctttctggcacagatttgactcctggagaacctttgagttcttggacgaagatgtcccagatgactcttctaacagagaccacaagcgttacattgaaagaaagaacaaggccgcaagagacaagaagaagactgctgataacgctagattggtcaaacttgttgaaagagctgtcagtgaagatccccgtatcaaaatgttcaaagaagaagagaagaaggaaaaggaaagaagaaaatgggaaagagaagccggtgccagagctgaagctgaagctaaggccaaggccgaagctgaagcgaaggctaaagctgaatctgaagccaaggctaacgcctccgcaaaagctgacaaaaagaaggctaaggaagctgctaaggccgccaagaaaaagaacaagagagccatccgtaactctgctaaggaagctgactactttggtgatgctgacaaggccaccacgattgacgaacaagttggtttgatcgttgacagtttgaatgacgaagagttagtgtccaccgccgataagatcaaggccaatgctgctggtgccaaggaagttttgaaggaatctgcaaagactattgtcgattctggcaaattaccatccagcttgttgtcctacttcgtgtga

SEQ ID NO: 4699 - DNA, 1128 bp, Saccharomyces cerevisiae
atgatgtctactatctaccgtcatttatctaccgctagaccggctttaactaaatacgcaaccaatgccgcagttaaatcgacaactgcatcctcagaagctagtactctgggtgctctacaatatgcattgtctttagatgaaccaagtcattcgtggacaaaatcgcaattaaaagaaatttatcataccccactgctcgaacttactcatgcagcacaattgcagcacagaaagtggcacgatccaaccaaagtgcaattgtgcacattgatgaacatcaaatctggtggttgttctgaggactgtaagtattgtgcgcagtcttcgagaaacgataccggtctaaaggctgagaaaatggttaaagtggatgaagtgattaaagaggcagaagaggccaaaagaaacggatctactagattctgcctaggtgctgcatggagagacatgaaaggtcgtaaatcagccatgaaaagaattcaggaaatggtgaccaaagtgaatgatatggggctagaaacgtgtgttactttaggtatggttgatcaagatcaagcaaagcaattgaaagatgcaggtttgactgcatacaaccataacatcgacacttccagagaacactatagtaaggtcatcaccacgagaacctacgacgacaggttacagaccatcaagaatgtccaagaatctggaataaaagcctgtaccggtggtattttgggtctcggtgaaagcgaagacgaccatataggattcatctacacattatccaatatgtctcctcatcctgagtccctaccaattaatagactagttgctatcaaagggactccaatggctgaggaacttgccgatccaaagagtaaaaagttgcaattcgacgaaattttgagaaccattgccacagcgagaatagttatgccaaaggccattataagacttgccgctggtcgttatacaatgaaagaaacagagcaatttgtctgtttcatggcaggttgtaacagtatcttcaccggtaagaaaatgctgacgacaatgtgtaacggttgggacgaagacaaggcaatgttggctaaatggggattgcaacctatggaggcatttaagtacgacagatcttga

SEQ ID NO: 4700 - DNA, 1128 bp, Artificial Sequence
  Description of Artificial Sequence: Synthetic polynucleotide
atgatgtctactatctaccgtcatttatctaccgctagaccggctttaactaaatacgcaaccaatgccgcagttaaatctacaactgcatccagtgaagctagtactttaggtgctttacaatatgcattgtctttagatgaaccaagtcattcttggacaaaatctcaattaaaagaaatttatcataccccattgctcgaacttactcatgcagcacaattgcagcacagaaagtggcacgatccaaccaaagtgcaattgtgcacattgatgaacatcaaatctggtggttgttctgaggactgtaagtattgtgcgcagtcttctagaaacgataccggtttgaaggctgagaaaatggttaaagtggatgaagtgattaaagaggcagaagaggccaaaagaaacggatctactagattctgcttgggtgctgcatggagagacatgaaaggtcgtaaaagtgccatgaaaagaattcaggaaatggtgaccaaagtgaatgatatggggttggaaacgtgtgttactttaggtatggttgatcaagatcaagcaaagcaattgaaagatgcaggtttgactgcatacaaccataacatcgacacttccagagaacactatagtaaggtcatcaccacgagaacctacgacgacaggttacagaccatcaagaatgtccaagaatctggaataaaagcctgtaccggtggtattttgggtctcggtgaaagcgaagacgaccatataggattcatctacacattatccaatatgtctcctcatcctgagtccttgccaattaatagattggttgctatcaaagggactccaatggctgaggaacttgccgatccaaagagtaaaaagttgcaattcgacgaaattttgagaaccattgccacagcgagaatagttatgccaaaggccattataagacttgccgctggtcgttatacaatgaaagaaacagagcaatttgtctgtttcatggcaggttgtaacagtatcttcaccggtaagaaaatgcttacgacaatgtgtaacggttgggacgaagacaaggcaatgttggctaaatggggattgcaacctatggaggcatttaagtacgacagatcttga

SEQ ID NO: 4701 - DNA, 1770 bp, Saccharomyces cerevisiae
atgactatttcttctgcacatccagagacagaaccaaagtggtggaaagaggccacgttctatcaaatttacccagcaagtttcaaagactctaatgacgatggctggggtgacatgaaagggattgcctccaagctggagtacatcaaagagcttggtgccgatgccatttggatctcaccattctacgactcgccacaagatgatatgggttacgatattgccaactacgaaaaggtctggccaacatatggtacgaatgaagactgctttgccttgatcgaaaagacacataagcttggtatgaaatttatcaccgacttggtcatcaatcactgttccagcgaacatgaatggttcaaagagagcagatcctcgaagactaatccaaagcgtgactggttcttctggagacctcctaaaggttatgacgccgaaggcaagccaattcctccaaacaattggaaatcctattttggtggttccgcatggaccttcgatgaaaagacacaagaattctacttgcgtttgttttgctccactcaacctgatttgaattgggagaatgaagactgtagaaaggcaatctacgaaagtgccgttggatactggttagaccatggtgtagacggctttagaattgatgtcggaagtttgtactccaaagttgtaggtttaccagatgctcctgttgttgacaaaaactcgacttggcaatccagtgatccatacacattgaatggaccacgtattcacgagttccatcaagaaatgaatcaattcatcagaaacagagtgaaggatggcagggagattatgacagttggtgaaatgcaacatgcctccgacgaaactaagagactttatacgagtgcttcaagacacgaacttagtgagttatttaacttttcccacactgatgtggggacttcacctttgttccgttacaacttggtcccatttgaactgaaggattggaagattgcccttgctgagctgttcaggtacattaatggtacagattgttggtcaacaatctatctggaaaatcacgaccaacctcgttcaattacgagatttggtgacgattctcccaagaaccgtgttatttctggtaagttactctctgtgttgctaagtgccttgaccggtactctatatgtgtatcagggacaagagcttggccaaatcaatttcaagaactggcctgttgaaaagtacgaggatgtcgaaatcagaaacaactacaatgccattaaagaagagcatggggaaaactcagaggagatgaaaaagtttttagaagccattgcccttatctccagggaccatgctagaacacctatgcaatggtctcgtgaggagccaaatgctggtttttctggtcctagtgctaaaccatggttttacttgaacgactctttcagagaaggcattaacgtcgaagatgaaatcaaggatcccaactcggttttgaacttctggaaggaggccttgaagtttagaaaggcgcataaagacattactgtgtacggatacgatttcgagtttattgatttagacaataagaagttgtttagcttcacaaagaagtacaacaataaaacattgtttgcggctttgaactttagctctgatgcgacagatttcaagattccaaatgatgattcatcgttcaagttagagtttggaaactatccaaagaaggaggtagatgcctcttccagaacattgaagccatgggaaggaagaatatatatcagcgaatga

SEQ ID NO: 4702 - DNA, 1770 bp, Artificial Sequence
  Description of Artificial Sequence: Synthetic polynucleotide
atgactatttcttctgcacatccagagacagaaccaaagtggtggaaagaggccacgttctatcaaatttacccagcaagtttcaaagactctaatgacgatggctggggtgacatgaaagggattgcctccaagttggagtacatcaaagagcttggtgccgatgccatttggatctctccattctacgactctccacaagatgatatgggttacgatattgccaactacgaaaaggtctggccaacatatggtacgaatgaagactgctttgccttgatcgaaaagacacataagcttggtatgaaatttatcaccgacttggtcatcaatcactgttccagcgaacatgaatggttcaaagagagcagatcctccaagactaatccaaagcgtgactggttcttctggagacctcctaaaggttatgacgccgaaggcaagccaattcctccaaacaattggaaatcctattttggtggttccgcatggaccttcgatgaaaagacacaagaattctacttgcgtttgttttgctccactcaacctgatttgaattgggagaatgaagactgtagaaaggcaatctacgaaagtgccgttggatactggttagaccatggtgtagacggctttagaattgatgtcggaagtttgtactccaaagttgtaggtttaccagatgctcctgttgttgacaaaaactctacttggcaatccagtgatccatacacattgaatggaccacgtattcacgagttccatcaagaaatgaatcaattcatcagaaacagagtgaaggatggcagggagattatgacagttggtgaaatgcaacatgcctccgacgaaactaagagactttatacgagtgcttccagacacgaacttagtgagttatttaacttttcccacactgatgtggggacttctcctttgttccgttacaacttggtcccatttgaattgaaggattggaagattgcccttgctgagcttttcaggtacattaatggtacagattgttggtctacaatctatttggaaaatcacgaccaacctcgttctattacgagatttggtgacgattctcccaagaaccgtgttatttctggtaagttactctctgtgttgttaagtgccttgaccggtactttatatgtgtatcagggacaagagcttggccaaatcaatttcaagaactggcctgttgaaaagtacgaggatgtcgaaatcagaaacaactacaatgccattaaagaagagcatggggaaaacagtgaggagatgaaaaagtttttagaagccattgcccttatctccagggaccatgctagaacacctatgcaatggtctcgtgaggagccaaatgctggtttttctggtcctagtgctaaaccatggttttacttgaacgactctttcagagaaggcattaacgtcgaagatgaaatcaaggatcccaactctgttttgaacttctggaaggaggccttgaagtttagaaaggcgcataaagacattactgtgtacggatacgatttcgagtttattgatttagacaataagaagttgtttagcttcacaaagaagtacaacaataaaacattgtttgcggctttgaactttagctctgatgcgacagatttcaagattccaaatgatgattcttctttcaagttagagtttggaaactatccaaagaaggaggtagatgcctcttccagaacattgaagccatgggaaggaagaatatatatcagcgaatga

SEQ ID NO: 4703 - DNA, 1422 bp, Saccharomyces cerevisiae
atgactttaactaagcaaacatgcgccaagcaggcatgcgactgctgtcgtattcgtcgagtgaaatgcgatggtaaaaggccgtgtagcagttgcctacagaatagtttggattgcacttatctgcaaccgtcgagaaaaagaggtccgaagtccattaggttgaggagcttgaaaagaatagcagaagtgcagagggaaagcggtcctaacaccattgcaactgctcctgtaatatataagagggttcccaaaaagctaatcgatcagtgcttgcggctctatcacgataatttatacgtaatctggccccttctttcgtacgatgaccttcacaaacttctggaggaaaaatacaatgacaattacgtatattggtttctgaccgctttatcagcggccaccctcagtgatttacaaactgaaataaaatctgaagaggaagtcactttcacgggaaaacagttatctaatctttgcatctcatcgtgtcagcaatttgacgatttggataacagcaatatattcaatattatgacgtactactgtttgcatcgtagctttgcacaaatatcgaacgcaagaacttcttacagactctgttgtgaagcggtcggtctgattacggtagcagggttacatcgggaagaaacttacggatcccttacatttgaagaacagcaacttagacggaaactttattacttgcttctcatgacggagagatactatgccatatatcttcattgtgcgacgagcctggatgccacaatagcaccaccgcaacttgaacttgtaactgatcctcagctttctatggacagtttccttgaaatgattagggtatttactgtaccaggaaaatgtttcttcgatgctttagccgctgactctacagatgcttcttgcactgaagagtcattgaaaaagatatggaacgaactccacacaacttcctcggaaatagagccatggtctaacggttacatagacatctcattttcccggcattggattaggatactagcatggaagctagcttatcaaatgaggggtagcaacttttcattgaacgctaacaatgggcaaataccaatagaaattgcgagagatatgttaatagacacttacttaaccccagagaatctttacgatgtccatggtcccggggtaccagtgaaaacattagaaatagctactgctttggtggacattgtaggccagtatgatcataacatgaaattagaagcatggaatgttttgcatgatgtatgcaaatttgctttttctttaaaccactataacaatgatatgctgaagagattttccaccaaatgccagaatgccctaattactctgcccatttctaaacctttacaattggatggttatcccaaggataatgaagacatagacccttga

SEQ ID NO: 4704 - DNA, 1422 bp, Artificial Sequence
  Description of Artificial Sequence: Synthetic polynucleotide
atgactttaactaagcaaacatgcgccaagcaggcatgcgactgctgtcgtattcgtcgtgtgaaatgcgatggtaaaaggccgtgtagcagttgcttacagaatagtttggattgcacttatttacaaccgtccagaaaaagaggtccgaagtccattaggttgaggagcttgaaaagaatagcagaagtgcagagggaaagcggtcctaacaccattgcaactgctcctgtaatatataagagggttcccaaaaagttaatcgatcagtgcttgaggctctatcacgataatttatacgtaatctggccccttctttcttacgatgaccttcacaaacttttggaggaaaaatacaatgacaattacgtatattggtttttaaccgctttatctgcggccaccctcagtgatttacaaactgaaataaaatctgaagaggaagtcactttcacgggaaaacagttatctaatctttgcatctcttcttgtcagcaatttgacgatttggataacagcaatatattcaatattatgacgtactactgtttgcatcgtagctttgcacaaataagcaacgcaagaacttcttacagactctgttgtgaagcggtcggtttgattacggtagcagggttacatagagaagaaacttacggatcccttacatttgaagaacagcaacttagaagaaaactttattacttgcttctcatgacggagagatactatgccatatatcttcattgtgcgacgagcttagatgccacaatagcaccaccgcaacttgaacttgtaactgatcctcagctttctatggacagtttccttgaaatgattagggtatttactgtaccaggaaaatgtttcttcgatgctttagccgctgactctacagatgcttcttgcactgaagagtctttgaaaaagatatggaacgaactccacacaacttccagtgaaatagagccatggtctaacggttacatagacatctctttttccagacattggattaggatattggcatggaagttggcttatcaaatgaggggtagcaacttttctttgaacgctaacaatgggcaaataccaatagaaattgcgagagatatgttaatagacacttacttaaccccagagaatctttacgatgtccatggtcccggggtaccagtgaaaacattagaaatagctactgctttggtggacattgtaggccagtatgatcataacatgaaattagaagcatggaatgttttgcatgatgtatgcaaatttgctttttctttaaaccactataacaatgatatgttgaagagattttccaccaaatgccagaatgccttaattactttacccatttctaaacctttacaattggatggttatcccaaggataatgaagacatagacccttga

SEQ ID NO: 4705 - DNA, 1851 bp, Saccharomyces cerevisiae
atgaaaaatatcatttcattggtaagcaagaagaaggctgcctcaaaaaatgaggataaaaacatttctgagtcttcaagagatattgtaaaccaacaggaggttttcaatactgaagattttgaagaagggaaaaaggatagtgcctttgagctagaccacttagagttcaccaccaattcagcccagttaggagattctgacgaagataacgagaatgtgattaatgagatgaacgctactgatgatgcaaatgaagctaacagcgaggaaaaaagcatgactttgaagcaggcgttgctaaaatatccaaaagcagccctgtggtccatattagtgtctactaccctggttatggaaggttatgataccgcactactgagcgcactgtatgccctgccagtttttcagagaaaattcggtactttgaacggggagggttcttacgaaattacttcccaatggcagattggtttaaacatgtgtgtcctttgtggtgagatgattggtttgcaaatcacgacttatatggttgaatttatggggaatcgttatacgatgattacagcacttggtttgttaactgcttatatctttatcctctactactgtaaaagtttagctatgattgctgtgggacaaattctctcagctataccatggggttgtttccaaagtttggctgttacttatgcttcggaagtttgccctttagcattaagatattacatgaccagttactccaacatttgttggttatttggtcaaatcttcgcctctggtattatgaaaaactcacaagagaatttagggaactccgacttgggctataaattgccatttgctttacaatggatttggcctgctcctttaatgatcggtatctttttcgctcctgagtcgccctggtggttggtgagaaaggatagggtcgctgaggcaagaaaatctttaagcagaattttgagtggtaaaggcgccgagaaggacattcaagttgatcttactttaaagcagattgaattgactattgaaaaagaaagacttttagcatctaaatcaggatcattctttaattgtttcaagggagttaatggaagaagaacgagacttgcatgtttaacttgggtagctcaaaatagtagcggtgccgttttacttggttactcgacatatttttttgaaagagcaggtatggccaccgacaaggcgtttactttttctctaattcagtactgtcttgggttagcgggtacactttgctcctgggtaatatctggccgtgttggtagatggacaatactgacctatggtcttgcatttcaaatggtctgcttatttattattggtggaatgggttttggttctggaagcagcgctagtaatggtgccggtggtttattgctggctttatcattcttttacaatgctggtatcggtgcagttgtttactgtatcgttgctgaaattccatcagcggagttgagaactaagactatagtgctggcccgtatttgctacaatctcatggccgttattaacgctatattaacgccctatatgctaaacgtgagcgattggaactggggtgccaaaactggtctatactggggtggtttcacagcagtcactttagcttgggtcatcatcgatctgcctgagacaactggtagaaccttcagtgaaattaatgaacttttcaaccaaggggttcctgccagaaaatttgcatctactgtggttgatccattcggaaagggaaaaactcaacatgattcgctagctgatgagagtatcagtcagtcctcaagcataaaacagcgagaattaaatgcagctgataaatgttaa

SEQ ID NO: 4706 - DNA, 1851 bp, Artificial Sequence
  Description of Artificial Sequence: Synthetic polynucleotide
atgaaaaatatcatttctttggtaagcaagaagaaggctgcctccaaaaatgaggataaaaacatttctgagtcttctagagatattgtaaaccaacaggaggttttcaatactgaagattttgaagaagggaaaaaggatagtgcctttgagttggaccacttagagttcaccaccaattctgcccagttaggagattctgacgaagataacgagaatgtgattaatgagatgaacgctactgatgatgcaaatgaagctaacagcgaggaaaaaagcatgactttgaagcaggcgttgttgaaatatccaaaagcagccttatggtccatattagtgtctactaccttggttatggaaggttatgataccgcattattaagcgcattatatgccttaccagtttttcagagaaaattcggtactttgaacggggagggttcttacgaaattacttcccaatggcagattggtttaaacatgtgtgtcctttgtggtgagatgattggtttgcaaatcacgacttatatggttgaatttatggggaatcgttatacgatgattacagcacttggtttgttaactgcttatatctttatcctctactactgtaaaagtttagctatgattgctgtgggacaaattctctctgctataccatggggttgtttccaaagtttggctgttacttatgcttctgaagtttgccctttagcattaagatattacatgaccagttactccaacatttgttggttatttggtcaaatcttcgcctctggtattatgaaaaactctcaagagaatttagggaactccgacttgggctataaattgccatttgctttacaatggatttggcctgctcctttaatgatcggtatctttttcgctcctgagtctccctggtggttggtgagaaaggatagggtcgctgaggcaagaaaatctttaagcagaattttgagtggtaaaggcgccgagaaggacattcaagttgatcttactttaaagcagattgaattgactattgaaaaagaaagacttttagcatctaaaagtggaagtttctttaattgtttcaagggagttaatggaagaagaacgagacttgcatgtttaacttgggtagctcaaaatagtagcggtgccgttttacttggttactccacatatttttttgaaagagcaggtatggccaccgacaaggcgtttactttttctttgattcagtactgtcttgggttagcgggtacactttgctcctgggtaatatctggccgtgttggtagatggacaatattgacctatggtcttgcatttcaaatggtctgcttatttattattggtggaatgggttttggttctggaagcagcgctagtaatggtgccggtggtttattgttggctttatctttcttttacaatgctggtatcggtgcagttgtttactgtatcgttgctgaaattccatctgcggagttgagaactaagactatagtgcttgcccgtatttgctacaatctcatggccgttattaacgctatattaacgccctatatgttgaacgtgagcgattggaactggggtgccaaaactggtttatactggggtggtttcacagcagtcactttagcttgggtcatcatcgatttacctgagacaactggtagaaccttcagtgaaattaatgaacttttcaaccaaggggttcctgccagaaaatttgcatctactgtggttgatccattcggaaagggaaaaactcaacatgattctttggctgatgagagtatcagtcagtcctctagcataaaacagagggaattaaatgcagctgataaatgttga

SEQ ID NO: 4707 - DNA, 1755 bp, Saccharomyces cerevisiae
atgactatttctgatcatccagaaacagaaccaaagtggtggaaagaggccacaatctatcaaatttacccagcaagttttaaagactccaataacgatggctggggtgatttaaaaggtatcacttccaagttgcagtatattaaagatcttggcgttgatgctatttgggtttgtccgttttatgactctcctcaacaagatatggggtatgatatatccaactacgaaaaggtctggcccacatatggtaccaatgaggactgttttgagctaattgacaagactcataagctgggtatgaaattcatcaccgatttggttatcaaccactgttctacagaacacgaatggttcaaagagagcagatcctcgaagaccaatccgaagcgtgactggttcttctggagacctcctaagggttatgacgccgaaggcaagccaattcctccaaacaattggaaatctttctttggtggttcagcttggacttttgatgaaactacaaatgaattttacctccgtttgtttgcgagtcgtcaagttgacttgaattgggagaatgaagactgcagaagggcaatctttgaaagtgctgttggattttggctggaccatggtgtagatggttttagaatcgataccgctggtttgtattcgaaacgtcctggtttaccagattccccaatttttgacaaaacctcgaaattacaacatccaaattgggggtctcacaatggtcctaggattcatgaatatcatcaagaactacacagatttatgaaaaacagggtgaaagatggtagagaaataatgacagtcggtgaagttgcccatggaagtgataatgctttatacaccagtgcagctagatacgaagtcagcgaagttttctccttcacgcacgttgaagttggtacctcgccatttttccgttataacatagtgcccttcaccttgaaacaatggaaagaagccattgcatcgaactttttgttcattaacggtactgatagttgggctaccacctacatcgagaatcacgatcaagcccggtcaattacgagatttgctgacgattcgccaaagtaccgtaaaatatctggtaagctgttaacattgctagaatgttcattgacaggtacgttgtatgtctatcaaggtcaggagataggccagatcaatttcaaggaatggcctattgaaaagtatgaggacgttgatgtgaaaaacaactacgagattatcaaaaaaagttttggtaaaaactcgaaggaaatgaaggatttttttaaaggaatcgccctactttctagagatcattcgagaactcccatgccatggacgaaagataagcccaatgctggatttactggcccagatgttaaaccttggtttctcttgaatgaatctttcgagcaaggaatcaatgttgagcaggaatccagagatgatgactcagttctcaatttttggaaaagggccttgcaagccagaaagaaatataaggaacttatgatttatggttacgatttccaattcattgatttagacagtgaccagatctttagcttcactaaagagtacgaagacaagacgctgtttgctgctttaaatttcagtggcgaagaaattgaattcagcctcccaagagaaggtgcttctttatcttttattcttggaaattatgatgatactgacgtttcctccagagttttgaaaccatgggaaggtagaatctacctcgtcaaataa

SEQ ID NO: 4708 - DNA, 1755 bp, Artificial Sequence
  Description of Artificial Sequence: Synthetic polynucleotide
atgactatttctgatcatccagaaacagaaccaaagtggtggaaagaggccacaatctatcaaatttacccagcaagttttaaagactccaataacgatggctggggtgatttaaaaggtatcacttccaagttgcagtatattaaagatcttggcgttgatgctatttgggtttgtccgttttatgactctcctcaacaagatatggggtatgatatatccaactacgaaaaggtctggcccacatatggtaccaatgaggactgttttgagttgattgacaagactcataagttgggtatgaaattcatcaccgatttggttatcaaccactgttctacagaacacgaatggttcaaagagagcagatcctccaagaccaatccgaagcgtgactggttcttctggagacctcctaagggttatgacgccgaaggcaagccaattcctccaaacaattggaaatctttctttggtggttctgcttggacttttgatgaaactacaaatgaattttacctccgtttgtttgcgagtcgtcaagttgacttgaattgggagaatgaagactgcagaagggcaatctttgaaagtgctgttggattttggttagaccatggtgtagatggttttagaatcgataccgctggtttgtattctaaacgtcctggtttaccagattccccaatttttgacaaaacctccaaattacaacatccaaattgggggtctcacaatggtcctaggattcatgaatatcatcaagaattgcacagatttatgaaaaacagggtgaaagatggtagagaaataatgacagtcggtgaagttgcccatggaagtgataatgctttatacaccagtgcagctagatacgaagtcagcgaagttttctccttcacgcacgttgaagttggtacctctccatttttccgttataacatagtgcccttcaccttgaaacaatggaaagaagccattgcatctaactttttgttcattaacggtactgatagttgggctaccacctacatcgagaatcacgatcaagcccgttctattacgagatttgctgacgattctccaaagtaccgtaaaatatctggtaagcttttaacattgttggaatgttctttgacaggtacgttgtatgtctatcaaggtcaggagataggccagatcaatttcaaggaatggcctattgaaaagtatgaggacgttgatgtgaaaaacaactacgagattatcaaaaaaagttttggtaaaaactccaaggaaatgaaggatttttttaaaggaatcgccttactttctagagatcattccagaactcccatgccatggacgaaagataagcccaatgctggatttactggcccagatgttaaaccttggtttctcttgaatgaatctttcgagcaaggaatcaatgttgagcaggaatccagagatgatgactctgttctcaatttttggaaaagggccttgcaagccagaaagaaatataaggaacttatgatttatggttacgatttccaattcattgatttagacagtgaccagatctttagcttcactaaagagtacgaagacaagacgttgtttgctgctttaaatttcagtggcgaagaaattgaattcagcctcccaagagaaggtgcttctttatcttttattcttggaaattatgatgatactgacgtttcctccagagttttgaaaccatgggaaggtagaatctacctcgtcaaatga

SEQ ID NO: 4709 - DNA, 363 bp, Saccharomyces cerevisiae
atggtcaaactaacttcaatcgctgctggtgttgccgccatcgctgctactgcttccgcaaccaccactctagctcaatctgacgaaagagtcaacttggttgaattgggtgtctacgtctctgatatcagagctcacttggcccaatactactctttccaagccgctcatccaactgaaacctacccagttgaaatcgctgaagccgttttcaactacggtgacttcaccaccatgttgactggtattgccccagaccaagtgaccagaatgatcaccggtgttccatggtactccagcagattaaagccagccatctccagtgctctatccaaggacggtatctacactatcgcaaactag

SEQ ID NO: 4710 - DNA, 363 bp, Artificial Sequence
  Description of Artificial Sequence: Synthetic polynucleotide
atggtcaaattaacttctatcgctgctggtgttgccgccatcgctgctactgcttccgcaaccaccactttggctcaatctgacgaaagagtcaacttggttgaattgggtgtctacgtctctgatatcagagctcacttggcccaatactactctttccaagccgctcatccaactgaaacctacccagttgaaatcgctgaagccgttttcaactacggtgacttcaccaccatgttgactggtattgccccagaccaagtgaccagaatgatcaccggtgttccatggtactccagcagattaaagccagccatctccagtgctttgtccaaggacggtatctacactatcgcaaactga

SEQ ID NO: 4711 - DNA, 1146 bp, Saccharomyces cerevisiae
atgaaagagaatgaacttaaaaatgagaagagtgtagatgtattatccgtcaaacagctcgaatcccaaaagactgttctacctcaagatcttttcagaagcagctttacctggttttgttatgaaatttacaagtccttagtgtttcgcatctggatgctattatggctaccacttagcgtctggtggaaactttccaacaattggatttacccgcttatggtttcacttcttgtcctgttttggggaccagtatttgttcttgttatttttagactttctcgtaaacgttccttatcgaaacaactcactcagttttgcaaagagattactaaaaacacaccaagttcggatcctcatgattgggaagtcgttgcagcaaatctaaattcgtacttctatgaaaataaggcttggaataccaagtacttttttttcagtgccatgagctgccaagaagcattcagaacaacccttctcgaacccttctctttgaaaaaagacgaagctgccaaggttaagtcatttaaggattccgtcccttacattgaagaagcattggaagtttattttacagaagttgaaaaacaatggaagttgtttaattctgagaaatcatggagccctgttggcctggaagatgctaaacttcccaaggaagcttaccgatttaagcttacctgggttctcaaaaggattttcaaccggcggtgtttaccactcttccttttttatttgcataatgtcttcatttcacgaaatgatggcactatagcacgtcccttgtttcttgtggtgctgttttttatcatgacgagagatttccggaatatgaggatgatcgttttatccgtgaaaatggaacacaagatgcagtttttatcgactattataaatgagcaagaaagtggtgcaaatggatgggacgaaattgcaaagaaaatgaataggtacttgtttgagaaaaaagtctggaagaatgaagagtttttctttgacgggattgactgtgaatggttttttagccacttcttctaccgcgttctctctgcaaagaaatctatgcgggctctatcattgaatgtggaactatggccatatattaaagaagcgcaattatcctgcagtgaggagtccttagcgtaa

SEQ ID NO: 4712 - DNA, 1146 bp, Artificial Sequence
  Description of Artificial Sequence: Synthetic polynucleotide
atgaaagagaatgaacttaaaaatgagaagagtgtagatgtattatccgtcaaacagctcgaatcccaaaagactgttttacctcaagatcttttcagaagcagctttacctggttttgttatgaaatttacaagtccttagtgtttcgcatctggatgcttttatggttaccacttagcgtctggtggaaactttccaacaattggatttacccgcttatggtttcccttcttgtcttgttttggggaccagtatttgttcttgttatttttagactttctcgtaaacgttccttatccaaacaactcactcagttttgcaaagagattactaaaaacacaccaagttctgatcctcatgattgggaagtcgttgcagcaaatttgaattcttacttctatgaaaataaggcttggaataccaagtacttttttttcagtgccatgagctgccaagaagcattcagaacaacccttctcgaacccttctctttgaaaaaagacgaagctgccaaggttaagagctttaaggattccgtcccttacattgaagaagcattggaagtttattttacagaagttgaaaaacaatggaagttgtttaattctgagaaaagttggagccctgttggccttgaagatgctaaacttcccaaggaagcttacagatttaagcttacctgggttctcaaaaggattttcaacagaagatgtttaccactcttccttttttatttgcataatgtcttcatttctagaaatgatggcactatagcacgtcccttgtttcttgtggtgcttttttttatcatgacgagagatttcagaaatatgaggatgatcgttttatccgtgaaaatggaacacaagatgcagtttttatctactattataaatgagcaagaaagtggtgcaaatggatgggacgaaattgcaaagaaaatgaataggtacttgtttgagaaaaaagtctggaagaatgaagagtttttctttgacgggattgactgtgaatggttttttagccacttcttctaccgcgttctctctgcaaagaaatctatgagagctttatctttgaatgtggaattatggccatatattaaagaagcgcaattatcctgcagtgaggagtccttagcgtga

SEQ ID NO: 4713 - DNA, 5580 bp, Saccharomyces cerevisiae
atggaaattgaaaacgaacagatttgcacctgcatagcgcagattctgcatcttctcaatagcttaattattacattcttagatgatgataagacggaaactggacaatcttttgtttatattgatggatttcttgtcaaaaagcataacaatcaacatactattgttaatttcgaaacttacaaaaataaaatgaaagtttccgataggcgtaagtttgaaaaagcaaactttgacgagtttgagtcggctctaaataacaaaaacgacttggtacattgtccctcaataactttatttgaatcgatccccacggaagtgcggtcattctacgaagacgaaaagtctggtctaatcaaagtggtaaaattcagaactggtgcaatggataggaaaaggtcttttgaaaaaattgtcgtttccgtcatggtcgggaaaaatgtacaaaagttcctgacgtttgttgaagacgaaccagatttccagggcggaccaatcccttcaaagtatcttattcccaagaaaatcaacttgatggtctacacgttgtttcaagtgcatactttgaaattcaatagaaaggattacgataccctttctcttttttacctcaacagaggatactataatgagttgagtttccgtgtcctggaacgttgttacgaaatagcgagtgccaggccgaacgacagctctacgatgcgtactttcactgactttgtttctggcacacctattgtaaggggtcttcagaaaagcaccataaggaaatatggatacaatttggcaccctacatgtttttgttactacacgtagatgagctatcgattttttctgcataccaagcaagtttacctggcgaaaagaaagtcgacacagagcggctgaagcgtgatctatgcccacgtaaacccactgagataaagtacttttcacagatatgtaacgatatgatgaacaaaaaggaccgattgggtgatattttgcatattatcttgcgagcatgtgcgctcaatttcggggcgggtccccgtggtggcgctggtgacgaagaggatcgatccattacgaatgaagaacccattattccctctgtggacgagcatggcttgaaagtatgtaagttgcgcagtcctaacactccacgaagactcagaaaaacactagatgccgtgaaagctttattggtgtcgtcttgtgcttgtaccgcaagggatttagatatatttgatgacaacaacggcgttgcgatgtggaaatggatcaaaattctgtaccacgaagtagcgcaggaaaccgcgctgaaggactcttatagaataactttggtaccttcttctgatggtgtatcagtatgtggaaaactgtttaatcgcgagtatgtccgcggcttttactttgcatgcaaggctcagtttgataacctttgggaagaattgaacgactgcttttatatgcctacagtggttgatattgccagcctcattttgcgtaatcgagaagttttgttcagagagccaaagcgaggaattgacgagtatctggagaacgattctttccttcaaatgatacctgttaaatatcgtgaaattgtgctgcccaagttgagaagagatactaacaaaatgaccgcggctcttaaaaataaagtcactgttgcaattgacgagcttacggtgccacttatgtggatgatccattttgccgtaggatacccttaccgttatccagagcttcagctactcgcttttgccggtcctcagcgcaacgtatacgtcgatgatacaacaagacgcatccaactgtacactgattacaacaagaacggttcatcggagcctcgacttaagacgcttgacggactcacttcagattacgtgttttattttgtcactgtgctaaggcaaatgcaaatatgtgcgcttggtaacagttatgacgcttttaatcatgatccttggatggatgtggtgggatttgaggatccagatcaagtaacaaatcgagacatttcgaggatagttttgtattcctacatgtttctgaataccgcgaagggctgtctggttgaatacgcaacttttcggcagtacatgagggaacttccgaagaatgcacctcagaagctgaattttcgggagatgcgtcaggggttgattgccctaggacggcactgcgtaggtagcagatttgaaacagatttgtacgagtcggcgacgagtgaactcatggccaatcattccgttcaaacagggcgaaatatttacggtgtggattccttttcgttaactagtgtcagtgggacgaccgccactttattgcaggaacgagcttccgagcgctggattcaatggttaggccttgaaagcgactaccattgttcattctctagtactcggaatgcggaagacgtagtggcaggtgaggcggcgagttcagatcatcatcaaaaaatttcaagagtaacgcgaaaaaggccccgagagcccaagagtacaaacgatatcctcgtcgcaggccagaaactctttggcagctcctttgaattcagggacttgcatcagttgcgcttatgtcatgaaatatacatggcagacacaccctctgtggcagtacaggccccaccgggctatggtaagacggagttatttcatctccccttgatagcactggcgtctaagggcgacgtgaaatatgtgtcgtttctgtttgtaccgtacacagtgttgcttgctaattgcatgatcaggttgagccgatgcggttgcttgaatgtggcccctgtaagaaactttattgaagaaggttgcgatggcgttactgatttatacgtggggatctacgatgatcttgctagcactaatttcacagacaggatagctgcgtgggagaatattgttgagtgcacctttaggaccaacaacgtaaaattgggttacctcattgtagatgagtttcacaactttgaaacggaggtctaccggcagtcgcaatttgggggcataactaaccttgattttgacgcttttgagaaagcaatctttttgagcggcacagcacctgaggctgtagctgatgctgcgttgcagcgtattgggcttacgggactggccaagaagtcgatggacatcaacgagctcaaacggtcggaagatctcagcagaggtctatccagctatccaacacggatgtttaatctaatcaaggagaaatccgaggtgcctttagggcatgttcataaaatttggaagaaagtggaatcacagcccgaagaagcactgaagcttcttttagccctctttgaaattgaaccagagtcgaaggccattgtagttgcaagcacaaccaacgaagtggaagaattggcctgctcttggagaaagtattttagggtggtatggatacacgggaagctgggtgctgcagaaaaggtgtctcgcacaaaggagtttgtcactgacggtagcatgcgagttctcatcggaacgaaattagtgactgaaggaattgacattaagcaattgatgatggtgatcatgcttgataatagacttaatattattgagctcattcaaggcgtagggagactaagagatgggggcctctgttatctattatctagaaaaaacagttgggcggcaaggaatcgtaagggtgaattaccaccgattaaggaaggctgtataaccgaacaggtacgcgagttctatggacttgaatcaaagaaaggaaaaaagggccagcatgttggatgctgtggctccaggacagacctgtctgctgacacagtggaactgatagaaagaatggacagattggctgaaaaacaggcgacagcttccatgtcgatcgttgcgttaccgtctagcttccaggagagcaatagcagtgacaggtgcagaaagtattgcagcagtgatgaggacagcgacacgtgcattcatggtagtgctaatgccagtaccaatgcgactaccaactccagcactaatgctactaccactgccagcaccaacgtcaggactagtgctactaccactgccagcatcaacgtcaggactagtgcgactaccactgaaagtaccaactccagcactaatgctactaccactgccagcaccaacgtcaggactagtgctactaccactgccagcatcaacgtcaggactagtgcgactaccactgaaagtaccaactccaacactagtgctactaccaccgaaagtaccgactccaacactagtgctactaccaccgaaagtaccgactccaacactagtgctactaccactgctagcaccaactccagcactaatgccactaccactgctagcaccaactccagcactaatgccactaccactgaaagtaccaacgctagtgccaaggaggacgccaataaagatggcaatgctgaggataatagattccatccagtcaccgacattaacaaagagtcgtataagcggaaagggagtcaaatggttttgctagagagaaagaaactgaaagcacaatttcccaatacttccgagaatatgaatgtcttacagtttcttggatttcggtctgacgaaattaaacatcttttcctctatggtattgacgtatacttctgcccagagggagtattcacacaatacggattatgcaagggctgtcaaaagatgttcgagctctgtgtctgttgggctggccagaaagtatcgtatcggaggatggcttgggaagcactagctgtggagagaatgctgcgaaatgacgaggaatacaaagaatacttggaagacatcgagccatatcatggggaccctgtaggatatttgaaatattttagcgtaaaaaggggagagatctactctcagatacagagaaattatgcttggtacctggccattactagaagaagagaaacaattagtgtattggattcgacaagaggcaagcaagggagccaagttttccgcatgtctggaaggcagatcaaagagttgtattataaagtatggagcaacttgcgtgaatcgaagacagaggtgctgcagtactttttgaactgggacgaaaaaaagtgccgggaagaatgggaggcaaaagacgatacggtctttgtggaagcgctcgagaaagttggagtttttcagcgtttgcgttccatgacgagcgctggactgcagggtccgcagtacgtcaagctgcagtttagcaggcatcatcgacagttgaggagcagatatgaattaagtctaggaatgcacttgcgagatcagcttgcgctgggagttaccccatctaaagtgccgcattggacggcattcctgtcgatgctgatagggctgttctgcaataaaacatttcggcagaaactggaatatcttttggagcagatttcggaggtgtggttgttaccacattggcttgatttggcaaacgttgaagttctcgctgcagataacacgagggtaccgctgtacatgctgatggtagcggttcacaaagagctggatagcgatgatgttccagacggtagatttgatatattattatgtagagattcgagcagagaagttggagagtga

SEQ ID NO: 4714 - DNA, 5580 bp, Artificial Sequence
  Description of Artificial Sequence: Synthetic polynucleotide
atggaaattgaaaacgaacagatttgcacctgcatagcgcagattttgcatcttctcaatagcttaattattacattcttagatgatgataagacggaaactggacaatcttttgtttatattgatggatttcttgtcaaaaagcataacaatcaacatactattgttaatttcgaaacttacaaaaataaaatgaaagtttccgataggcgtaagtttgaaaaagcaaactttgacgagtttgagtctgctttgaataacaaaaacgacttggtacattgtccctccataactttatttgaaagtatccccacggaagtgagatctttctacgaagacgaaaagtctggtttgatcaaagtggtaaaattcagaactggtgcaatggataggaaaaggtcttttgaaaaaattgtcgtttccgtcatggtcgggaaaaatgtacaaaagttcttgacgtttgttgaagacgaaccagatttccagggcggaccaatcccttctaagtatcttattcccaagaaaatcaacttgatggtctacacgttgtttcaagtgcatactttgaaattcaatagaaaggattacgataccctttctcttttttacctcaacagaggatactataatgagttgagtttccgtgtcttggaacgttgttacgaaatagcgagtgccaggccgaacgacagctctacgatgcgtactttcactgactttgtttctggcacacctattgtaaggggtcttcagaaaagcaccataaggaaatatggatacaatttggcaccctacatgtttttgttattacacgtagatgagttatccattttttctgcataccaagcaagtttacctggcgaaaagaaagtcgacacagagaggttaaagcgtgatttatgcccacgtaaacccactgagataaagtacttttcccagatatgtaacgatatgatgaacaaaaaggacagattgggtgatattttgcatattatcttgagagcatgtgcgctcaatttcggggcgggtccccgtggtggcgctggtgacgaagaggatagatccattacgaatgaagaacccattattccctctgtggacgagcatggcttgaaagtatgtaagttgcgcagtcctaacactccaagaagactcagaaaaacattagatgccgtgaaagctttattggtgtcttcttgtgcttgtaccgcaagggatttagatatatttgatgacaacaacggcgttgcgatgtggaaatggatcaaaattttataccacgaagtagcgcaggaaaccgcgttaaaggactcttatagaataactttggtaccttcttctgatggtgtatctgtatgtggaaaattatttaatcgcgagtatgtccgcggcttttactttgcatgcaaggctcagtttgataacctttgggaagaattgaacgactgcttttatatgcctacagtggttgatattgccagcctcattttgcgtaatagagaagttttgttcagagagccaaagagaggaattgacgagtatttggagaacgattctttccttcaaatgatacctgttaaatatcgtgaaattgtgttacccaagttgagaagagatactaacaaaatgaccgcggctcttaaaaataaagtcactgttgcaattgacgagcttacggtgccacttatgtggatgatccattttgccgtaggatacccttaccgttatccagagcttcagttgctcgcttttgccggtcctcagcgcaacgtatacgtcgatgatacaacaagacgcatccaattgtacactgattacaacaagaacggttcttctgagcctcgtcttaagacgcttgacggactcacttctgattacgtgttttattttgtcactgtgttaaggcaaatgcaaatatgtgcgcttggtaacagttatgacgcttttaatcatgatccttggatggatgtggtgggatttgaggatccagatcaagtaacaaatagagacatttctaggatagttttgtattcctacatgtttttgaataccgcgaagggctgtttggttgaatacgcaacttttagacagtacatgagggaacttccgaagaatgcacctcagaagttgaattttagagagatgcgtcaggggttgattgccttaggaagacactgcgtaggtagcagatttgaaacagatttgtacgagtctgcgacgagtgaactcatggccaatcattccgttcaaacagggagaaatatttacggtgtggattccttttctttaactagtgtcagtgggacgaccgccactttattgcaggaaagagcttccgagcgctggattcaatggttaggccttgaaagcgactaccattgttctttctctagtactagaaatgcggaagacgtagtggcaggtgaggcggcgagttctgatcatcatcaaaaaatttctagagtaacgagaaaaaggcccagagagcccaagagtacaaacgatatcctcgtcgcaggccagaaactctttggcagctcctttgaattcagggacttgcatcagttgcgcttatgtcatgaaatatacatggcagacacaccctctgtggcagtacaggccccaccgggctatggtaagacggagttatttcatctccccttgatagcattagcgtctaagggcgacgtgaaatatgtgtcctttttgtttgtaccgtacacagtgttgcttgctaattgcatgatcaggttgagcagatgcggttgcttgaatgtggcccctgtaagaaactttattgaagaaggttgcgatggcgttactgatttatacgtggggatctacgatgatcttgctagcactaatttcacagacaggatagctgcgtgggagaatattgttgagtgcacctttaggaccaacaacgtaaaattgggttacctcattgtagatgagtttcacaactttgaaacggaggtctacagacagtctcaatttgggggcataactaaccttgattttgacgcttttgagaaagcaatctttttgagcggcacagcacctgaggctgtagctgatgctgcgttgcagcgtattgggcttacgggattggccaagaagtctatggacatcaacgagctcaaaagaagtgaagatctcagcagaggtttatccagctatccaacaagaatgtttaatttgatcaaggagaaatccgaggtgcctttagggcatgttcataaaatttggaagaaagtggaatctcagcccgaagaagcattgaagcttcttttagccctctttgaaattgaaccagagtctaaggccattgtagttgcaagcacaaccaacgaagtggaagaattggcctgctcttggagaaagtattttagggtggtatggatacacgggaagttgggtgctgcagaaaaggtgtctcgcacaaaggagtttgtcactgacggtagcatgagagttctcatcggaacgaaattagtgactgaaggaattgacattaagcaattgatgatggtgatcatgcttgataatagacttaatattattgagctcattcaaggcgtagggagattgagagatgggggcctctgttatcttttatctagaaaaaacagttgggcggcaaggaatcgtaagggtgaattaccaccgattaaggaaggctgtataaccgaacaggtacgcgagttctatggacttgaatccaagaaaggaaaaaagggccagcatgttggatgctgtggctccaggacagacttgtctgctgacacagtggaattgatagaaagaatggacagattggctgaaaaacaggcgacagcttccatgtccatcgttgcgttaccgtctagcttccaggagagcaatagcagtgacaggtgcagaaagtattgcagcagtgatgaggacagcgacacgtgcattcatggtagtgctaatgccagtaccaatgcgactaccaactccagcactaatgctactaccactgccagcaccaacgtcaggactagtgctactaccactgccagcatcaacgtcaggactagtgcgactaccactgaaagtaccaactccagcactaatgctactaccactgccagcaccaacgtcaggactagtgctactaccactgccagcatcaacgtcaggactagtgcgactaccactgaaagtaccaactccaacactagtgctactaccaccgaaagtaccgactccaacactagtgctactaccaccgaaagtaccgactccaacactagtgctactaccactgctagcaccaactccagcactaatgccactaccactgctagcaccaactccagcactaatgccactaccactgaaagtaccaacgctagtgccaaggaggacgccaataaagatggcaatgctgaggataatagattccatccagtcaccgacattaacaaagagtcttataagagaaaagggagtcaaatggttttgttggagagaaagaaattgaaagcacaatttcccaatacttccgagaatatgaatgtcttacagtttcttggatttagatctgacgaaattaaacatcttttcctctatggtattgacgtatacttctgcccagagggagtattcacacaatacggattatgcaagggctgtcaaaagatgttcgagctctgtgtctgttgggctggccagaaagtatcttatagaaggatggcttgggaagcattggctgtggagagaatgttaagaaatgacgaggaatacaaagaatacttggaagacatcgagccatatcatggggaccctgtaggatatttgaaatattttagcgtaaaaaggggagagatctactctcagatacagagaaattatgcttggtacttggccattactagaagaagagaaacaattagtgtattggattctacaagaggcaagcaagggagccaagttttccgcatgtctggaaggcagatcaaagagttgtattataaagtatggagcaacttgcgtgaatccaagacagaggtgttacagtactttttgaactgggacgaaaaaaagtgcagagaagaatgggaggcaaaagacgatacggtctttgtggaagcgctcgagaaagttggagtttttcagcgtttgcgttccatgacgagcgctggattacagggtccgcagtacgtcaagttacagtttagcaggcatcatagacagttgaggagcagatatgaattaagtttgggaatgcacttgagagatcagcttgcgttgggagttaccccatctaaagtgccgcattggacggcattcttgtccatgttgatagggcttttctgcaataaaacatttagacagaaattagaatatcttttggagcagatttctgaggtgtggttgttaccacattggcttgatttggcaaacgttgaagttctcgctgcagataacacgagggtaccgttgtacatgttaatggtagcggttcacaaagagttagatagcgatgatgttccagacggtagatttgatatattattatgtagagattctagcagagaagttggagagtga

SEQ ID NO: 4715 - DNA, 2094 bp, Saccharomyces cerevisiae
atggcagacacaccctctgtggcagtacaggccccaccgggctatggtaagacggagttatttcatctccccttgatagcactggcgtctaagggcgacgtggaatatgtgtcgtttctgtttgtaccgtacacagtgttgcttgctaattgcatgatcaggttgggccgatgcggttgcttgaatgtggcccctgtaagaaactttattgaagaaggttgcgatggcgttactgatttatacgtggggatctacgatgatcttgctagcactaatttcacagacaggatagctgcgtgggagaatattgttgagtgcacctttaggaccaacaacgtaaaattgggttacctcattgtagatgagttgcacaactttgaaacggaggtctaccggcagtcgcaatttgggggcataactaaccttgattttgacgcttttgagaaagcaatctttttgagcggcacagcccctgaggctgttgctgatgctgcgttgcagcgtattgggcttacgggactggccaagaagtcgatggacatcaacgagctcaaacggtcggaagatctcagcagaggtctatccagctatccaacacggatgtttaatctaatcaaggagaaatccaaggtgcctttaggcactaatgctactaccactgccagcaccaacgtcaggactagtgctactactactgccagcatcaacgtcaggactagtgcgactaccactgccagcatcaacgtcaggactagtgcgactaccactgaaagtaccaactccaacactaatgctactaccactgaaagtaccaactccagcactaatgctactaccactgctagcaccaactccagcactaatgctactaccactgaaagtaccaacgctagtgccaaggaggacgccaataaagatggcaatgctgaggataatagattccatccagtcaccgacattaacaaagagccgtataagcggaaagggagtcaaatggttttgctagagagaaagaaactgaaagcacaatttcccaatacttccgagaatatgaatgtcttacagtttcttggatttcggtctgacgaaattaaacatcttttcctctatggtattgacatatacttctgcccagagggcgtattcacacaatacggattatgcaagggctgtcaaaagatgttcgagctctgtgtctgttgggctggccagaaagtatcgtatcggaggatggcttgggaagcactagctgtggagagaatgctgcgaaatgacgaggaatacaaagaatacttggaagacatcgagccatatcatggggaccctgtagggtatttgaaattttttagcgtaaaaaggagagagatctactctcagatacagagaaattatgcttggtacctggccattactagaagaagagaaacaattagtgtattggattcgacaagaggcaagcaagggagccaagttttccgcatgtctggaaggcagatcaaagagttgtattataaagtatggagcaacttgcgtgaatcgaagacagaggtgctgcagtactttttgaactgggacgagaaaaagtgccaggaagaatgggaggcaaaagacgatacggtctttgtggaagcgctcgagaaagttggagtttttcagcgtttgcgttccatgacgagcgctggactgcagggtccgcagtacgtcaagctgcagtttagcaggcatcatcgacagttgaggagcagatatgaattaagtctaggaatgcacttgcgagatcagcttgcgctgggagttaccccatctaaagtgccgcattggacggcattcctgtcgatgctgatagggctgttctacaataaaacatttcggcagaaactggaatatcttttggagcagatttcggaggtgtggttgttaccacattggcttgatttggcaaacgttgaagttctcgctgcagataacacgagggtaccgctgtacatgctgatggtagcggttcacaaagagctggatagcgatgatgttccagacggtagatttgatataatattactatgtagagattcgagcagagaagttggagagtga

SEQ ID NO: 4716 - DNA, 2094 bp, Artificial Sequence
  Description of Artificial Sequence: Synthetic polynucleotide
atggcagacacaccctctgtggcagtacaggccccaccgggctatggtaagacggagttatttcatctccccttgatagcattagcgtctaagggcgacgtggaatatgtgtcctttttgtttgtaccgtacacagtgttgcttgctaattgcatgatcaggttgggccgttgcggttgcttgaatgtggcccctgtaagaaactttattgaagaaggttgcgatggcgttactgatttatacgtggggatctacgatgatcttgctagcactaatttcacagacaggatagctgcgtgggagaatattgttgagtgcacctttaggaccaacaacgtaaaattgggttacctcattgtagatgagttgcacaactttgaaacggaggtctacagacagtctcaatttgggggcataactaaccttgattttgacgcttttgagaaagcaatctttttgagcggcacagcccctgaggctgttgctgatgctgcgttgcagcgtattgggcttacgggattggccaagaagtctatggacatcaacgagctcaaaagaagtgaagatctcagcagaggtttatccagctatccaacaagaatgtttaatttgatcaaggagaaatccaaggtgcctttaggcactaatgctactaccactgccagcaccaacgtcaggactagtgctactactactgccagcatcaacgtcaggactagtgcgactaccactgccagcatcaacgtcaggactagtgcgactaccactgaaagtaccaactccaacactaatgctactaccactgaaagtaccaactccagcactaatgctactaccactgctagcaccaactccagcactaatgctactaccactgaaagtaccaacgctagtgccaaggaggacgccaataaagatggcaatgctgaggataatagattccatccagtcaccgacattaacaaagagccgtataagagaaaagggagtcaaatggttttgttggagagaaagaaattgaaagcacaatttcccaatacttccgagaatatgaatgtcttacagtttcttggatttagatctgacgaaattaaacatcttttcctctatggtattgacatatacttctgcccagagggcgtattcacacaatacggattatgcaagggctgtcaaaagatgttcgagctctgtgtctgttgggctggccagaaagtatcttatagaaggatggcttgggaagcattggctgtggagagaatgttaagaaatgacgaggaatacaaagaatacttggaagacatcgagccatatcatggggaccctgtagggtatttgaaattttttagcgtaaaaaggagagagatctactctcagatacagagaaattatgcttggtacttggccattactagaagaagagaaacaattagtgtattggattctacaagaggcaagcaagggagccaagttttccgcatgtctggaaggcagatcaaagagttgtattataaagtatggagcaacttgcgtgaatccaagacagaggtgttacagtactttttgaactgggacgagaaaaagtgccaggaagaatgggaggcaaaagacgatacggtctttgtggaagcgctcgagaaagttggagtttttcagcgtttgcgttccatgacgagcgctggattacagggtccgcagtacgtcaagttacagtttagcaggcatcatagacagttgaggagcagatatgaattaagtttgggaatgcacttgagagatcagcttgcgttgggagttaccccatctaaagtgccgcattggacggcattcttgtccatgttgatagggcttttctacaataaaacatttagacagaaattagaatatcttttggagcagatttctgaggtgtggttgttaccacattggcttgatttggcaaacgttgaagttctcgctgcagataacacgagggtaccgttgtacatgttaatggtagcggttcacaaagagttagatagcgatgatgttccagacggtagatttgatataatattattatgtagagattctagcagagaagttggagagtga

SEQ ID NO: 4717 - DNA, 816 bp, Saccharomyces cerevisiae
atgaaagtttccgataggcgtaagtttgaaaaagcaaactttgacgagtttgagtcggctctaaataacaaaaacgacttggtacattgtccctcaataactttatttgaatcgatccccacggaagtgcggtcattctacgaagacgaaaagtctggcctaatcaaagtggtaaaattcagaactggtgcaatggataggaaaaggtcttttgaaaaaattgtcgtttccgtcatggtcgggaaaaatgtacaaaagttcctgacgtttgttgaagacgaaccagatttccagggcggaccaatcccttcaaagtatcttattcccaagaaaatcaacttgatggtctacacgttgtttcaagtgcatactttgaaattcaatagaaaggattacgataccctttctcttttttacctcaacagaggatactataatgagttgagtttccgtgtcctggaacgttgtcacgaaatagcgagtgccaggccgaacgacagctctacgatgcgtactttcactgactttgtttctggcgcacctattgtaaggagtcttcagaaaagcaccataaggaaatatgggtacaatttggcaccccacatgtttttgttactacacgtagatgagctatcgattttttctgcataccaagcaagtttacctggcgaaaagaaagtcgacacagagcggctgaagcgtgatctatgcccacgtaaacccactgagataaagtacttttcacagatatgtaacgatatgatgaacaaaaaggaccgattgggtgatgttttgcatgtgtgctgcccaagttga

SEQ ID NO: 4718 - DNA, 816 bp, Artificial Sequence
  Description of Artificial Sequence: Synthetic polynucleotide
atgaaagtttccgataggcgtaagtttgaaaaagcaaactttgacgagtttgagtctgctttgaataacaaaaacgacttggtacattgtccctccataactttatttgaaagtatccccacggaagtgagatctttctacgaagacgaaaagtctggcttaatcaaagtggtaaaattcagaactggtgcaatggataggaaaaggtcttttgaaaaaattgtcgtttccgtcatggtcgggaaaaatgtacaaaagttcttgacgtttgttgaagacgaaccagatttccagggcggaccaatcccttctaagtatcttattcccaagaaaatcaacttgatggtctacacgttgtttcaagtgcatactttgaaattcaatagaaaggattacgataccctttctcttttttacctcaacagaggatactataatgagttgagtttccgtgtcttggaacgttgtcacgaaatagcgagtgccaggccgaacgacagctctacgatgcgtactttcactgactttgtttctggcgcacctattgtaaggagtcttcagaaaagcaccataaggaaatatgggtacaatttggcaccccacatgtttttgttattacacgtagatgagttatccattttttctgcataccaagcaagtttacctggcgaaaagaaagtcgacacagagaggttaaagcgtgatttatgcccacgtaaacccactgagataaagtacttttcccagatatgtaacgatatgatgaacaaaaaggacagattgggtgatgttttgcatgtgtgctgcccaagttga

SEQ ID NO: 4719 - DNA, 135 bp, Saccharomyces cerevisiae
atgcatgacatctgggtaatcaccacttctcccgcttgctttgagattctgtataaatattgcaaacaaaagggtagagcacggatgggaggccttatagtaaaaattattcgttttaatcatgcgtcagtgtga

SEQ ID NO: 4720 - DNA, 135 bp, Artificial Sequence
  Description of Artificial Sequence: Synthetic polynucleotide
atgcatgacatctgggtaatcaccacttctcccgcttgctttgagattctttataaatattgcaaacaaaagggtagagcaagaatgggaggccttatagtaaaaattattcgttttaatcatgcgtctgtgtga

SEQ ID NO: 4721 - DNA, 1146 bp, Saccharomyces cerevisiae
atgaaagagaatgaagtcaaagatgagaaaagcgtagatgtgttatccttcaaacagctcgaattccaaaagaccgttctacctcaagatgttttccgaaacgaattgacctggttttgttatgaaatttacaagtctttagcgtttcgcatctggatgctgttatggctaccacttagcgtctggtggaaactttccagcaattggattcacccacttatagtttcacttcttgtcctgttcctgggaccattttttgtccttgttatttgtggactttctcgtaagcgttccttatcgaaacaactcattcagttttgcaaagagattactgaagacacaccaagttcggatcctcatgattgggaagtcgttgcagcaaatctaaattcgtacttctatgaaaataagacttggaataccaagtacttttttttcaatgccatgagctgccaaaaagcgtttaaaacaacccttctcgaacccttctctttaaaaaaagacgaatctgcaaaggttaagtcatttaaggattccgttccttatatcgaagaggccttgcaagtgtatgctgcaggatttgacaaagagtggaagctgtttaatactgagaaggaagagagtcctttcgacctggaagacattcagctccccaaagaagcttaccgatttaagcttacctggattcttaaaaggattttcaacctgcggtgtttaccactcttcctttattattttttaattgtctacacgtctggaaatgctgaccttatatcacgtttcttgtttccggtagtaatgttttttatcatgacgagagatttccaaaatatgaggatgattgttttatccgtgaaaatggaacacaagatgcagttcttgtcaactattataaatgagcaagaaagtggtgcgaatggatgggacgaaattgcaaagaaaatgaataggtatttgtttgagaaaaaagtctggaataatgaagagtttttctacgatggacttgactgcgaatggttttttaggcgctttttctatcgtctcttatctttaaaaaaacctatgtggtttgcttcgttgaacgttgagctatggccatacattaaagaagcgcaatcggcccgcaatgagaagcccctaaagtag

SEQ ID NO: 4722 - DNA, 1146 bp, Artificial Sequence
  Description of Artificial Sequence: Synthetic polynucleotide
atgaaagagaatgaagtcaaagatgagaaaagcgtagatgtgttatccttcaaacagctcgaattccaaaagaccgttttacctcaagatgttttcagaaacgaattgacctggttttgttatgaaatttacaagtctttagcgtttcgcatctggatgcttttatggttaccacttagcgtctggtggaaactttccagcaattggattcacccacttatagtttcccttcttgtccttttcttgggaccattttttgtccttgttatttgtggactttctcgtaagcgttccttatccaaacaactcattcagttttgcaaagagattactgaagacacaccaagttctgatcctcatgattgggaagtcgttgcagcaaatttgaattcttacttctatgaaaataagacttggaataccaagtacttttttttcaatgccatgagctgccaaaaagcgtttaaaacaacccttctcgaacccttctctttaaaaaaagacgaatctgcaaaggttaagagctttaaggattccgttccttatatcgaagaggccttgcaagtgtatgctgcaggatttgacaaagagtggaagttatttaatactgagaaggaagagagtcctttcgacttggaagacattcagctccccaaagaagcttacagatttaagcttacctggattcttaaaaggattttcaacttgagatgtttaccactcttcctttattattttttaattgtctacacgtctggaaatgctgaccttatatctcgtttcttgtttccggtagtaatgttttttatcatgacgagagatttccaaaatatgaggatgattgttttatccgtgaaaatggaacacaagatgcagttcttgtctactattataaatgagcaagaaagtggtgcgaatggatgggacgaaattgcaaagaaaatgaataggtatttgtttgagaaaaaagtctggaataatgaagagtttttctacgatggacttgactgcgaatggttttttaggcgctttttctatcgtctcttatctttaaaaaaacctatgtggtttgcttctttgaacgttgagttatggccatacattaaagaagcgcaatctgcccgcaatgagaagcccttgaagtga

SEQ ID NO: 4723 - DNA, 1863 bp, Saccharomyces cerevisiae
atgatcgaagtcccagaagacaatcgttctagccaaacaaagcgtaagaatactgaaaaaaattgtaatgaactgatggttgatgaaaagatggatgacgattcgtcgcccagagatgaaatgaaagataaattaaagggaacaaaatcattgattattcgtaagtctgagctaatggctaaaaagtatgatacttggcaattaaaagctatattcctgttttctgcattcatttgcactttcgcttatggattagatagcagcataaggggtacatatatgacctacgcaatgaactcgtactccgcacattctctcatttctacagtaagcgtcatagttctaatgatatctgctgtttcacaggtgatctttggagggttatcagatatctttggaaggctaacgttgtttcttgtatccattgtactttacattgtgggtacaataattcaatctcaagcatatgatgtccagaggtatgctgctggagctgtcttttattatgtgggacttgtcggtgttatgctacaggttgttttgatgttgtctgataattcttcattaaaatggaggctattttacacattgataccttcatggccctcgattatcactacgtgggtctcaggtagtgtagtggaggcagcaaacccgttagagaactggtcgtggaatattgctatgtgggcgttcattttccctctatgctgtatcccattgattttgtgtatgctccatatgagatggaaagtaagaaatgacgtggaatggaaagaattacaggatgaaaaatcgtactatcaaacgcacggattagtacaaatgctggtacagttgttctggaagctagatgttgtcggtgtgttgttgtttactgctggtgttggttgtattcttgtaccactcactcttgctggtggcgtctctacaaattggagaaattcaaagattatcgggccctttgtgcttggctttgtcctggttccaggcttcatatattgggaaagtcgacttgctttggttcctttcgctccattcaagctgctaaaagatcgtggcgtgtgggccccattgggaattatgttttttatctgctttgtatatcaaatggctgctgggtatctctacaccattctagtagttgcggtagatgagagcgcttcctcagctacaagaataataaacttatactcttttgtgactgctgttgttgctccatttctggggctcatcgttacgagatcatctagattgaagtcgtatattatttttggtggctcactttatttcattactatgggactattttaccgctacaggtcaggtcaagacgccgatggaggtataattgctggtatggttatttggggtctcagtagttgtttattcgattatcctacaattgtttctattcagtcggtaacatcccatgagaatatggctactgtcacagcattaaactatacagttttcagaataggtggagcagttgcagctgccatttccggtgccatatggacgcagtcattgtaccctaaattattgcactacatgggagacgctgacctggctacagcagcatatggctcaccactaacttttattctttccaatccctggggtactccagttaggtctgcgatggttgaagcttacagacacgttcaaaaatacgaagttattgttgcgcttgtattttcagcgcctatgttccttctaacattctgcgtaagagatcctcggttgactgaagattttgcccaaaagttacctgacagagaatatgtccaaaccaaggaagatgatcctatcaatgactggatcgcgaaacgttttgcaaaggccttaggcaggtcataa

SEQ ID NO: 4724 - DNA, 1863 bp, Artificial Sequence
  Description of Artificial Sequence: Synthetic polynucleotide
atgatcgaagtcccagaagacaatcgttctagccaaacaaagcgtaagaatactgaaaaaaattgtaatgaattgatggttgatgaaaagatggatgacgattcttctcccagagatgaaatgaaagataaattaaagggaacaaaatctttgattattcgtaagtctgagttgatggctaaaaagtatgatacttggcaattaaaagctatattcttattttctgcattcatttgcactttcgcttatggattagatagcagcataaggggtacatatatgacctacgcaatgaactcttactccgcacattctctcatttctacagtaagcgtcatagttttgatgatatctgctgtttctcaggtgatctttggagggttaagtgatatctttggaaggttgacgttgtttcttgtatccattgtactttacattgtgggtacaataattcaatctcaagcatatgatgtccagaggtatgctgctggagctgtcttttattatgtgggacttgtcggtgttatgttacaggttgttttgatgttgtctgataattcttctttaaaatggaggttattttacacattgataccttcctggccctctattatcactacgtgggtctctggtagtgtagtggaggcagcaaacccgttagagaactggtcctggaatattgctatgtgggcgttcattttccctttatgctgtatcccattgattttgtgtatgctccatatgagatggaaagtaagaaatgacgtggaatggaaagaattacaggatgaaaaatcttactatcaaacgcacggattagtacaaatgttggtacagttgttctggaagttggatgttgtcggtgtgttgttgtttactgctggtgttggttgtattcttgtaccactcactcttgctggtggcgtctctacaaattggagaaattctaagattatcgggccctttgtgcttggctttgtcttggttccaggcttcatatattgggaaagtagacttgctttggttcctttcgctccattcaagttattgaaagatcgtggcgtgtgggccccattgggaattatgttttttatctgctttgtatatcaaatggctgctgggtatctctacaccattttagtagttgcggtagatgagagcgcttcctctgctacaagaataataaacttatactcttttgtgactgctgttgttgctccatttttggggctcatcgttacgagatcttctagattgaagagttatattatttttggtggctctctttatttcattactatgggattattttaccgctacaggtctggtcaagacgccgatggaggtataattgctggtatggttatttggggtctcagtagttgtttattcgattatcctacaattgtttctattcagtctgtaacatcccatgagaatatggctactgtcacagcattaaactatacagttttcagaataggtggagcagttgcagctgccatttccggtgccatatggacgcagtctttgtaccctaaattattgcactacatgggagacgctgacttggctacagcagcatatggctctccattgacttttattctttccaatccctggggtactccagttaggtctgcgatggttgaagcttacagacacgttcaaaaatacgaagttattgttgcgcttgtattttctgcgcctatgttccttttaacattctgcgtaagagatcctagattgactgaagattttgcccaaaagttacctgacagagaatatgtccaaaccaaggaagatgatcctatcaatgactggatcgcgaaacgttttgcaaaggccttaggcaggtcttga

SEQ ID NO: 4725 - DNA, 363 bp, Saccharomyces cerevisiae
atggtcaaactaacttcaatcgccgctggtgtcgctgccatcgctgctactgcttccgcaaccaccactctagctcaatctgacgaaagagtcaacttggttgaattgggtgtctacgtctctgatatcagagctcacttggcccaatactacatgttccaagccgcccacccaactgaaacctacccggttgaagttgctgaagccgttttcaactacggtgacttcaccaccatgttgactggtattgccccagaccaagtgaccagaatgatcaccggtgttccatggtactccagcagattaaagccagccatctccagtgctctatccaaggacggtatctacactatcacaaactag

SEQ ID NO: 4726 - DNA, 363 bp, Artificial Sequence
  Description of Artificial Sequence: Synthetic polynucleotide
atggtcaaattaacttctatcgccgctggtgtcgctgccatcgctgctactgcttccgcaaccaccactttggctcaatctgacgaaagagtcaacttggttgaattgggtgtctacgtctctgatatcagagctcacttggcccaatactacatgttccaagccgcccacccaactgaaacctacccggttgaagttgctgaagccgttttcaactacggtgacttcaccaccatgttgactggtattgccccagaccaagtgaccagaatgatcaccggtgttccatggtactccagcagattaaagccagccatctccagtgctttgtccaaggacggtatctacactatcacaaactga

SEQ ID NO: 4727 - DNA, 708 bp, Saccharomyces cerevisiae
atgagttcagaattattaatatctaattctaaaccaagaccagaaggattaagaaaattatgcgaaggtgagacagtgatccttccaagggacataacccccagcaaatgcgcttatttcttaaaacagaatatcgtattcatttcatatattttcatccatattattattaccataatcttaaaccgcctggcattatctgcacacggtaatactttgattattatcttagcggctttactaattacaatttcactattccttttactcctcttaccttacttaagctgctcaagatataagttaagatgtttagatgatgattgtaagttcaaactattagcggaagtcattacacataaacctaacatggacttgagcacatgggaccggattgcatatgacatgaaccaatttgtatatgaccgtcgtatatgtgcagatagatcttttttctacgatggcagttattgctatcaggtttttaaaaagttggtggctaccccgtaccttgtgaattccaatatgaatagtatatatgctgatctggagatgagaagtaatggagcaaccaacattaacgattctggtaatagttcattacacatcgaattgggcacttatatttttaaagcattggccgttttcaggaactctgttgacaagtactgggaggataagtatccagagatgggggtcacagtttga

SEQ ID NO: 4728 - DNA, 708 bp, Artificial Sequence
  Description of Artificial Sequence: Synthetic polynucleotide
atgagttctgaattattaatatctaattctaaaccaagaccagaaggattaagaaaattatgcgaaggtgagacagtgatccttccaagggacataacccccagcaaatgcgcttatttcttaaaacagaatatcgtattcatttcttatattttcatccatattattattaccataatcttaaaccgcttggcattatctgcacacggtaatactttgattattatcttagcggctttattgattacaatttctttattccttttactcctcttaccttacttaagctgctctagatataagttaagatgtttagatgatgattgtaagttcaaattattagcggaagtcattacacataaacctaacatggacttgagcacatgggacagaattgcatatgacatgaaccaatttgtatatgaccgtcgtatatgtgcagatagatcttttttctacgatggcagttattgctatcaggtttttaaaaagttggtggctaccccgtaccttgtgaattccaatatgaatagtatatatgctgatttagagatgagaagtaatggagcaaccaacattaacgattctggtaatagttctttacacatcgaattgggcacttatatttttaaagcattggccgttttcaggaactctgttgacaagtactgggaggataagtatccagagatgggggtcacagtttga

SEQ ID NO: 4729 - DNA, 513 bp, Saccharomyces cerevisiae
atggagggccgcaaaagtgaagatgaaaagaacgaagccgctttagcctgtgatgtctttgaatcctccaatgccaaactaccaaagaatgtattcagaagttcctttacttggtattgctatgaagttatcaataggtcagcattccatatttggttattgttatgtttaacgctcattgttggttggaaggttttttcaggcatcggtggtagaagaccatctgactcaaacatggacggcccccaaaccaaacataaacggaatccaggttttttgaggcgtcattcgaccatcgttatcttagttatatctttagcagtgtctttctcatgggaagctttcaaaatgtatcgtgaacgcaccttcgggaaacaaatcactcagtttgccaaagaaattattaaaagtgcgccaagcacagatatggaaagctgggaccgtgttgcagcggattttaactcttatatgtacgaaaataaactttggaacacagaatactttttttgttga

SEQ ID NO: 4730 - DNA, 513 bp, Artificial Sequence
  Description of Artificial Sequence: Synthetic polynucleotide
atggagggccgcaaaagtgaagatgaaaagaacgaagccgctttagcctgtgatgtctttgaatcctccaatgccaaattaccaaagaatgtattcagaagttcctttacttggtattgctatgaagttatcaataggtctgcattccatatttggttattgttatgtttaacgctcattgttggttggaaggttttttctggcatcggtggtagaagaccatctgactccaacatggacggcccccaaaccaaacataaaagaaatccaggttttttgaggcgtcattctaccatcgttatcttagttatatctttagcagtgtctttcagttgggaagctttcaaaatgtatcgtgaacgcaccttcgggaaacaaatcactcagtttgccaaagaaattattaaaagtgcgccaagcacagatatggaaagctgggaccgtgttgcagcggattttaactcttatatgtacgaaaataaactttggaacacagaatactttttttgttga

SEQ ID NO: 4731 - DNA, 453 bp, Saccharomyces cerevisiae
atgaaacagcgtttttctcaagtagcaactgttatattcttcgtcatgagtatccgttctccaagaaatctcggctttttttttactcttgccctttttgtcgtacttgtttgctcccaggaatggttctcctttgaaatgaatagatcttgttcaatgaaagtggaacatagaatgcaatttttgtcaactataatcagtgaacatcagaaatcggatgtgaattgttgggaccaaatcgcaaagaagatgaatgtatacttatttgagcagaaagtttccggctcagacgtgtttttcttagatggagcagattgtgagcgctttttcgaacgtaatttcctccgttatctaccctcaagaaagtcttcccatcctgacctaccaattgctgaattgttgccgtatatcagaaaagccgacattgcctgtgctggtaagcaattgatttaa

SEQ ID NO: 4732 - DNA, 453 bp, Artificial Sequence
  Description of Artificial Sequence: Synthetic polynucleotide
atgaaacagcgtttttctcaagtagcaactgttatattcttcgtcatgagtatccgttctccaagaaatctcggctttttttttactcttgccctttttgtcgtacttgtttgctcccaggaatggttctcctttgaaatgaatagatcttgttccatgaaagtggaacatagaatgcaatttttgtctactataatcagtgaacatcagaaatctgatgtgaattgttgggaccaaatcgcaaagaagatgaatgtatacttatttgagcagaaagtttccggctctgacgtgtttttcttagatggagcagattgtgagcgctttttcgaacgtaatttcctccgttatttacccagtagaaagtcttcccatcctgacttaccaattgctgaattgttgccgtatatcagaaaagccgacattgcctgtgctggtaagcaattgatttga

SEQ ID NO: 4733 - DNA, 450 bp, Saccharomyces cerevisiae
atgcatttgtatagcatagccaagtcaacaacaatactgcgttttctaaggcatattttattgccatttttgcatctctctattcattttactagttgcttgtgcagaataatctatgttggctggaaaagtttttggaaacatttttttttttgcgggcataaaataaaaactccgctgttcatcgcttcctacgcaatgttcttagccaagcaaaaaattatagttacaatgtttgaggtttcttccgttctagagaaactgccgcagaatattttactgtttcactaccctcttccttccaaaatgggaaataatttattaatgtcgttcttaacacaaagatcgatcgatgaaaaggaaattgatgcattattacatcctaatgcggtctatcgtttctgcaatatgagaaccacattcagaacattatcctcatatggcaaataa

SEQ ID NO: 4734 - DNA, 450 bp, Artificial Sequence
  Description of Artificial Sequence: Synthetic polynucleotide
atgcatttgtatagcatagccaagagtacaacaatattacgttttttaaggcatattttattgccatttttgcatctctctattcattttactagttgcttgtgcagaataatctatgttggctggaaaagtttttggaaacatttttttttttgcgggcataaaataaaaactccgcttttcatcgcttcctacgcaatgttcttagccaagcaaaaaattatagttacaatgtttgaggtttcttccgttttggagaaattaccgcagaatattttactttttcactaccctcttccttccaaaatgggaaataatttattaatgagtttcttaacacaaagatctatcgatgaaaaggaaattgatgcattattacatcctaatgcggtctatcgtttctgcaatatgagaaccacattcagaacattatccagctatggcaaatga

SEQ ID NO: 4735 - DNA, 1884 bp, Saccharomyces cerevisiae
atggagtctgttcactctcgcgatcctgttaaggaggaaaagaaacatgtcttcatgggaatggaacacgagttgaatcctgagactcataacgattccaactccgactcatatggtctccctcagttatctgaaaaatacaatgccttgagacagaacaggagcctaattatccagcagactgaaatcattggctctgcttacaataaatggtacttacaagcgattttacttttgagtgctttcatatgtggctacggttatggactggacggtaacatccgttatatttacactggttacgccacatcatcctatagtgagcattctctgctgtctacaatcaacgtcattaatgctgtggtcagtgccgcttcgcaaatcatatacgctaggttgtctgatgtgtttggtagactataccttttcattagtgctgtcatcctatatgttgtgggtacaattattcaatcacaagcttatgatgttcaaagatacgctgcaggtgccattttctacaatgctggctatgtgggtgtaatccttattcttttgattatcctatccgatttttcatctttaaagtggagactgctgtatcaatttgtcccgacttggccttttatcatcaacacatggattgctggtaatatcacttccagagccaatcctgttgtcaactggtcttgggatgtaggtatgtgggctttcatctttcccctatcatgtgttccaatcgttttgtgtatgttgcacatgcaatggagggccagaaagactcctgaatggcacgctttgaagggccagaagtcctattatcaagaacatggttttattaagatcttaaagcaattattttggatgttagatgtcgttggtgtccttttgatgggttgttccctaggttgtatcttggtcccactgaccttggctggtggggtcaaaactacctggaatgattcaagattgatcggcccctttgttcttggctttgttttgatccctatcttatggatttgggaatatcgattcgctagagatccaattcttccatataggctggtcaaagatagggctgtatggtcttctatgggtatttctttcctgattgattttatttactatatggccgctgattatttgtacacggttatgattgttgccgtcaatgaatccgttaaatctgcaaccagaattgccacattatcttcatttgtctctactgtggcctctccatttttcgctttacttgtaacaagatgtacgagattgaaaccattcataatgtttggatgcgcgctatggatggtggctatgggtttattgtaccactttagaggtggaagtcagtcccattcaggtattattggtgcattatgtgtctggggtgtgggcactactttgttcacttacccagttaccgtctctgtacaatctgccgtctctcatgaaaacatggcgacagttacagctttaaactataccctctatagaattggttctgctgtcggttccgcagtttccggtgccatttggactcagactttgtacaaacaaattttgaagagaatgggtgatgttgctctagccacaactgcctacgaatctccatatactttcattgaaacctatacttggggtaccccacaaaggaatgccttaatgaacgcttacaaatacgttcaaagattggaaactatcgtggctttagtattttgtgttccattaattgcattctccttatgtctaagggatcctaaattgactgatactgttgctgtggaatacatcgaggatggcgaatatgtcgacacgaaagacaatgatccaattttggattggtttgaaaaacttccatcaaaattcacttttaaacgggaataa

SEQ ID NO: 4736 - DNA, 1884 bp, Artificial Sequence
  Description of Artificial Sequence: Synthetic polynucleotide
atggagtctgttcactctcgcgatcctgttaaggaggaaaagaaacatgtcttcatgggaatggaacacgagttgaatcctgagactcataacgattccaactccgactcttatggtctccctcagttatctgaaaaatacaatgccttgagacagaacaggagcttaattatccagcagactgaaatcattggctctgcttacaataaatggtacttacaagcgattttacttttgagtgctttcatatgtggctacggttatggattggacggtaacatccgttatatttacactggttacgccacatcttcctatagtgagcattctttattatctacaatcaacgtcattaatgctgtggtcagtgccgcttctcaaatcatatacgctaggttgtctgatgtgtttggtagattataccttttcattagtgctgtcatcttatatgttgtgggtacaattattcaatctcaagcttatgatgttcaaagatacgctgcaggtgccattttctacaatgctggctatgtgggtgtaatccttattcttttgattatcttgtccgatttttcttctttaaagtggagattattatatcaatttgtcccgacttggccttttatcatcaacacatggattgctggtaatatcacttccagagccaatcctgttgtcaactggtcttgggatgtaggtatgtgggctttcatctttcccttaagttgtgttccaatcgttttgtgtatgttgcacatgcaatggagggccagaaagactcctgaatggcacgctttgaagggccagaagtcctattatcaagaacatggttttattaagatcttaaagcaattattttggatgttagatgtcgttggtgtccttttgatgggttgttccttgggttgtatcttggtcccattgaccttggctggtggggtcaaaactacctggaatgattccagattgatcggcccctttgttcttggctttgttttgatccctatcttatggatttgggaatatagattcgctagagatccaattcttccatataggttggtcaaagatagggctgtatggtcttctatgggtatttctttcttgattgattttatttactatatggccgctgattatttgtacacggttatgattgttgccgtcaatgaatccgttaaatctgcaaccagaattgccacattatcttcttttgtctctactgtggcctctccatttttcgctttacttgtaacaagatgtacgagattgaaaccattcataatgtttggatgcgcgctttggatggtggctatgggtttattgtaccactttagaggtggaagtcagtcccattctggtattattggtgcattatgtgtctggggtgtgggcactactttgttcacttacccagttaccgtctctgtacaatctgccgtctctcatgaaaacatggcgacagttacagctttaaactataccctctatagaattggttctgctgtcggttccgcagtttccggtgccatttggactcagactttgtacaaacaaattttgaagagaatgggtgatgttgctttggccacaactgcctacgaatctccatatactttcattgaaacctatacttggggtaccccacaaaggaatgccttaatgaacgcttacaaatacgttcaaagattggaaactatcgtggctttagtattttgtgttccattaattgcattctccttatgtttgagggatcctaaattgactgatactgttgctgtggaatacatcgaggatggcgaatatgtcgacacgaaagacaatgatccaattttggattggtttgaaaaacttccatctaaattcacttttaaaagagaatga

SEQ ID NO: 4737 - DNA, 1758 bp, Saccharomyces cerevisiae
atgatcacccaaactgagctagataactgcttacaatgggctcaaaataatggagccttcatcgatccgaaaatctcttttaggattacagaggatgctggtgttagtgcatttgtaaacgaaaaattctctcccaaacccgaccaagctttgattagggtacccgaaactctgctgatcacttcccagcaagctttatcagaattttcccaggctgctaatgaaaggagtcttttgaattccgtgacacagttgtacttgtcaaagttgaaatttggcaccgatgcagttcacctgaaatccttttacaaaccatatttagatgtgctacccttgcaccttccacaaccatatttttggtctactgatgaagtcatgaatttgcatggtacagacgtgtacttaactatgagagatacgctgaacaaactagtaaaggagtggaggatgctgttccaagctttatctattgaacactcttctcaagataagcagttcttgtctttattccaggagaataaagactctgccgtagtgccgttggaacagttctgcgcacacatcaatggatgtaaactagaagattcggaatggaactcgttcgtggcgtatctttggtcgtactgcatctttaattctagggcatttcctcgtgtcattttaggcagggccggtacagaccgcaccaatctgaacgaaggatttttgtatccaatagtagatttattaaaccataaaaacgatgtaccagtaagatgggagatgaatgaacaaaatgaactttgtttcatgtcgcagactaccacatttagtgcacaggatgaattgtttaataattatggtaatatttctaatgaaaaatgtttgttaaactacgggttttgggattcctcgaataagtttgacttctctaggttgactttaaagctaccatccaccttagttagcggtttgcccgtggattttaacaaatcaggtaattttgttactgacgatggagaaactaccattttacaatttagtttaaaaatttctgaaccattaccaccggttctactagcgttatttgcctacctaagtaaattaaagtctgaagaaactccaaccgtaaggagcgtattggaaggtattgatcaattaacatctgtagtatcccagagattgctgttttataagaattttaaaattaaaacttcttcgactcaaaaattacgccctcatgttattaaactaatcaaactatactatcaagataacaaaaaaattctgaacgccactactgagaaattgtccgttttacaaaaaaaaatatatagcaataataaggagttttctctgtcattcaagacaatttttaaaaacgacaaaatatttgccaattctctcttactggtatttggtgctataaattacgaagatttgatcacaaaagactgtcttaatgacgcattgttgctctggatagtcaaattaatcaacgataaaagtaataatcagggaggtttcattaaacaaaccttcaaagaagttagtgattcaattgtcattgaaaaagaagatgttatggagtttttgccgttctataaaaaatacttccctaatttatcggagagaattccagaaatttatagtgtcggtgattggggcataagacagttcattgtggcagatactgcgattgatagattggtttggatcaggaaatcaaataaagagcctatatttctaatgaagaaggcatacgacttacagatttag

SEQ ID NO: 4738 - DNA, 1758 bp, Artificial Sequence
  Description of Artificial Sequence: Synthetic polynucleotide
atgatcacccaaactgagttagataactgcttacaatgggctcaaaataatggagccttcatcgatccgaaaatctcttttaggattacagaggatgctggtgttagtgcatttgtaaacgaaaaattctctcccaaacccgaccaagctttgattagggtacccgaaactttattgatcacttcccagcaagctttatctgaattttcccaggctgctaatgaaaggagtcttttgaattccgtgacacagttgtacttgtccaagttgaaatttggcaccgatgcagttcacttgaaatccttttacaaaccatatttagatgtgttacccttgcaccttccacaaccatatttttggtctactgatgaagtcatgaatttgcatggtacagacgtgtacttaactatgagagatacgttgaacaaattagtaaaggagtggaggatgcttttccaagctttatctattgaacactcttctcaagataagcagttcttgtctttattccaggagaataaagactctgccgtagtgccgttggaacagttctgcgcacacatcaatggatgtaaattagaagattctgaatggaactctttcgtggcgtatctttggagttactgcatctttaattctagggcatttcctcgtgtcattttaggcagggccggtacagaccgcaccaatttgaacgaaggatttttgtatccaatagtagatttattaaaccataaaaacgatgtaccagtaagatgggagatgaatgaacaaaatgaactttgtttcatgtctcagactaccacatttagtgcacaggatgaattgtttaataattatggtaatatttctaatgaaaaatgtttgttaaactacgggttttgggattcctctaataagtttgacttctctaggttgactttaaagttaccatccaccttagttagcggtttgcccgtggattttaacaaatctggtaattttgttactgacgatggagaaactaccattttacaatttagtttaaaaatttctgaaccattaccaccggttttgttagcgttatttgcctacttgagtaaattaaagtctgaagaaactccaaccgtaaggagcgtattggaaggtattgatcaattaacatctgtagtatcccagagattgttattttataagaattttaaaattaaaacttcttctactcaaaaattacgccctcatgttattaaattaatcaaactttactatcaagataacaaaaaaattttgaacgccactactgagaaattgtccgttttacaaaaaaaaatatatagcaataataaggagttttctttatctttcaagacaatttttaaaaacgacaaaatatttgccaattctctcttattggtatttggtgctataaattacgaagatttgatcacaaaagactgtcttaatgacgcattgttgctctggatagtcaaattaatcaacgataaaagtaataatcagggaggtttcattaaacaaaccttcaaagaagttagtgattctattgtcattgaaaaagaagatgttatggagtttttgccgttctataaaaaatacttccctaatttatctgagagaattccagaaatttatagtgtcggtgattggggcataagacagttcattgtggcagatactgcgattgatagattggtttggatcaggaaatctaataaagagcctatatttttgatgaagaaggcatacgacttacagatttga

SEQ ID NO: 4739 - DNA, 1893 bp, Saccharomyces cerevisiae
atggtgaattggcaaacattgttcatggtctcattgaggagacagggcagttcctctcgttacaggtataagttcaacatggagaatatcacacatcaggtgttccctcgctgtaagcaagcgtttaagaagacaaacttatcttatgaatattgtgatcttgaaggagtactgtataatatttcactcacggacttgcaaaaactgctattacgtgatataaacgcccctcgcgaacacgcattcaagattgttagaacagatctaactcaaaaatcctcgaagaagaggatccaacactgggaacggattgcgcctatgtttgaccaccccttaagtctctacgagaagttgttcagcgaaatggatgaggacttcaagccatctttcgagtggcaacaattaataagggtacgatgcaaagatgataagttgaaactgcagcgtgtaatttggcctaagtcgatattttcaaacttttgtcggggaatcggggttaagaagagcacttacgatagactcttggaacaaaataatggtgaggtacccatgtttgtaaacccagctaatgcaaagcccttgcctcttttccaggtttccgatgaggcgatgattggggaattcgatggaattggtattttcccttactttgtagataaacatagagaatttttcgttactgaggtagacaaattgaagaccaagatagcttcgccactttgcaccttgaatgaacgaaagcgcattgagaaggctaacgctggtcggatactggcgaacgaagagggtaaaccattctatctggatgcaaacagtgccacaactcgaatcgctggtggtaatgtcgtcactttgaagcaacttttagaaagatcggttagccataagacattgtggagcaaacaatcaaacaaagacagaacgtgccctggagacattttaagagctacaatattatcaaacgacttctccatccggcaattgagggctgaattttgcaaaaatttcattctctacaatatattcaccattttacaacgtaacaagaaaagcatccgttccttctctggtaacgataatgcgccttcctttcaatttagttggaatgtttgggactcatatatatggaagcaatatcaagagaccgagtccatgaaaatacccacggaccaagcttctctgatcaactacaagacaaaatacgactcttttcttcatgacctacaaacatattccgcactggtaatttcagaaatgaaatggaaccaattctctattttccaaaatgatgaaacgactttatcaagatttgaacacatcacattaattttgcaaaccgtgctgacaaaatcgaaaatgattagaattttccagccaaacttgtacaagtttatgcaagatgatttaagaccaactttaatggagttggtgggtttcactgagtcaataaatgcaacaatagaacctggttttgcgaatgaacaatcgctacaatctgcaaacggattaaagaaattggccaaccaacttttatacttcgaacaggaaatatatggcgaaaagttccgcgtaaataggcccatccagcttcgtccaataacattatcagcaaactacaaaattgttattctggataagaagaacgccatacccgaaatatttcaaaccctactgaaattcatgacacaaataacgacatattttgttaaagatttgtcggaggtagaacttcatgggcacatgcattgtattgataaaaaaatgctggacaagtcgaaattcatgtatttatacgaagagaaaagcaacgaggaagtgaaagcagcttctcctcaaaaggagaagatagtagataatatcattggcctattatcaaatgatgaagaacattaa

SEQ ID NO: 4740 - DNA, 1893 bp, Artificial Sequence
  Description of Artificial Sequence: Synthetic polynucleotide
atggtgaattggcaaacattgttcatggtctctttgaggagacagggcagttcctctcgttacaggtataagttcaacatggagaatatcacacatcaggtgttccctcgctgtaagcaagcgtttaagaagacaaacttatcttatgaatattgtgatcttgaaggagtattatataatatttctctcacggacttgcaaaaattattattacgtgatataaacgcccctcgcgaacacgcattcaagattgttagaacagatttgactcaaaaatcctccaagaagaggatccaacactgggaaagaattgcgcctatgtttgaccaccccttaagtctctacgagaagttgttcagcgaaatggatgaggacttcaagccatctttcgagtggcaacaattaataagggtaagatgcaaagatgataagttgaaattacagcgtgtaatttggcctaagagtatattttccaacttttgtaggggaatcggggttaagaagagcacttacgatagactcttggaacaaaataatggtgaggtacccatgtttgtaaacccagctaatgcaaagcccttgcctcttttccaggtttccgatgaggcgatgattggggaattcgatggaattggtattttcccttactttgtagataaacatagagaatttttcgttactgaggtagacaaattgaagaccaagatagcttctccactttgcaccttgaatgaaagaaagcgcattgagaaggctaacgctggtagaatattggcgaacgaagagggtaaaccattctatttggatgcaaacagtgccacaactagaatcgctggtggtaatgtcgtcactttgaagcaacttttagaaagatctgttagccataagacattgtggagcaaacaaagtaacaaagacagaacgtgccctggagacattttaagagctacaatattatctaacgacttctccatcagacaattgagggctgaattttgcaaaaatttcattctctacaatatattcaccattttacaacgtaacaagaaaagcatccgttccttctctggtaacgataatgcgccttcctttcaatttagttggaatgtttgggactcttatatatggaagcaatatcaagagaccgagtccatgaaaatacccacggaccaagcttctttgatcaactacaagacaaaatacgactcttttcttcatgacttgcaaacatattccgcattggtaatttctgaaatgaaatggaaccaattctctattttccaaaatgatgaaacgactttatctagatttgaacacatcacattaattttgcaaaccgtgttaacaaaatctaaaatgattagaattttccagccaaacttgtacaagtttatgcaagatgatttaagaccaactttaatggagttggtgggtttcactgagagtataaatgcaacaatagaacctggttttgcgaatgaacaatctttacaatctgcaaacggattaaagaaattggccaaccaacttttatacttcgaacaggaaatatatggcgaaaagttccgcgtaaataggcccatccagcttcgtccaataacattaagtgcaaactacaaaattgttattttagataagaagaacgccatacccgaaatatttcaaaccttattgaaattcatgacacaaataacgacatattttgttaaagatttgagtgaggtagaacttcatgggcacatgcattgtattgataaaaaaatgttggacaagagtaaattcatgtatttatacgaagagaaaagcaacgaggaagtgaaagcagcttctcctcaaaaggagaagatagtagataatatcattggcttattatccaatgatgaagaacattga

SEQ ID NO: 4741 - DNA, 402 bp, Saccharomyces cerevisiae
atgtacagatcatcgataagcatccaggtctttatatgtgtattgtttttgccccttgactcaggcaggcctctaatctatatgattgatttgtcatatatatgcagcgacgccacagttttttccggcaagagtcgcgtgatctttttttctaatccaatctgtgaacatactagaggaaacttctaccttttctacctgaattacattatcaacacttttgcaccaaaaaatcgtggtactaggagatgcaaaccttttggtctccacatcaattgcaggaaaaagattgactgtttgcatgtgcaattatcttatatattatgtaaaaataaaagtaggaaacgccacatggatgcgcatgccataacccttgcatggttagcacacgccctcacgtga

SEQ ID NO: 4742 - DNA, 402 bp, Artificial Sequence
  Description of Artificial Sequence: Synthetic polynucleotide
atgtacagatcttctataagcatccaggtctttatatgtgtattgtttttgccccttgacagtggcaggcctttgatctatatgattgatttgagttatatatgcagcgacgccacagttttttccggcaagagtcgcgtgatctttttttctaatccaatctgtgaacatactagaggaaacttctaccttttctacttgaattacattatcaacacttttgcaccaaaaaatcgtggtactaggagatgcaaaccttttggtctccacatcaattgcaggaaaaagattgactgtttgcatgtgcaattatcttatatattatgtaaaaataaaagtaggaaacgccacatggatgcgcatgccataacccttgcatggttagcacacgccctcacgtga

SEQ ID NO: 4743 - DNA, 1641 bp, Saccharomyces cerevisiae
atggaaccgctgctttttaatagtgggaaagcaaatccctctcaagatgttttcatagatgtggaagttggtgatattaccacaaaatatggttccacaaatactggatcattcagttcgatggatactgtggaagcgcaggcgataaaggcagagacggcaagattcatggaagttccacagggaagacatttaggtgtgttctccacggttgtgttatttgtttcgaggataatggggtcaggtatatttgcagtacccagtgtgattttactgaatacaggtggtaataagctgatatattttgcgatctgggtttttagcgctgcgatcgcttttgcaggattgtatctttttctagaatttggttcctggataccgaaatcaggtggacgtaaaaacttcctcgaacggagttttgaaagacccagactattaattagtgtggtgttttcgtgttacagtgttttaactggctatgcattgacgggatctatcgtcttcggtaaatacgtgttgagcgcatttggagtcacggatgattcgtggtccaagtacgtcagcatatcatttataatatttgccgttctcattcacggtgtctctgtaaggcacggagtgtttatacagaacgcacttggtggtttgaagttgatcatgattgtcttgatgtgctttgccgggctatacacgcttttcttttataaaagcaccggtcaagttgcctgggacctcccagtaacccaagttgagaaagattctctcctgtcggtgtcctctattgctactgcctttatcagctcattcttttgtttttctggatgggatacagttcacacagttacatcagaaattaagaatcccgttaagacgttgaaggtgtcaggtcccttatcgttgataatttgttttgtctgctacacaatgatgaatgtggcatacttgaaagttttgacatatgaggaaattgttagtgcaggccccctggttggttccgtgttgtttaccaaacttttcggacccagagttggtggcaaattcattgctttttctatcgccatttctgcagcatctaatattctggttgtcatttacagtatatcaagagttaaccaggaaatattcaaagaaggttatttaccattcagtattcatatgtccaaaaattggccatttgatgcacctctaccatctatttctttatgtggctttataaccattgcttggatattgattttacccaaagagggcgaatccttcaattatctggtatcgatggatggttatggtaatcagtttttcttattattggtcgctattgggctctttatttggaggttcaaacacaagaacgaagtcccagagattcgtgcatctacttttggagtattagccattattacattatcattatacatgttgatggcaccattctttgccgaccctagcctaaacagagttgggttcctgccgccctaccaaatcatgtcattactggtaatagttgcatgcttctttttctggttagttaaattcgttttactacctaaattcttccattataaacttttacccaaaatcacttatttgcatgatgggctcattgtcacagaatgggtgaaaaagccatgtctgtgttag

SEQ ID NO: 4744 - DNA, 1641 bp, Artificial Sequence
  Description of Artificial Sequence: Synthetic polynucleotide
atggaaccgttactttttaatagtgggaaagcaaatccctctcaagatgttttcatagatgtggaagttggtgatattaccacaaaatatggttccacaaatactggaagtttcagttctatggatactgtggaagcgcaggcgataaaggcagagacggcaagattcatggaagttccacagggaagacatttaggtgtgttctccacggttgtgttatttgtttccaggataatggggtctggtatatttgcagtacccagtgtgattttattgaatacaggtggtaataagttaatatattttgcgatctgggtttttagcgctgcgatcgcttttgcaggattgtatctttttttggaatttggttcctggataccgaaatctggtggacgtaaaaacttcctcgaaagaagttttgaaagacccagattattaattagtgtggtgttttcttgttacagtgttttaactggctatgcattgacgggatctatcgtcttcggtaaatacgtgttgagcgcatttggagtcacggatgattcttggtccaagtacgtcagcatatcctttataatatttgccgttctcattcacggtgtctctgtaaggcacggagtgtttatacagaacgcacttggtggtttgaagttgatcatgattgtcttgatgtgctttgccgggttatacacgcttttcttttataaaagcaccggtcaagttgcctgggacctcccagtaacccaagttgagaaagattctctcttgtctgtgtcctctattgctactgcctttatcagctctttcttttgtttttctggatgggatacagttcacacagttacaagtgaaattaagaatcccgttaagacgttgaaggtgagtggtcccttatctttgataatttgttttgtctgctacacaatgatgaatgtggcatacttgaaagttttgacatatgaggaaattgttagtgcaggccccttagttggttccgtgttgtttaccaaacttttcggacccagagttggtggcaaattcattgctttttctatcgccatttctgcagcatctaatattttggttgtcatttacagtatatctagagttaaccaggaaatattcaaagaaggttatttaccattcagtattcatatgtccaaaaattggccatttgatgcacctttaccatctatttctttatgtggctttataaccattgcttggatattgattttacccaaagagggcgaatccttcaattatttggtatctatggatggttatggtaatcagtttttcttattattggtcgctattgggctctttatttggaggttcaaacacaagaacgaagtcccagagattcgtgcatctacttttggagtattagccattattacattatctttatacatgttgatggcaccattctttgccgaccctagcttgaacagagttgggttcttgccgccctaccaaatcatgtctttattggtaatagttgcatgcttctttttctggttagttaaattcgttttattgcctaaattcttccattataaacttttacccaaaatcacttatttgcatgatgggctcattgtcacagaatgggtgaaaaagccatgtttatgttga

SEQ ID NO: 4745 - DNA, 4779 bp, Saccharomyces cerevisiae
atgggaacggatccccttattatccgaaataatggttcattttgggaagttgatgattttactcgtttaggaagaactcagctattgagctactatttaccattggctatcatagcctcaattggcattttcgcactttgtcgcagtggattatctcgttatgtaagatctgccgagtgcgatttagtgaacgaatatctatttggcgcacaagaagagagaaaagaagataatagtatagaaagacttctacggaactcaaatacccaagccaattacgtcaacgtcaaaaagcaaggaaggattttgaaacttagacattttgatataacaactatagatgtcaagcaaatcgatgctaaaaatcatggtggactaacgtttagtagaccgtctactagtgaccacttaagaaaatcatctgaaattgtattaatgtctttacaaataattggcctttcctttttaagagtaacaaaaatcaatattgaattaacgaacagagatgttacaactttactattattttggttaatactactttccctaagtatcttaagagtttacaagcgttcaacgaatctttgggccatctgttttactgcccatacaactatttggatttcaacctggattccaattcgttcggtctatattggtaatatcgatgatgtaccctcacagatattttacatctttgaattcgtaattacttcaaccttacagccaataaagctcacttcaccgattaaagacaactcatccatcatctacgttagagacgaccatacgtctccttcgagggaacacatatcctcaattttaagttgcattacttggagctggattaccaattttatatgggaggcccaaaagaacactattaagttaaaggatatttggggcttatcaatggaagactatagcattttcattctaaaagggtttaccaggagaaacaagcacattaataatttgacgctagcactgtttgaatctttcaaaacatatttactcataggaatgttatgggttctggtgaacagtattgtaaaccttcttcccacaattttaatgaaaagatttttagaaattgtggataacccaaaccgttcctcatcatgcatgaatttggcgtggctttatattattggtatgttcatttgtagattgacattagcaatttgtaattcccaaggtcaatttgtttctgataagatttgtttaagaataagagccatactcataggagaaatttatgcaaaaggcttacgtaggaggctgtttacatctccaaaaaccagctctgattcagatagtatctccgcaaaccttggtaccataattaatctcatttctattgactcatttaaggtatcggaactagcaaactacctttatgtgacagttcaggcagtaattatgataatagttgttgtaggactacttttcaactttttaggtgtttcagcttttgcaggaatttcaattatcttagtgatgttcccattgaatttcttgttagcgaatttgttaggtaagtttcaaaagcaaacactgaaatgtactgaccaaagaatctcaaaattgaacgagtgcttacagaacataagaattgtcaaatattttgcttgggaaaggaatattataaatgaaatcaaatcaataaggcaaaaggaattaagatccttattaaaaaaatctttggtgtggtccgtaacttcttttctttggttcgtgacaccgaccttggtgacaggtgtcactttcgccatctgtacatttgttcaacatgaagatttgaatgccccgcttgctttcactactttgtcactcttcactttgttaaagacacccctggatcaattatcaaatatgctaagtttcataaatcaatcaaaagtctctctaaaaagaataagcgattttttaaggatggacgatacagaaaaatataatcaactaaccatatctccagacaaaaataaaattgaatttaaaaatgcgactttaacctggaatgaaaatgacagcgatatgaatgcattcaaattatgtggtttgaatattaaatttcaaattggtaagttaaatttgattttgggttctacaggatctggtaaaagtgcattgctgctgggtttactgggtgaactaaatctaattagtggctctatcattgttccgagcttagaaccaaagcatgatttaattcccgactgcgaaggtttaaccaattccttcgcatattgttcacaaagtgcgtggctattaaatgacacggtaaaaaacaatattatctttgataacttctataacgaggataggtacaacaaagtaattgatgcatgtgggctgaaaagagacctggagattttaccagcaggtgacctaacagaaattggtgaaaagggtataactttatcaggagggcagaaacagagaatttccttggcgagagctgtttattcgagtgctaagcatgtcttactagatgattgtttgagcgctgtcgattcacatactgctgtatggatctatgaaaattgcatcacaggtccactaatgaaaaatagaacctgcattttagttacgcacaatgtttcattaacacttagaaatgcccatttcgcgattgtgttggaaaatggcaaagtgaagaatcaaggaactattacagaattacaaagcaaagggctttttaaggaaaaatatgttcaactttcttctcgagatagcattaatgaaaagaacgctaatagattaaaagctcccagaaaaaatgactctcagaaaatcgaacctgtcaccgagaacataaattttgatgcaaattttgtcaatgatggccagctaatagaagaggaagaaaaatcaaacggtgccataagccccgatgtttataaatggtacctgaaattttttggaggcttcaaagctttaacagccctgttcgctctttatatcacagctcaaattttgttcatcagtcagtcttggtggatacgacattgggtcaacgataccaatgtacgaataaatgctccaggttttgcgatggacacgctgccattaaaagggatgaccgactcttcgaaaaataaacataatgcattttattacttaaccgtatattttcttattggtatcattcaggcaatgctaggtggttttaaaacaatgatgacgtttttatccggtatgcgagcctccagaaagatctttaataatctgctagatctagttctacatgcccaaatacgatttttcgacgtgacgccggttggtagaatcatgaatcgcttttcaaaggacatcgaaggtgttgatcaagaattgattccatacttagaagtaactatattttgcctaattcaatgcgcatcaattatatttctcattaccgtaataactcctcgctttttgacagtcgccgttatcgtttttgttttatatttctttgtggggaaatggtacttaacggcaagtagagaattgaaaaggttagattcaataaccaaatcacccatttttcaacatttctcagagaccttggtaggcgtttgcacaattcgtgcatttggcgacgagaggagattcattttagaaaatatgaacaaaattgaccaaaataacagagcattcttttatttatcagttactgtcaaatggttttcttttagagtcgacatgattggcgcattcattgttttagcatcaggttcttttattctgctcaatattgcaaatattgactcgggtcttgccggcatttctttgacatatgccattttgtttacagatggtgctttatggttagttagactgtactcaacatttgaaatgaacatgaactctgttgaaagactaaaagaatattctagcattgaacaagagaactatcttggccatgatgaaggccgcattctacttctaaacgaaccatcgtggccaaaagatggagaaattgaaattgaaaacttatctttacgttacgcgccaaatttgcctcctgtcataagaaatgttagtttcaaagtggatcctcaaagtaagattgggattgtcggaagaactggcgcaggcaaatctaccataataacggcattattcagattactagaaccaataaccggatgtatcaaaatagatgggcaggatataagtaaaattgatctcgttacattacgtcgttccattactatcatccctcaggaccctattctatttgcaggtacaatcaaaagtaatgttgatccatatgatgaatatgatgaaaaaaaaatattcaaagcactttcacaagtaaatctaatttcttcacatgaatttgaagaagtgcttaactcggaggaacgctttaacagcactcataataaatttttaaatcttcacacagaaatagctgagggcggcttaaatctgtcccaaggtgaaaggcaattgctttttattgcacgatcattgttacgcgagccaaagataatacttttggacgaggctacttcctctattgattacgattctgaccatttaattcagggtattataagaagtgagtttaataaaagcacaattcttactattgcacatcgtttgagatctgttatcgattacgacaggataattgtgatggatgccggtgaggtaaaagaatatgatcgccctagtgaactgttgaaagatgaacgcggtatattttatagtatgtgtcgtgacagtgggggcctagagcttttgaagcaaatagccaagcaatcaagtaagatgatgaaataa

SEQ ID NO: 4746 - DNA, 4779 bp, Artificial Sequence
  Description of Artificial Sequence: Synthetic polynucleotide
atgggaacggatccccttattatcagaaataatggttctttttgggaagttgatgattttactcgtttaggaagaactcagttattgagctactatttaccattggctatcatagcctctattggcattttcgcactttgtcgcagtggattatctcgttatgtaagatctgccgagtgcgatttagtgaacgaatatttatttggcgcacaagaagagagaaaagaagataatagtatagaaagacttttgagaaacagtaatacccaagccaattacgtcaacgtcaaaaagcaaggaaggattttgaaacttagacattttgatataacaactatagatgtcaagcaaatcgatgctaaaaatcatggtggattaacgtttagtagaccgtctactagtgaccacttaagaaaatcttctgaaattgtattaatgtctttacaaataattggcctttcctttttaagagtaacaaaaatcaatattgaattaacgaacagagatgttacaactttattattattttggttaatattactttccttgagtatcttaagagtttacaagcgttctacgaatctttgggccatctgttttactgcccatacaactatttggatttctacctggattccaattcgtagtgtctatattggtaatatcgatgatgtaccctctcagatattttacatctttgaattcgtaattacttctaccttacagccaataaagctcacttctccgattaaagacaactcttccatcatctacgttagagacgaccatacgtctccttctagggaacacatatccagtattttaagttgcattacttggagctggattaccaattttatatgggaggcccaaaagaacactattaagttaaaggatatttggggcttatctatggaagactatagcattttcattttgaaagggtttaccaggagaaacaagcacattaataatttgacgttggcattatttgaatctttcaaaacatatttactcataggaatgttatgggttttggtgaacagtattgtaaaccttcttcccacaattttaatgaaaagatttttagaaattgtggataacccaaaccgttcctctagttgcatgaatttggcgtggctttatattattggtatgttcatttgtagattgacattagcaatttgtaattcccaaggtcaatttgtttctgataagatttgtttaagaataagagccatactcataggagaaatttatgcaaaaggcttacgtaggaggttatttacatctccaaaaaccagctctgattctgatagtatctccgcaaaccttggtaccataattaatctcatttctattgactcttttaaggtatctgaattggcaaactacctttatgtgacagttcaggcagtaattatgataatagttgttgtaggattgcttttcaactttttaggtgtttctgcttttgcaggaatttccattatcttagtgatgttcccattgaatttcttgttagcgaatttgttaggtaagtttcaaaagcaaacattaaaatgtactgaccaaagaatctccaaattgaacgagtgcttacagaacataagaattgtcaaatattttgcttgggaaaggaatattataaatgaaatcaaatctataaggcaaaaggaattaagatccttattaaaaaaatctttggtgtggtccgtaacttcttttctttggttcgtgacaccgaccttggtgacaggtgtcactttcgccatctgtacatttgttcaacatgaagatttgaatgccccgcttgctttcactactttgtctctcttcactttgttaaagacacccttagatcaattatccaatatgttaagtttcataaatcaaagtaaagtctctttgaaaagaataagcgattttttaaggatggacgatacagaaaaatataatcaattgaccatatctccagacaaaaataaaattgaatttaaaaatgcgactttaacctggaatgaaaatgacagcgatatgaatgcattcaaattatgtggtttgaatattaaatttcaaattggtaagttaaatttgattttgggttctacaggatctggtaaaagtgcattgttgttgggtttattgggtgaattgaatttaattagtggctctatcattgttccgagcttagaaccaaagcatgatttaattcccgactgcgaaggtttaaccaattccttcgcatattgttctcaaagtgcgtggttgttaaatgacacggtaaaaaacaatattatctttgataacttctataacgaggataggtacaacaaagtaattgatgcatgtgggttgaaaagagacttggagattttaccagcaggtgacttgacagaaattggtgaaaagggtataactttatctggagggcagaaacagagaatttccttggcgagagctgtttattctagtgctaagcatgtcttattagatgattgtttgagcgctgtcgattctcatactgctgtatggatctatgaaaattgcatcacaggtccattaatgaaaaatagaacctgcattttagttacgcacaatgtttctttaacacttagaaatgcccatttcgcgattgtgttggaaaatggcaaagtgaagaatcaaggaactattacagaattacaaagcaaagggctttttaaggaaaaatatgttcaactttcttctagagatagcattaatgaaaagaacgctaatagattaaaagctcccagaaaaaatgactctcagaaaatcgaacctgtcaccgagaacataaattttgatgcaaattttgtcaatgatggccagttgatagaagaggaagaaaaaagtaacggtgccataagccccgatgtttataaatggtacttgaaattttttggaggcttcaaagctttaacagcccttttcgctctttatatcacagctcaaattttgttcatcagtcagtcttggtggataagacattgggtcaacgataccaatgtaagaataaatgctccaggttttgcgatggacacgttaccattaaaagggatgaccgactcttctaaaaataaacataatgcattttattacttaaccgtatattttcttattggtatcattcaggcaatgttgggtggttttaaaacaatgatgacgtttttatccggtatgagagcctccagaaagatctttaataatttattagatttggttttgcatgcccaaataagatttttcgacgtgacgccggttggtagaatcatgaatcgcttttccaaggacatcgaaggtgttgatcaagaattgattccatacttagaagtaactatattttgcttgattcaatgcgcatctattatatttctcattaccgtaataactcctcgctttttgacagtcgccgttatcgtttttgttttatatttctttgtggggaaatggtacttaacggcaagtagagaattgaaaaggttagattctataaccaaaagtcccatttttcaacatttcagtgagaccttggtaggcgtttgcacaattcgtgcatttggcgacgagaggagattcattttagaaaatatgaacaaaattgaccaaaataacagagcattcttttatttaagtgttactgtcaaatggttttcttttagagtcgacatgattggcgcattcattgttttagcatctggttcttttattttactcaatattgcaaatattgactctggtcttgccggcatttctttgacatatgccattttgtttacagatggtgctttatggttagttagattatactccacatttgaaatgaacatgaactctgttgaaagattgaaagaatattctagcattgaacaagagaactatcttggccatgatgaaggccgcattttacttttgaacgaaccatcttggccaaaagatggagaaattgaaattgaaaacttatctttacgttacgcgccaaatttgcctcctgtcataagaaatgttagtttcaaagtggatcctcaaagtaagattgggattgtcggaagaactggcgcaggcaaatctaccataataacggcattattcagattattggaaccaataaccggatgtatcaaaatagatgggcaggatataagtaaaattgatctcgttacattacgtcgttccattactatcatccctcaggaccctattttatttgcaggtacaatcaaaagtaatgttgatccatatgatgaatatgatgaaaaaaaaatattcaaagcactttctcaagtaaatttaatttcttctcatgaatttgaagaagtgcttaacagtgaggaacgctttaacagcactcataataaatttttaaatcttcacacagaaatagctgagggcggcttaaatttatcccaaggtgaaaggcaattgctttttattgcaagaagtttgttacgcgagccaaagataatacttttggacgaggctacttcctctattgattacgattctgaccatttaattcagggtattataagaagtgagtttaataaaagcacaattcttactattgcacatcgtttgagatctgttatcgattacgacaggataattgtgatggatgccggtgaggtaaaagaatatgatcgccctagtgaattattgaaagatgaacgcggtatattttatagtatgtgtcgtgacagtgggggcttagagcttttgaagcaaatagccaagcaaagtagtaagatgatgaaatga

SEQ ID NO: 4747 - DNA, 885 bp, Saccharomyces cerevisiae
atgtctgctgaaattgaagaagctactaatgccgtaaacaacttgagcatcaacgactccgaacagcaaccaagggctcctactcataagacagtaattgaccccgaggacacaatctttattggtaatgttgctcacgaatgtaccgaagacgacttgaagcaattgtttgtggaggaattcggggatgaagtcagcgtagagatcccaattaaggaacacaccgacggtcacattccagctagtaaacacgctctagtcaagttcccaaccaagattgattttgataatatcaaggagaattatgacacgaaagtcgttaaggacagagaaattcatattaagagagctagaactccaggccaaatgcaaagaggaggtttcagaggcagaggcggtttcagaggcagaggaggttttagaggaggtttcagaggcggctacagaggaggtttcagaggcagagggaacttcagaggtagaggcggcgccagaggtggtttcaatggacaaaaaagggaaaagattccattagaccaaatggaaagatcaaaggataccttatatattaataacgtcccattcaaagctaccaaagaggaggtcgctgaatttttcggtactgacgccgactccatctctttgccaatgagaaaaatgagagaccaacacactggtaggatcttcacatccgattctgctaatagaggtatggcatttgtcactttcagtggtgaaaacgttgatattgaagctaaagctgaagaatttaaaggcaaggttttcggtgacagggagttaactgtagatgttgctgttattagaccagaaaatgatgaagaagaaattgagcaagaaactggttctgaagaaaagcaagaataa

SEQ ID NO: 4748 - DNA, 885 bp, Artificial Sequence
  Description of Artificial Sequence: Synthetic polynucleotide
atgtctgctgaaattgaagaagctactaatgccgtaaacaacttgagcatcaacgactccgaacagcaaccaagggctcctactcataagacagtaattgaccccgaggacacaatctttattggtaatgttgctcacgaatgtaccgaagacgacttgaagcaattgtttgtggaggaattcggggatgaagtcagcgtagagatcccaattaaggaacacaccgacggtcacattccagctagtaaacacgctttggtcaagttcccaaccaagattgattttgataatatcaaggagaattatgacacgaaagtcgttaaggacagagaaattcatattaagagagctagaactccaggccaaatgcaaagaggaggtttcagaggcagaggcggtttcagaggcagaggaggttttagaggaggtttcagaggcggctacagaggaggtttcagaggcagagggaacttcagaggtagaggcggcgccagaggtggtttcaatggacaaaaaagggaaaagattccattagaccaaatggaaagatccaaggataccttatatattaataacgtcccattcaaagctaccaaagaggaggtcgctgaatttttcggtactgacgccgactccatctctttgccaatgagaaaaatgagagaccaacacactggtaggatcttcacatccgattctgctaatagaggtatggcatttgtcactttcagtggtgaaaacgttgatattgaagctaaagctgaagaatttaaaggcaaggttttcggtgacagggagttaactgtagatgttgctgttattagaccagaaaatgatgaagaagaaattgagcaagaaactggttctgaagaaaagcaagaatga

SEQ ID NO: 4749 - DNA, 771 bp, Saccharomyces cerevisiae
atggccccaggtaagaaagtcgctccagctccattcggtgctaagtcaactaagtctaacaagactagaaacccattgactcactctactccaaagaacttcggtattggtcaagctgtccaaccaaagagaaacttgtccagatacgtcaaatggccagaatacgtcagagtgcaaagacaaaagaagatcttgtccatcagattgaaggttcctccaaccattgctcaattccaatacactttggacagaaacaccgctgccgaaaccttcaagttgttcaacaagtacagaccagaaactgctgctgaaaagaaggaaagattgaccaaagaagctgccgctgttgctgaaggtaagtccaagcaagatgcttctccaaagccatacgctgtcaagtacggtttgaaccacgttgttgccttgatcgaaaacaagaaggctaagttggttttgattgctaacgatgtcgacccaattgaattggttgtctttttgccagctttgtgtaagaagatgggtgttccatacgccattgtcaagggtaaggctagattgggtaccttggttaaccaaaagacctctgccgttgccgctttgactgaagtcagagccgaagacgaagctgctttggctaagttggtttctaccattgacgctaacttcgctgacaaatacgatgaagtcaagaagcactggggtggtggtatccttggtaacaaggctcaagccaagatggacaagagagctaagaactccgactccgcttaa

SEQ ID NO: 4750 - DNA, 771 bp, Artificial Sequence
  Description of Artificial Sequence: Synthetic polynucleotide
atggccccaggtaagaaagtcgctccagctccattcggtgctaagtctactaagtctaacaagactagaaacccattgactcactctactccaaagaacttcggtattggtcaagctgtccaaccaaagagaaacttgtccagatacgtcaaatggccagaatacgtcagagtgcaaagacaaaagaagatcttgtccatcagattgaaggttcctccaaccattgctcaattccaatacactttggacagaaacaccgctgccgaaaccttcaagttgttcaacaagtacagaccagaaactgctgctgaaaagaaggaaagattgaccaaagaagctgccgctgttgctgaaggtaagtccaagcaagatgcttctccaaagccatacgctgtcaagtacggtttgaaccacgttgttgccttgatcgaaaacaagaaggctaagttggttttgattgctaacgatgtcgacccaattgaattggttgtctttttgccagctttgtgtaagaagatgggtgttccatacgccattgtcaagggtaaggctagattgggtaccttggttaaccaaaagacctctgccgttgccgctttgactgaagtcagagccgaagacgaagctgctttggctaagttggtttctaccattgacgctaacttcgctgacaaatacgatgaagtcaagaagcactggggtggtggtatccttggtaacaaggctcaagccaagatggacaagagagctaagaactccgactccgcttga

SEQ ID NO: 4751 - DNA, 2130 bp, Saccharomyces cerevisiae
atgtttccctctctcttccgacttgtagtattctccaaacgttacatattccgatcaagccagcgcctttacactagtttaaaacaagaacagagccgtatgtccaaaataatggaagatttacgaagtgactacgtcccgcttatcgccagtattgatgtaggaacgacctcatccagatgcattctgttcaacagatggggccaggacgtttcaaaacaccaaattgaatattcaacttcagcatcgaagggcaagattggggtgtctggcctaaggagaccctctacagccccagctcgtgaaacaccaaacgccggtgacatcaaaaccagcggaaagcccatcttttctgcagaaggctatgccattcaagaaaccaaattcctaaaaatcgaggaattggacttggacttccataacgaacccacgttgaagttccccaaaccgggttgggttgagtgccatccgcagaaattactggtgaacgtcgtccaatgccttgcctcaagtttgctctctctgcagactatcaacagcgaacgtgtagcaaacggtctcccaccttacaaggtaatatgcatgggtatagcaaacatgagagaaaccacaattctgtggtcccgccgcacaggaaaaccaattgttaactacggtattgtttggaacgacaccagaacgatcaaaatcgttagagacaaatggcaaaacactagcgtcgataggcaactgcagcttagacagaagactggattgccattgctctccacgtatttctcctgttccaagctgcgctggttcctcgacaatgagcctctgtgtaccaaggcgtatgaggagaacgacctgatgttcggcactgtggacacatggctgatttaccaattaactaaacaaaaggcgttcgtttctgacgtaaccaacgcttccagaactggatttatgaacctctccactttaaagtacgacaacgagttgctggaattttggggtattgacaagaacctgattcacatgcccgaaattgtgtcctcatctcaatactacggtgactttggcattcctgattggataatggaaaagctacacgattcgccaaaaacagtactgcgagatctagtcaagagaaacctgcccatacagggctgtctgggcgaccaaagcgcatccatggtggggcaactcgcttacaaacccggtgctgcaaaatgtacttatggtaccggttgctttttactgtacaatacggggaccaaaaaattgatctcccaacatggcgcactgacgactctagcattttggttcccacatttgcaagagtacggtggccaaaaaccagaattgagcaagccacattttgcattagagggttccgtcgctgtggctggtgctgtggtccaatggctacgtgataatttacgattgatcgataaatcagaggatgtcggaccgattgcatctacggttcctgattctggtggcgtagttttcgtccccgcatttagtggcctattcgctccctattgggacccagatgccagagccaccataatggggatgtctcaattcactactgcctcccacatcgccagagctgccgtggaaggtgtttgctttcaagccagggctatcttgaaggcaatgagttctgacgcgtttggtgaaggttccaaagacagggactttttagaggaaatttccgacgtcacatatgaaaagtcgcccctgtcggttctggcagtggatggcgggatgtcgaggtctaatgaagtcatgcaaattcaagccgatatcttaggtccctgtgtcaaagtcagaaggtctccgacagcggaatgtaccgcattgggggcagccattgcagccaatatggctttcaaggatgtgaacgagcgcccattatggaaggacctacacgatgttaagaaatgggtcttttacaatggaatggagaaaaacgaacaaatatcaccagaggctcatccaaaccttaagatattcagaagtgaatccgacgatgctgaaaggagaaagcattggaagtattgggaagttgccgtggaaagatccaaaggttggctgaaggacatagaaggtgaacacgaacaggttctagaaaacttccaataa

SEQ ID NO: 4752 - DNA, 2130 bp, Artificial Sequence
  Description of Artificial Sequence: Synthetic polynucleotide
atgtttccctctctcttccgtcttgtagtattctccaaacgttacatattcagaagcagccagcgcctttacactagtttaaaacaagaacagagccgtatgtccaaaataatggaagatttaagaagtgactacgtcccgcttatcgccagtattgatgtaggaacgacctcttccagatgcattcttttcaacagatggggccaggacgtttccaaacaccaaattgaatattctacttctgcatccaagggcaagattggggtgtctggcttgaggagaccctctacagccccagctcgtgaaacaccaaacgccggtgacatcaaaaccagcggaaagcccatcttttctgcagaaggctatgccattcaagaaaccaaattcttgaaaatcgaggaattggacttggacttccataacgaacccacgttgaagttccccaaaccgggttgggttgagtgccatccgcagaaattattggtgaacgtcgtccaatgccttgcctccagtttgctctctttgcagactatcaacagcgaacgtgtagcaaacggtctcccaccttacaaggtaatatgcatgggtatagcaaacatgagagaaaccacaattttatggtcccgccgcacaggaaaaccaattgttaactacggtattgtttggaacgacaccagaacgatcaaaatcgttagagacaaatggcaaaacactagcgtcgataggcaattgcagcttagacagaagactggattgccattgctctccacgtatttctcctgttccaagttgcgctggttcctcgacaatgagcctctttgtaccaaggcgtatgaggagaacgacttgatgttcggcactgtggacacatggttgatttaccaattaactaaacaaaaggcgttcgtttctgacgtaaccaacgcttccagaactggatttatgaacctctccactttaaagtacgacaacgagttgttggaattttggggtattgacaagaacttgattcacatgcccgaaattgtgtcctcttctcaatactacggtgactttggcattcctgattggataatggaaaagttgcacgattctccaaaaacagtattgagagatttggtcaagagaaacttgcccatacagggctgtttgggcgaccaaagcgcatccatggtggggcaactcgcttacaaacccggtgctgcaaaatgtacttatggtaccggttgctttttattgtacaatacggggaccaaaaaattgatctcccaacatggcgcattgacgactttggcattttggttcccacatttgcaagagtacggtggccaaaaaccagaattgagcaagccacattttgcattagagggttccgtcgctgtggctggtgctgtggtccaatggcttcgtgataatttaagattgatcgataaaagtgaggatgtcggaccgattgcatctacggttcctgattctggtggcgtagttttcgtccccgcatttagtggccttttcgctccctattgggacccagatgccagagccaccataatggggatgtctcaattcactactgcctcccacatcgccagagctgccgtggaaggtgtttgctttcaagccagggctatcttgaaggcaatgagttctgacgcgtttggtgaaggttccaaagacagggactttttagaggaaatttccgacgtcacatatgaaaagtctcccttaagtgttttagcagtggatggcgggatgtctaggtctaatgaagtcatgcaaattcaagccgatatcttaggtccctgtgtcaaagtcagaaggtctccgacagcggaatgtaccgcattgggggcagccattgcagccaatatggctttcaaggatgtgaacgagcgcccattatggaaggacttgcacgatgttaagaaatgggtcttttacaatggaatggagaaaaacgaacaaatatctccagaggctcatccaaaccttaagatattcagaagtgaatccgacgatgctgaaaggagaaagcattggaagtattgggaagttgccgtggaaagatccaaaggttggttaaaggacatagaaggtgaacacgaacaggttttggaaaacttccaatga

SEQ ID NO: 4753 - DNA, 672 bp, Saccharomyces cerevisiae
atgagctcacaaccgtctttcgtcaccataaggggcaaggccatttctctagaaacacaaacggagtcacttctttccaagtactccacattcgcgcagacaactagttcagaacaaactggccaagaaaagaagatagacaagcagttggagggaatcttaggccagagacaggatgtaatcgattcattaacacaaatctgcgattctaacccggcaatctccgcctcaaagctttcccaactgcaccgccacaaggagatcttacaagaccactggaagagcttccgcaatatcaggtcctccatccagcaagagcgcaacagactaaacttgttattcagcgtgaagaacgatattgctaattccacaacggacgcgccagctcctataggggatgctgacgagtacattcagaacgaaacaaggcgaatcgatcagtccaacaacgtagtcgaccgtctcatctcccaagcctgggagactcggtcgcagttccactcgcagagcaacgtgctgaacacggcaaacaacaaggtgttgcaaactttacaaagaataccaggtgtcaatcagcttattatgaagattaacacgagaaggaagaaaaacgcgtttgtattggccacgataaccaccctttgtatactgtttttgtttttcacatggtaa

SEQ ID NO: 4754 - DNA, 672 bp, Artificial Sequence
  Description of Artificial Sequence: Synthetic polynucleotide
atgagctctcaaccgtctttcgtcaccataaggggcaaggccatttctttggaaacacaaacggagtctcttctttccaagtactccacattcgcgcagacaactagttctgaacaaactggccaagaaaagaagatagacaagcagttggagggaatcttaggccagagacaggatgtaatcgattctttaacacaaatctgcgattctaacccggcaatctccgcctccaagctttcccaattacaccgccacaaggagatcttacaagaccactggaagagcttccgcaatatcaggtcctccatccagcaagagcgcaacagattgaacttgttattcagcgtgaagaacgatattgctaattccacaacggacgcgccagctcctataggggatgctgacgagtacattcagaacgaaacaaggagaatcgatcagtccaacaacgtagtcgaccgtctcatctcccaagcctgggagactaggagccagttccactctcagagcaacgtgttgaacacggcaaacaacaaggtgttgcaaactttacaaagaataccaggtgtcaatcagcttattatgaagattaacacgagaaggaagaaaaacgcgtttgtattggccacgataaccaccctttgtatattgtttttgtttttcacatggtga

SEQ ID NO: 4755 - DNA, 5607 bp, Saccharomyces cerevisiae
atgtccatttcttctgacgaagcgaaagaaaaacagctcgtggagaaggcagaattgcgcctggctatcgcagattcccctcaaaagttcgaaactaatctgcagacttttttgcctccattattactaaaactcgcctctccacatgcctccgttagaacagcagtattttcagccttaaaaaacctcatttctaggataaatacgctgccccaggttcagcttcctgtgagggcgcttattgtccaagcaaaggaacccaatttagccgctcaacaagactcgaccaatgtccgcctttacagtctgctactggcgtctaaaggcatagataggctttccttgcaagatagacagcagttgctaccgttagtcgtttcgaacatctcgtgtctaacaggcacagtagccgccagaatgttccacatccttttgaagcttattttggaatgggttgcaccccaggagtcttcacatgagcaggaagaatttgttcagttccttcaactggacaacgacggtttttcgtttttgatgcgccaatttaccaggttttttctgctggtaccttcaaagcaagtccaggtttctcaacagcccctgtcgagaggttacacatgtccgggcctatctctaactgatgtggcattctttacttatgatgcgggcgttactttcaacaaagaacagctgaataagttcaaaaaggctatttttcaatttgtttgccgtggcatggcggctacccaaactattgagcagtcacctaggatgattgaactgatggaatttttgtgcgttgtctctacggattctacaaatttatctgatgatgcggctcagttcatgaaacggtttcccatgccttatgaaaacgaagagttcatcacctttcttcagacgctgtacatcggcaacacagcaaatggaagaccgccggtcaaggctatcttgcaagaaaaaatcctgtccatattaaacagaagtcacttcgccaccaccaaagcagaatgtatttcgttgatttgctctattggattgcattcatctgagtataaacttagatctttgactctttcttttattcgacacgtagcaaaattaaattacaaaaatttaaatcctgcttcttcatcaccttcatcaacagacttttccacttgtattgtttccttgattagaaataatcttcatgccgaaggttggccgaagttacaattggggcctcagaccccagctttcaatacagccattctgcagagacagctgcaatatgaaacattgggtgatatcttgaaaagagattttgagcttgtaagtgacttatcctatattgaatttctattcgagtccttgaaaaatgacttaccacagttccgctccagtattcaggagtctctgctttctctagtaggccatttatcaattctaccccaacaatctaaattaaaattaaaaaatttgctcaggaaaaacctgtcaattgacgagcaacagcgggaggataataatgatgctgttaattctataatggcactcaaatttgtatctataaaattcactaacgctgccttccccttccatgatcctgaggcaaggttattcaatatttggggtactgtacgaacgaatagatttgacattattgaagaatcctttaaggggcttcaacccttttggttcagggttaataatgcttccataaatacatcagctaccgtgaaaacatccgatctgttgggctctcacttgtcagagactgaatttcctccattccgggaatttcttcaggttttgatcgaccagctagattcggaagctgcatcaattacacgaaaatcactgaacaacgctgtcagatttagtaaacaatgtctcatttccaatgcaatatacggtaaaaaaacaatggttatacaagatgaggattggtcagttagaatagacaaagctttggaacttgacgacacagttgtgtcccgagttaatgaaatggttcaaggcatgaatgatgatattttcattcgctatttgactcttctgtcaaacgagtttacagctacgaacagtaagggtgaacaaattgcaatatttccatatcaagatccaatttttggttctgtcttattaactttattgaattttgtgagcaataatgttttacggagattggaaattcttgttcccgatttataccatctagttatcatgaaatttcaatcgttgagtgataatgatcttgcagtctgtgcaaccatcatcggtataatttctactgctatcgcagactcgactcacgttaagcgaatcacaaaaatagcacaatcacaaacaatggcagagacatatgttgcatcttatgttgttccacgattatatttgaaagatcaaacaaatcacattgaatctgacagtatcctaaacctattaaacattttaacaactcatctatcgcatcctggcactaacaaggatatgatattaaagttggtctgccaagtgacaaaattcggtttacttctccaagtaagtgcacaagaaaggaaagatttcttgaaaaaagtcatggatactatacaagacaaattgatcaacgatgtgacagcaattcaaacgtggtcatacctatcactatattcaacagatttagagaattccagtctttttcaagaaaaattacttgaaactaacgtttctaagcaaaacgatttcttattttcagttggtgaatctttaagtgttgtggctggtaaatggtcaagtaagtacttgatcaaacagattgatattcctaatttcaatgttgagatcatgcaacaaaaattccctgctacaaatgttaccactatacttgatgagatcttttcaggttgcgactctacaaaaccctctctgaggaaggcatcttgtatttggctgttatcatatattcagtacttaggtcatttgccagaagtaagttccaaatgtaatgatattcacttgagatttatgagatttttggcagacagagatgaatttatacaggattccgccgctagagggctttctttggtttacgaaattggtggttctgatttaaaagaaagtatggtcaaagggctacttaaatcatttacagaatcaaccgcagggtctgcatctacaagtgctactggcatctcaggttcagtctccgaagagaccgagttatttgagccaggagttttaaacactggagatgggtccattagcacttacaaagatattttgaatttggcatctgaagttggggaccccgcacttgtttacaaatttatgtctcttgccaaaagttctgcgctatggtcatctaggaaaggtatcgcattcggtcttggcgccattatgtctaaatcttctttagaagaattattactaaaggatcagcaaactgccaagaaattaattccaaaattgtatagatacagatttgatccatttcaagcagtatcacgctcgatgacagacatctggaatactttaattccagaatcctctttgacgatttccctctatttcaatgatattcttgatgagcttttatgtggcatggctaataaagaatggagggtcagggaggccagtacttcagctttattacaattgattcaatctcaaccgcaagagaaattttccgaaaaaatgctgaaaatttggacaatggcattcagaacgatggatgatataaaagatagtgtccgtgaagttggtaccaagttcaccactgtattggccaaaattttggcaagatctattgatgtggaaaaaggtgtgaaccctaccaagtctaaggaaatactagacaatattttgccatttttatggggtccacatggtctgaacagtgatgcagaagaggttagaaattttgcgctcacaactttgattgacttggtgaaacactcccctggagccatcaaaccgttcactccaaaattaatttacgattttatcacattgttttcttccattgaacctcaggtgattaactatttggcattaaatgctgcaaattataacattgatgctaacgtcattgatacgcaaaggaaaaatggtgtcacaaattcacctctattccagaccatcgaaaaattaattaacaattcagatgattgtatgatggaagaaataattaatgtggttattaaagctagcagaaaatcagtcggattgccatctaaggtcgcatcctcacttgtcataattatcttagtgaaacggtactctatcgaaatgaaaccctattctggaaagttgttgaaagtctgcttgactatgtttgaagatagaaatgagtcggttaatatagcatttgcaatttcaatgggatatttattcaaggtttcagcgttggataagtgtattaaatactctgaaaaactaataacgaaatattttgagcctacctcaacagaaaataacaagaaagttgttggtacagcgatcgactcgattttgaattatgcgaagtcagaattcgataatgtggcaagtgtatttatgcctttgattttcatagcatgcaatgatgaagataaagatttggaaaccttatataataaaatctggacggaagcttccagctctggcgccggtacggttaaattatacctgccagaaattttaaacgtactttgtgtgaatataaagtcaaatgatttctctattcgaaaaacatgtgctaaatcagtcatacagttgtgtggcggtattaatgatagtattccttatccacaaattgttaagttatttgatatatcgagggaggcattaagtggtagatcatgggatggtaaagagcatatagtggcagcattggtttcattaacagaaaaattttctcaaactgtggccgacaataatgatctacaagaatcaattaatcatgtaatgtacactgaagtttcgagaaaaagtatgaaatatgttaagaagatactaccgctttacgcgagatatatcaatgtgaatccacaagaagagacgatcaccttcttaattgaaaaagccaaagaaatgattcgattgttgggcagcgaatctgatgatagtgaaggttccattaagcagacttccgatgaatccacaataaaaagaattaagcctaacactgaaattacacaaaagtcatccaaagagaacattgagaacgaagagtatgtgatcaacttgttaaaagttagtgttgacatatgcaacaattctaaatcgaggtatccgatgaatttattggagttcattatagatgagattgcataccttttccataatgacagaattatacacacatggagaacgcaactagctgctagtgaaattggtatctcgatagttggaagatttagtaccataagtagcgctgactttatccaaaatgtggggagactatgggatcaaacttttccaataaattgtaacaaggaaaccattgagaatgtgaaattgcagatgataaagttcggtggcctgatcattcagaagattccaagcttgcagaacaatatcgaggaaaacttacggttgttgaacagtattgattcaacgagcagaattgagttggaattgaaaaatattggtctatga

SEQ ID NO: 4756 - DNA, 5607 bp, Artificial Sequence
  Description of Artificial Sequence: Synthetic polynucleotide
atgtccatttcttctgacgaagcgaaagaaaaacagctcgtggagaaggcagaattgcgcttagctatcgcagattcccctcaaaagttcgaaactaatttacagacttttttgcctccattattattgaaactcgcctctccacatgcctccgttagaacagcagtattttctgccttaaaaaacctcatttctaggataaatacgttaccccaggttcagcttcctgtgagggcgcttattgtccaagcaaaggaacccaatttagccgctcaacaagactctaccaatgtccgcctttacagtttattattggcgtctaaaggcatagataggctttccttgcaagatagacagcagttgttaccgttagtcgtttctaacatcagttgtttaacaggcacagtagccgccagaatgttccacatccttttgaagcttattttggaatgggttgcaccccaggagtcttctcatgagcaggaagaatttgttcagttccttcaattggacaacgacggtttttcttttttgatgcgccaatttaccaggttttttttattggtaccttctaagcaagtccaggtttctcaacagcccttatctagaggttacacatgtccgggcttatctttgactgatgtggcattctttacttatgatgcgggcgttactttcaacaaagaacagttgaataagttcaaaaaggctatttttcaatttgtttgccgtggcatggcggctacccaaactattgagcagtctcctaggatgattgaattgatggaatttttgtgcgttgtctctacggattctacaaatttatctgatgatgcggctcagttcatgaaaagatttcccatgccttatgaaaacgaagagttcatcacctttcttcagacgttgtacatcggcaacacagcaaatggaagaccgccggtcaaggctatcttgcaagaaaaaatcttgtccatattaaacagaagtcacttcgccaccaccaaagcagaatgtatttctttgatttgctctattggattgcattcttctgagtataaacttagatctttgactctttcttttattagacacgtagcaaaattaaattacaaaaatttaaatcctgcttcttcttctccttcttctacagacttttccacttgtattgtttccttgattagaaataatcttcatgccgaaggttggccgaagttacaattggggcctcagaccccagctttcaatacagccattttacagagacagttacaatatgaaacattgggtgatatcttgaaaagagattttgagcttgtaagtgacttatcctatattgaatttcttttcgagtccttgaaaaatgacttaccacagttccgctccagtattcaggagtctttactttctttagtaggccatttatccattttgccccaacaatctaaattaaaattaaaaaatttgctcaggaaaaacttatccattgacgagcaacagagagaggataataatgatgctgttaattctataatggcactcaaatttgtatctataaaattcactaacgctgccttccccttccatgatcctgaggcaaggttattcaatatttggggtactgtaagaacgaatagatttgacattattgaagaatcctttaaggggcttcaacccttttggttcagggttaataatgcttccataaatacatctgctaccgtgaaaacatccgatttattgggctctcacttgagtgagactgaatttcctccattcagagaatttcttcaggttttgatcgaccagttagattctgaagctgcatctattacaagaaaatctttgaacaacgctgtcagatttagtaaacaatgtctcatttccaatgcaatatacggtaaaaaaacaatggttatacaagatgaggattggtctgttagaatagacaaagctttggaacttgacgacacagttgtgtccagagttaatgaaatggttcaaggcatgaatgatgatattttcattcgctatttgactcttttatctaacgagtttacagctacgaacagtaagggtgaacaaattgcaatatttccatatcaagatccaatttttggttctgtcttattaactttattgaattttgtgagcaataatgttttaagaagattggaaattcttgttcccgatttataccatttggttatcatgaaatttcaatctttgagtgataatgatcttgcagtctgtgcaaccatcatcggtataatttctactgctatcgcagactctactcacgttaagagaatcacaaaaatagcacaatctcaaacaatggcagagacatatgttgcatcttatgttgttccaagattatatttgaaagatcaaacaaatcacattgaatctgacagtatcttgaacttattaaacattttaacaactcatttatctcatcctggcactaacaaggatatgatattaaagttggtctgccaagtgacaaaattcggtttacttctccaagtaagtgcacaagaaaggaaagatttcttgaaaaaagtcatggatactatacaagacaaattgatcaacgatgtgacagcaattcaaacgtggagttacctttctttgtattctacagatttagagaattccagtctttttcaagaaaaattacttgaaactaacgtttctaagcaaaacgatttcttattttctgttggtgaatctttaagtgttgtggctggtaaatggtctagtaagtacttgatcaaacagattgatattcctaatttcaatgttgagatcatgcaacaaaaattccctgctacaaatgttaccactatacttgatgagatcttttctggttgcgactctacaaaaccctctttgaggaaggcatcttgtatttggttgttatcttatattcagtacttaggtcatttgccagaagtaagttccaaatgtaatgatattcacttgagatttatgagatttttggcagacagagatgaatttatacaggattccgccgctagagggctttctttggtttacgaaattggtggttctgatttaaaagaaagtatggtcaaagggttacttaaaagttttacagaaagtaccgcagggtctgcatctacaagtgctactggcatcagtggttctgtctccgaagagaccgagttatttgagccaggagttttaaacactggagatgggtccattagcacttacaaagatattttgaatttggcatctgaagttggggaccccgcacttgtttacaaatttatgtctcttgccaaaagttctgcgctttggtcttctaggaaaggtatcgcattcggtcttggcgccattatgtctaaatcttctttagaagaattattattgaaggatcagcaaactgccaagaaattaattccaaaattgtatagatacagatttgatccatttcaagcagtatcccgcagtatgacagacatctggaatactttaattccagaatcctctttgacgatttccctctatttcaatgatattcttgatgagcttttatgtggcatggctaataaagaatggagggtcagggaggccagtactagtgctttattacaattgattcaatctcaaccgcaagagaaattttccgaaaaaatgttgaaaatttggacaatggcattcagaacgatggatgatataaaagatagtgtccgtgaagttggtaccaagttcaccactgtattggccaaaattttggcaagatctattgatgtggaaaaaggtgtgaaccctaccaagtctaaggaaatattggacaatattttgccatttttatggggtccacatggtttgaacagtgatgcagaagaggttagaaattttgcgctcacaactttgattgacttggtgaaacactcccctggagccatcaaaccgttcactccaaaattaatttacgattttatcacattgttttcttccattgaacctcaggtgattaactatttggcattaaatgctgcaaattataacattgatgctaacgtcattgatacgcaaaggaaaaatggtgtcacaaattctcctcttttccagaccatcgaaaaattaattaacaattctgatgattgtatgatggaagaaataattaatgtggttattaaagctagcagaaaatctgtcggattgccatctaaggtcgcatcctctcttgtcataattatcttagtgaaaagatactctatcgaaatgaaaccctattctggaaagttgttgaaagtctgcttgactatgtttgaagatagaaatgagtctgttaatatagcatttgcaatttccatgggatatttattcaaggtttctgcgttggataagtgtattaaatactctgaaaaattgataacgaaatattttgagcctacctctacagaaaataacaagaaagttgttggtacagcgatcgacagtattttgaattatgcgaagtctgaattcgataatgtggcaagtgtatttatgcctttgattttcatagcatgcaatgatgaagataaagatttggaaaccttatataataaaatctggacggaagcttccagctctggcgccggtacggttaaattatacttgccagaaattttaaacgtactttgtgtgaatataaagagcaatgatttctctattagaaaaacatgtgctaaatctgtcatacagttgtgtggcggtattaatgatagtattccttatccacaaattgttaagttatttgatatatctagggaggcattaagtggtagaagttgggatggtaaagagcatatagtggcagcattggtttctttaacagaaaaattttctcaaactgtggccgacaataatgatttgcaagaaagtattaatcatgtaatgtacactgaagtttctagaaaaagtatgaaatatgttaagaagatattaccgctttacgcgagatatatcaatgtgaatccacaagaagagacgatcaccttcttaattgaaaaagccaaagaaatgattagattgttgggcagcgaatctgatgatagtgaaggttccattaagcagacttccgatgaatccacaataaaaagaattaagcctaacactgaaattacacaaaagtcttccaaagagaacattgagaacgaagagtatgtgatcaacttgttaaaagttagtgttgacatatgcaacaattctaaatctaggtatccgatgaatttattggagttcattatagatgagattgcataccttttccataatgacagaattatacacacatggagaacgcaattggctgctagtgaaattggtatctccatagttggaagatttagtaccataagtagcgctgactttatccaaaatgtggggagattatgggatcaaacttttccaataaattgtaacaaggaaaccattgagaatgtgaaattgcagatgataaagttcggtggcttaatcattcagaagattccaagcttgcagaacaatatcgaggaaaacttaagattgttgaacagtattgattctacgagcagaattgagttggaattgaaaaatattggtctttga

SEQ ID NO: 4757 - DNA, 2040 bp, Saccharomyces cerevisiae
atgcacgacaagaagtcgcccatggcgaattcccactacttgaaaaatctaaaacagcagtttcgcaacaagaaccttatcgaaacgactatccatctagtaaagtgcaatgaccatgactcattggcctttttagcaagaacatacggggttccaccacagttgcgacacgtcgtgtggccgatcctgctgaagtaccacccaatgtgcatttcaccaaacattacctccaataccatttcttgggacccaataaccaatgatttcatacttaatgacccttttctgaaaagtaaggctccaaccgataagcaagacaagagcgacgatgaaaatattctcccgtacgatatcgaatccattatcctgcatgatttgaaaaaatacttccactccaggtctaatcctgctggctcatcgagtaatgctaacaccaccaatatcgccaccccgacacctgtttcgtcgtccgacgcttccactatttcttctatggaggtactgtctccctcattagactatgagttccagatcatcgagactttgaaaaatgccatcgtgaaatttctgctgaagtggtcaaaaatcttcaagtacgaaagcggtcttgcctggattgctctgggattggctgaatggtatcccatctatccctacgaaaccatgtctcctttcaacgagactcattcattttacgaagtggaggattatgtagttctgagcggaagaaagcacgctcttctaagcactaacaacggcaataacggaaatagcaactcctctagcaacaacaccaacaacaataacacgaatataacatcgggcatgcacaacttgagcatcaacacaaataccagcttgcacaattctccgtacatttctcacacgttatcatatctttataaggaatatccgttaccctttgagctgcgatcaaaattgcctacaaaaccaattttctcatttagtgcccttttcgaaagactagctcttgtcattctacattgccctgataccatactggcacacaaacaattgaaaaatgactcgaacgcatcttccagctcaaaggcaaactcaaacttcaacacaaattatttccctattatatctggtggcgatctttcatttcagacccaagtttttttcaaggtattctcttcaattttgccagagctgtaccaacctttgacagaggaatcttccttacaaccttcgtcgtcaagaaactcctggatatattggtggttgaaatgctctggagctaaagctttacaaagacaagatagagggcgtgtatgggatttgctgctcggttggaggcccaaaccaaacatggacacgataaatttctttttgaactataacgataagaaaatggatcacctctatcacgatacaccacaatgtgacaacgagcagtactggatgaaagattggatcgctttgtacaataatgatccgttttggttccccgatctggatagcatggcactaggttcgaaaaaatttccctatgattatagtgtcttcaaagaattaattttaaggaatagatacggaggtactcaaagcaaagctcaaaaggacaacacagtaccatctcctggtagtgattcaaatgataagtcagaattgaaactaccgttttcttccattgatcctcatatgcaattgattttcattttcatcgcgattttgcagtttaacgaatttaagctattagaatttgaagaagcggaaatttctgagtttcttaataacgttcctctgctaacaaaatttgatgactcttcctataggaagttatacgagaatacagaatctagcataaccagtttgccttcttcaccgactacttctacaatggcgtcattacaatccagttccaattcgagtgcccatatctcgaattatcacatgttaatcgaagtcggtaatgatgctaaggcttcccattgttttgatgatcttttaaatatggctggggatatttggaggaaatggctatggagagagttagaggaaagctctctttga

SEQ ID NO: 4758 - DNA, 2040 bp, Artificial Sequence
  Description of Artificial Sequence: Synthetic polynucleotide
atgcacgacaagaagtctcccatggcgaattcccactacttgaaaaatttgaaacagcagtttcgcaacaagaaccttatcgaaacgactatccatttggtaaagtgcaatgaccatgactctttggcctttttagcaagaacatacggggttccaccacagttgagacacgtcgtgtggccgatcttattgaagtaccacccaatgtgcatttctccaaacattacctccaataccatttcttgggacccaataaccaatgatttcatacttaatgacccttttttgaaaagtaaggctccaaccgataagcaagacaagagcgacgatgaaaatattctcccgtacgatatcgaatccattatcttgcatgatttgaaaaaatacttccactccaggtctaatcctgctggctcctccagtaatgctaacaccaccaatatcgccaccccgacacctgtttcttcttccgacgcttccactatttcttctatggaggtattatctccctctttagactatgagttccagatcatcgagactttgaaaaatgccatcgtgaaatttttattgaagtggtccaaaatcttcaagtacgaaagcggtcttgcctggattgctttaggattggctgaatggtatcccatctatccctacgaaaccatgtctcctttcaacgagactcattctttttacgaagtggaggattatgtagttttaagcggaagaaagcacgctcttttgagcactaacaacggcaataacggaaatagcaactcctctagcaacaacaccaacaacaataacacgaatataacaagtggcatgcacaacttgagcatcaacacaaataccagcttgcacaattctccgtacatttctcacacgttatcttatctttataaggaatatccgttaccctttgagttaagaagtaaattgcctacaaaaccaattttctcctttagtgcccttttcgaaagattggctcttgtcattttgcattgccctgataccatattggcacacaaacaattgaaaaatgactccaacgcatcttccagctctaaggcaaactccaacttcaacacaaattatttccctattatatctggtggcgatctttcttttcagacccaagtttttttcaaggtattctcttccattttgccagagttataccaacctttgacagaggaatcttccttacaaccttcttcttctagaaactcctggatatattggtggttgaaatgctctggagctaaagctttacaaagacaagatagagggcgtgtatgggatttgttgctcggttggaggcccaaaccaaacatggacacgataaatttctttttgaactataacgataagaaaatggatcacctctatcacgatacaccacaatgtgacaacgagcagtactggatgaaagattggatcgctttgtacaataatgatccgttttggttccccgatttggatagcatggcattgggttccaaaaaatttccctatgattatagtgtcttcaaagaattaattttaaggaatagatacggaggtactcaaagcaaagctcaaaaggacaacacagtaccatctcctggtagtgattctaatgataagtctgaattgaaattaccgttttcttccattgatcctcatatgcaattgattttcattttcatcgcgattttgcagtttaacgaatttaagcttttagaatttgaagaagcggaaatttctgagtttcttaataacgttcctttattaacaaaatttgatgactcttcctataggaagttatacgagaatacagaatctagcataaccagtttgccttcttctccgactacttctacaatggcgtctttacaatccagttccaatagtagtgcccatatctctaattatcacatgttaatcgaagtcggtaatgatgctaaggcttcccattgttttgatgatcttttaaatatggctggggatatttggaggaaatggttatggagagagttagaggaaagctctctttga

SEQ ID NO: 4759 - DNA, 1818 bp, Saccharomyces cerevisiae
atgcagacgtcaatggtgagcgcaaaagttagtatatggctagtatgtagcgttatatgcagtagcctggtacgggctacgcaatctgtgtgttcgtcgcaaaacacagcgaccactgacggtgtacgaaatcaatttcagagtaatggttggtgttcaaataactgtgctggtcatcagtttgccatcgtacaggggttcatgtgctggtgcagtgattcggaaccgagcactcagacatcggtgggagactgcagtggcacttgtcccggttatggctacgaagattgtggtaatgcggataaggatctttttggttatatatatctggggcaaaccccgctaagttctgtacagagtgtggaaacgtcaacagagtccagtgtgtacgtttcaagtagctctatcacgagtagtagtagtacgagtattgtggacacaaccacaatctcgccgactctgacgtcaacgagtacgaccccattgacaaccgcctcaaccagtacaacaccatcaactgatataacatcggcactgcccacgactacaagcacaaagttgtcaacatccattcccacaagcacgacatcgtcaacctctaccaccacaagtacctcatcgtcgacttctacgaccgtaagtgtcacatcatcaacatctaccaccacaagtactacgtcgtcaaccctcatttccacgagcacatcatcatcatcatcatcaactccaaccacaacatcgtcagcccccatttctacaagcacgacgtcgtcaacttccacttcaacaagtacaacatcgccaacttcttcttcagcacctacaagctcgtctaatacaacaccaacgagcacaacgttcactacgacatcacccagtacagccccttcaagcactacggttacttacaccagtaccacagcatctccaataacgtccactataacttctgtaaacctgcagacctccttaaagtattctgtgataacagtgacttcagtgcacaccatggacactaacatttcggaaatcacctcgagatatctcaccatgaaaaaagtaataacgcagatttactcttccaccctcggggctactcctacttctgcagtggctactacgtctgccagcgtaggtggtagaataacaaacaataacaatagtaacaccaccaacagcaatacaccaactaacaagtctacagaaaagaaagggtactgggattcgcccgggaaaatagccgctactttcgtcgtggttggagtggtatgtttggtaattatatgcatactaatatacttaatacatcattatagaacaagacccgctcggaaggctcaagattttgagaatgaatatcagagtaagttttaccagtccaagtacccaaatgaagttaccactaccacgttacacacgccttcaccatcttcaaattcaactttctcgaccccaagattaatatacactgatgaaaagggacaaattatgtctgaatcaccatccccacgtcaatctacgtattccttgactgcaggcagtccaccaaatgacccaagcacgttggcaagcccatttcacgatcccattcttcccagaagaacttctacttttcttcattcgcccattcaaaagcaacacgaaaaaatggaatcaaacgttactctaggtgaagacacggtactggtggatcagaggctagacccaagtaagatgcttaacactttagcaaatgacgatgccacaaaccactctaccatttcgttatcagacaacgtagactactccaggagggttctgcggctaatgaacgaataa

SEQ ID NO: 4760 - DNA, 1818 bp, Artificial Sequence
  Description of Artificial Sequence: Synthetic polynucleotide
atgcagacgtctatggtgagcgcaaaagttagtatatggttggtatgtagcgttatatgcagtagcttagtaagagctacgcaatctgtgtgttcttctcaaaacacagcgaccactgacggtgtaagaaatcaatttcagagtaatggttggtgttctaataactgtgctggtcatcagtttgccatcgtacaggggttcatgtgctggtgcagtgattctgaaccgagcactcagacatctgtgggagactgcagtggcacttgtcccggttatggctacgaagattgtggtaatgcggataaggatctttttggttatatatatttggggcaaaccccgttaagttctgtacagagtgtggaaacgagtacagagtccagtgtgtacgtttctagtagctctatcacgagtagtagtagtacgagtattgtggacacaaccacaatctctccgactttaacgtccacgagtacgaccccattgacaaccgccagcaccagtacaacaccatctactgatataacaagtgcattgcccacgactacaagcacaaagttgagtacatccattcccacaagcacgacatcttccacctctaccaccacaagtacctcttcttctacttctacgaccgtaagtgtcacatcttctacatctaccaccacaagtactacgtcttccaccctcatttccacgagcacatcttcttcttcttcttctactccaaccacaacatcttctgcccccatttctacaagcacgacgtcttctacttccacttctacaagtacaacatctccaacttcttcttctgcacctacaagctcttctaatacaacaccaacgagcacaacgttcactacgacatctcccagtacagccccttccagcactacggttacttacaccagtaccacagcatctccaataacgtccactataacttctgtaaacttacagacctccttaaagtattctgtgataacagtgacttctgtgcacaccatggacactaacatttctgaaatcacctccagatatctcaccatgaaaaaagtaataacgcagatttactcttccaccctcggggctactcctacttctgcagtggctactacgtctgccagcgtaggtggtagaataacaaacaataacaatagtaacaccaccaacagcaatacaccaactaacaagtctacagaaaagaaagggtactgggattctcccgggaaaatagccgctactttcgtcgtggttggagtggtatgtttggtaattatatgcatattaatatacttaatacatcattatagaacaagacccgctagaaaggctcaagattttgagaatgaatatcagagtaagttttaccagtccaagtacccaaatgaagttaccactaccacgttacacacgccttctccatcttccaattctactttctccaccccaagattaatatacactgatgaaaagggacaaattatgtctgaatctccatccccacgtcaatctacgtattccttgactgcaggcagtccaccaaatgacccaagcacgttggcaagcccatttcacgatcccattcttcccagaagaacttctacttttcttcattctcccattcaaaagcaacacgaaaaaatggaatctaacgttactttaggtgaagacacggtattggtggatcagaggttggacccaagtaagatgcttaacactttagcaaatgacgatgccacaaaccactctaccatttctttaagtgacaacgtagactactccaggagggttttaaggttgatgaacgaatga

SEQ ID NO: 4761 - DNA, 1878 bp, Saccharomyces cerevisiae
atggtgccattggaagatctgcttaataaagaaaatggcactgccgcacctcaacacagccgggagagtatagtagaaaatgggacagacgtttctaacgtcacaaagaaggacgggctgcccagtcctaacctatctaaaaggtcttctgattgttcgaagaggcctagaattaggtgtaccacggaagctattggcttgaacggtcaagaagatgaacggatgtcaccaggcagcacttcttcatcatgcttaccatatcatagtacttcacacttgaacactcctccatacgatctattgggcgcttcggcagtttcacccaccacatcatcttcctctgactcgtcctcctcctcgccattggcacaagcgcataacccggcaggtgatgacgacgatgcggataatgacggtgattctgaggatataacactatattgtaaatgggacaactgtggtatgattttcaaccaaccagagctgctatataatcatctgtgtcatgaccatgttggcaggaagtcacataagaacctacaattgaattgtcattggggagactgtaccacgaagacggagaaaagggaccatatcacctcgcatttgagagttcacgtaccattgaaaccgttcggttgctctacgtgctccaaaaagtttaaacgtccgcaagatttaaaaaagcatttgaaaattcatctggaaagtggcggtattttgaaaagaaagaggggacccaaatggggctcaaaaagaacttctaagaaaaacaaaagttgtgcaagcgacgcagtgtcgtcttgttctgcatctgtgccttccgctatagctggtagctttaagtcacattctacttctccacagatattacccccattgcccgtgggtatatctcaacatctgccttcacaacagcagcagcgggctatttccttaaaccaactatgctcagacgagctatctcagtataagccggtatattctccacaattgagtgccagattgcaaacgatcttgccgccattatactacaataacggcagcacggtaagccaaggtgccaacagtcggagcatgaatgtctacgaggacggttgttctaataagaccatagcaaacgccacccaattcttcaccaaactatcgagaaatatgacaaataactacattttgcaacaaagcggtggtagtactgagtcctcgtcatcatctgggcgcatccccgtagcacaaacaagctatgtgcagccacctaatgctccttcataccaatccgtacaaggtggtagctctatttcggccactgcaaatacagcaacttatgtgccagtacggttggccaagtatccaactggtccttcgcttactgaacatttgccacctttacattcgaacactgccggtggtgttttcaaccgccaatcacagtatgctatgccacactatccatctgttcgtgctgcgcctagctattcctccagtggctgttctatattaccgcctctacaatcaaagataccaatgttaccatcgcgccgtacaatggcaggtggaacttcattgaagcctaactgggaatttagcctgaaccaaaaaagctgtactaatgatattatcatgagtaagctggcgattgaagaagtagatgacgaaagcgagatagaggatgatttcgtagagatgttgggtatagtgaacattatcaaggactacttgttgtgctgtgtcatggaagatttagatgatgaagaaagtgaggacaaagatgaagaaaacgcattcttgcaagaatctttagaaaaattgagtttacaaaaccaaatgggaactaactcagttcgcatcttgaccaagtatcccaaaattttggtatga

SEQ ID NO: 4762 - DNA, 1878 bp, Artificial Sequence
  Description of Artificial Sequence: Synthetic polynucleotide
atggtgccattggaagatttacttaataaagaaaatggcactgccgcacctcaacacagcagagagagtatagtagaaaatgggacagacgtttctaacgtcacaaagaaggacgggcttcccagtcctaacttatctaaaaggtcttctgattgttccaagaggcctagaattaggtgtaccacggaagctattggcttgaacggtcaagaagatgaaagaatgtctccaggcagcacttcttctagttgcttaccatatcatagtacttctcacttgaacactcctccatacgatttattgggcgcttctgcagtttctcccaccacatcttcttcctctgactcttcctcctcctctccattggcacaagcgcataacccggcaggtgatgacgacgatgcggataatgacggtgattctgaggatataacattatattgtaaatgggacaactgtggtatgattttcaaccaaccagagttattatataatcatttatgtcatgaccatgttggcaggaagagtcataagaacttacaattgaattgtcattggggagactgtaccacgaagacggagaaaagggaccatatcaccagtcatttgagagttcacgtaccattgaaaccgttcggttgctctacgtgctccaaaaagtttaaacgtccgcaagatttaaaaaagcatttgaaaattcatttggaaagtggcggtattttgaaaagaaagaggggacccaaatggggctctaaaagaacttctaagaaaaacaaaagttgtgcaagcgacgcagtgtcttcttgttctgcatctgtgccttccgctatagctggtagctttaagagtcattctacttctccacagatattacccccattgcccgtgggtatatctcaacatttaccttctcaacagcagcagcgtgctatttccttaaaccaattatgctctgacgagctttctcagtataagccggtatattctccacaattgagtgccagattgcaaacgatcttgccgccattatactacaataacggcagcacggtaagccaaggtgccaacagtagaagcatgaatgtctacgaggacggttgttctaataagaccatagcaaacgccacccaattcttcaccaaattatctagaaatatgacaaataactacattttgcaacaaagcggtggtagtactgagtcctcttcttcttctgggcgcatccccgtagcacaaacaagctatgtgcagccacctaatgctccttcttaccaatccgtacaaggtggtagctctatttctgccactgcaaatacagcaacttatgtgccagtaagattggccaagtatccaactggtccttctcttactgaacatttgccacctttacattccaacactgccggtggtgttttcaaccgccaatctcagtatgctatgccacactatccatctgttcgtgctgcgcctagctattcctccagtggctgttctatattaccgcctttacaatccaagataccaatgttaccaagccgccgtacaatggcaggtggaacttctttgaagcctaactgggaatttagcttgaaccaaaaaagctgtactaatgatattatcatgagtaagttggcgattgaagaagtagatgacgaaagcgagatagaggatgatttcgtagagatgttgggtatagtgaacattatcaaggactacttgttgtgctgtgtcatggaagatttagatgatgaagaaagtgaggacaaagatgaagaaaacgcattcttgcaagaatctttagaaaaattgagtttacaaaaccaaatgggaactaactctgttcgcatcttgaccaagtatcccaaaattttggtatga

SEQ ID NO: 4763 - DNA, 948 bp, Saccharomyces cerevisiae
atgaaatcctcagagccagcgccagcgaccccgaccgggttcagaaattccatctggttcatcatcttctaccttttcgtcatccaagcgctaggttctgcaataatctcgggcggcatcgagtttgccatcgcatatgccatgtaccattcccgtgtagatcttatcaccttatgggcatttcctcacaccatttcaggcgattgtgcactaagtttattcatccaggtgggtcttacatgggctagcgaggaaattttagttggattcgatgactacaagaggcctgttttcagattgaataaatggattacgaaaccgtcaccactgaaaaccgaatctaacgaagaaataccaccccctaaaaagcgtttcattgtggattacttcgaatccaaagacaacgtcgttgcgaagcagaacactctgtatcataagcataattggctctttggctatttagaggtcaatagaggaatcattcccaaaggtaaagaagctacgttgaaaggttttctcacatctcagttcattcatgattctactcagtccaaattcatgaactttatagaatggtttgtgcagaaattcatcagatctatgatcctagccattgccatgttcattgtcatttggccagtcactatgggtatccttgctggtataggccataaggtcgggtcccacgactactacttcaacgattatccactaccgcaggtcatgaagttgatttatgccgttgtaattgcctttgtatgcactccagtggccatcatcgtcattgtgttgagaaaccagtttcacgaggaactttactatgaaggcttagcaaacggtacgctacagcaggatcaagaagtttgctccacgggtaatcgcagctcgggatcaaccgatcaagatatcagtactaccaaacaacagtctcaagaagcggtagcgtga

SEQ ID NO: 4764 - DNA, 948 bp, Artificial Sequence
  Description of Artificial Sequence: Synthetic polynucleotide
atgaaatcctctgagccagcgccagcgaccccgaccgggttcagaaattccatctggttcatcatcttctaccttttcgtcatccaagcgcttggttctgcaataatcagtggcggcatcgagtttgccatcgcatatgccatgtaccattcccgtgtagatcttatcaccttatgggcatttcctcacaccatttctggcgattgtgcattaagtttattcatccaggtgggtcttacatgggctagcgaggaaattttagttggattcgatgactacaagaggcctgttttcagattgaataaatggattacgaaaccgtctccattgaaaaccgaatctaacgaagaaataccaccccctaaaaagcgtttcattgtggattacttcgaatccaaagacaacgtcgttgcgaagcagaacactttatatcataagcataattggctctttggctatttagaggtcaatagaggaatcattcccaaaggtaaagaagctacgttgaaaggttttctcacatctcagttcattcatgattctactcagtccaaattcatgaactttatagaatggtttgtgcagaaattcatcagatctatgatcttggccattgccatgttcattgtcatttggccagtcactatgggtatccttgctggtataggccataaggtcgggtcccacgactactacttcaacgattatccattaccgcaggtcatgaagttgatttatgccgttgtaattgcctttgtatgcactccagtggccatcatcgtcattgtgttgagaaaccagtttcacgaggaactttactatgaaggcttagcaaacggtacgttgcagcaggatcaagaagtttgctccacgggtaatcgcagcagtggatctaccgatcaagatatcagtactaccaaacaacagtctcaagaagcggtagcgtga

SEQ ID NO: 4765 - DNA, 999 bp, Saccharomyces cerevisiae
atgggtgtcatcaagaagaaaagatcgcaccatggaaaggcttcgcgccaacaatactactctggggtacaggttgggggagtaggcagcatgggcgccataaacaataacatcccgtcgttgacgagcttcgcggaggaaaacaactatcagtacggatacagcggctccagtgccggcatgaatggcagatcgcttacgtacgcgcagcaacagcttaataagcaaagacaggacttcgaacgtgtacgacttagaccagaacagctcagcaatatcatacatgacgagagcgacacgatatcgttccgatccaaccttttgaagaactttataagctcgaacgacgcatttaacatgctgagtttgaccacggtaccgtgcgacagaattgagaagtccagattgttcagtgaaaaaacaataagatatctcatgcaaaaacaacacgaaatgaaaacacaagcggcagagttgcaagaaaagcctctgacgccacttaaatacacaaaacttatagctgcggcagaggacggaagccgtagcacaaaggatatgatagatgctgtcttcgagcaagatagtcatttgaggtaccagccggacggcgtggtcgtacatcgtgacgatcctgcgctggtgggtaaactccgcggagatctccgcgaagcgccggcggactactggacgcatgcttatagggatgttttggcgcaataccacgaggccaaggagcgtatcaggcagaaggaagtaactgcaggtgaagcacaggacgaagccagcttgcagcagcaacagcagcaagatttgcagcaacagcaacaagtagtgactacagttgcctcgcaaagtcctcatgcaactgcaacggaaaaggagccagtacccgccgtggttgacgacccactggagaacatgttcggagattattccaatgagccgttcaacaccaatttcgacgatgaatttggagatcttgatgctgtatttttttaa

SEQ ID NO: 4766 - DNA, 999 bp, Artificial Sequence
  Description of Artificial Sequence: Synthetic polynucleotide
atgggtgtcatcaagaagaaaagaagtcaccatggaaaggctagtcgccaacaatactactctggggtacaggttgggggagtaggcagcatgggcgccataaacaataacatcccgtctttgacgagcttcgcggaggaaaacaactatcagtacggatacagcggctccagtgccggcatgaatggcagatctcttacgtacgcgcagcaacagcttaataagcaaagacaggacttcgaacgtgtacgtcttagaccagaacagctcagcaatatcatacatgacgagagcgacacgatatctttcagatccaaccttttgaagaactttataagcagtaacgacgcatttaacatgttaagtttgaccacggtaccgtgcgacagaattgagaagtccagattgttcagtgaaaaaacaataagatatctcatgcaaaaacaacacgaaatgaaaacacaagcggcagagttgcaagaaaagcctttgacgccacttaaatacacaaaacttatagctgcggcagaggacggaagccgtagcacaaaggatatgatagatgctgtcttcgagcaagatagtcatttgaggtaccagccggacggcgtggtcgtacatcgtgacgatcctgcgttagtgggtaaactccgcggagatctccgcgaagcgccggcggactactggacgcatgcttatagggatgttttggcgcaataccacgaggccaaggagcgtatcaggcagaaggaagtaactgcaggtgaagcacaggacgaagccagcttgcagcagcaacagcagcaagatttgcagcaacagcaacaagtagtgactacagttgcctctcaaagtcctcatgcaactgcaacggaaaaggagccagtacccgccgtggttgacgacccattggagaacatgttcggagattattccaatgagccgttcaacaccaatttcgacgatgaatttggagatcttgatgctgtatttttttga

SEQ ID NO: 4767 - DNA, 2142 bp, Saccharomyces cerevisiae
atgaaaaccgaaatcagcactgcggattcccttcgtgatcctccctctaatggtctaaaggccgactctgagctggttatcagagaggatatagaccaatttttgccttcggaagtatcttcgttggggtcagatcaccagaatgatggtgaggattcagacactgacagtgacaactttttgcaagaccctgaagacgatgtggatgaagaaagcactggtagaggtacagtcactaccacttccacatccactgagtcaagaggccgtccatcttcttgtatcttcgtggcaagcttagcagcagccctatccgatgacgaattatgtctgtcggtgactgaaaatttcaaaaaatacggtgatttggctagagttaaagttttgcgtgataacgcaaatagaccttatgcttttgttcaatacaacaacgatcatgatgctaaacatgctctgatccgcgctcagggtactttattaaatggcagaaggttgcgttgtgaacctgcaaaagtgaacaggacattgtacttgaaaaaccagcaaagtattgatttcaacgagatcagtcaaatttgtgaaaaatttggtggtttggaacagattgttcctgatagaactgataatcaatacacgagaagatatacttatccgatatcttcggcaaattcttggtttgttcaattcgtttacagagacgatgcaatcagagcttatgcgaatttacgaactgatcccaattggatcatcgaatgggcacaaaatataaacgtcccaaaaaattataaccttttacacaaaagcaaattcaaaagttccaaataccatcaaaacaacggtattatcaataacgatggtagtaacaacaacgataataataatagtaataataataatagagaggattcaaggaggaatggcgacgttatagaagaggagtgcggacatgtgcatggtagtgattcagaggaaaaattgacaagcgatggtatttatgacgacgaagataaagattccgagatcaccattgataaaagatccattttcgtgggtcaattagacaaagaaaccaccagagaggaattgaatagaagattttccactcatggtaaaatccaagatattaatttaatcttcaagccaacaaacatatttgcgtttattaaatatgaaaccgaagaagctgctgctgctgctttggaaagtgaaaaccatgcaatttttttgaataagacaatgcatgttcaatataaagaggtaggtggtcgtcacaacaggaagttctctggtaagaacggtggcagcaactttaaccatcatcagttttttagcaccagatcgggcaaaacatttacagggccagaactgaacttagcaccaccaccaatcaacatgtacaggaaaatgagcggcggatcccagcaggaaagcgaaactatgatgccatacatgcccatggggcccatgcccatggggcctccaccaccaaatgcagcaagtctcagtgattttgatatgttccccccaagttactccacgtttatgaagggaatgatgccattgaggcgtaaatctatgcccaattcttggtcatccccttcttcaaagagtgtgaactctgaaaatgaaagtgttaatggtggtgatgagaattccgaattgccttccgaaattcctgaatcatctggtagatataatgctgctaattcctttaccacatataataattcctcagcaggaaactctaacaacaacaacaacaacaacaacagtaacagtaataagtctcaatataaaaagcgctatgcaaggaggtcaagctacggatacaatgaagtacctccaaaaccatactatttccagccttattactatcaccccatgcaataccatatgggcccaatgggcccattgcatccttctcaaggttctgctggaaatcaccatccatatatgatggtttatcccatgtcaccacctccgccttctgggttagatggaagcatgatccctcctccaataaatgtaagccaatcacatgctgctaatcatggcagtacccatgttcatgcgaacgaattcatatcaaacgatactggtgacataaatgaagataacaaagcttatagtttagattactaa

SEQ ID NO: 4768 - DNA, 2142 bp, Artificial Sequence
  Description of Artificial Sequence: Synthetic polynucleotide
atgaaaaccgaaatcagcactgcggattcccttcgtgatcctccctctaatggtttgaaggccgactctgagttagttatcagagaggatatagaccaatttttgccttctgaagtatcttctttggggtctgatcaccagaatgatggtgaggattctgacactgacagtgacaactttttgcaagaccctgaagacgatgtggatgaagaaagcactggtagaggtacagtcactaccacttccacatccactgagagcagaggccgtccatcttcttgtatcttcgtggcaagcttagcagcagccctttccgatgacgaattatgtctttctgtgactgaaaatttcaaaaaatacggtgatttggctagagttaaagttttgcgtgataacgcaaatagaccttatgcttttgttcaatacaacaacgatcatgatgctaaacatgctttgatccgcgctcagggtactttattaaatggcagaaggttgcgttgtgaacctgcaaaagtgaacaggacattgtacttgaaaaaccagcaaagtattgatttcaacgagatcagtcaaatttgtgaaaaatttggtggtttggaacagattgttcctgatagaactgataatcaatacacgagaagatatacttatccgatatcttctgcaaattcttggtttgttcaattcgtttacagagacgatgcaatcagagcttatgcgaatttaagaactgatcccaattggatcatcgaatgggcacaaaatataaacgtcccaaaaaattataaccttttacacaaaagcaaattcaaaagttccaaataccatcaaaacaacggtattatcaataacgatggtagtaacaacaacgataataataatagtaataataataatagagaggatagtaggaggaatggcgacgttatagaagaggagtgcggacatgtgcatggtagtgattctgaggaaaaattgacaagcgatggtatttatgacgacgaagataaagattccgagatcaccattgataaaagatccattttcgtgggtcaattagacaaagaaaccaccagagaggaattgaatagaagattttccactcatggtaaaatccaagatattaatttaatcttcaagccaacaaacatatttgcgtttattaaatatgaaaccgaagaagctgctgctgctgctttggaaagtgaaaaccatgcaatttttttgaataagacaatgcatgttcaatataaagaggtaggtggtcgtcacaacaggaagttctctggtaagaacggtggcagcaactttaaccatcatcagttttttagcaccagaagcggcaaaacatttacagggccagaattgaacttagcaccaccaccaatcaacatgtacaggaaaatgagcggcggatcccagcaggaaagcgaaactatgatgccatacatgcccatggggcccatgcccatggggcctccaccaccaaatgcagcaagtctcagtgattttgatatgttccccccaagttactccacgtttatgaagggaatgatgccattgaggcgtaaatctatgcccaattcttggtcttccccttcttccaagagtgtgaactctgaaaatgaaagtgttaatggtggtgatgagaattccgaattgccttccgaaattcctgaaagctctggtagatataatgctgctaattcctttaccacatataataattcctctgcaggaaactctaacaacaacaacaacaacaacaacagtaacagtaataagtctcaatataaaaagcgctatgcaaggaggagcagctacggatacaatgaagtacctccaaaaccatactatttccagccttattactatcaccccatgcaataccatatgggcccaatgggcccattgcatccttctcaaggttctgctggaaatcaccatccatatatgatggtttatcccatgtctccacctccgccttctgggttagatggaagcatgatccctcctccaataaatgtaagccaatctcatgctgctaatcatggcagtacccatgttcatgcgaacgaattcataagcaacgatactggtgacataaatgaagataacaaagcttatagtttagattactga

SEQ ID NO: 4769 - DNA, 3441 bp, Saccharomyces cerevisiae
atggatgaatgtttacccaattcatgtctactaggtgttcacctcgtcatttcaacgcattcggggccacaaatagtttatcactacccaccctccaatacagcatttctaacaaataatccaacgaagcatcagcacctctatggaaaccatgcaaatctaaataaaaacacaagtacaaataaagaagaaaaactctttaattctggctctacgaaaacagcttctcaaattgctctaaacgagtcagcgaaaagttacaataccgctattacgccatcaatgacaaatactaatactaataatgtgacattacctccaactagatcgcatgctaatactgtaggatcacaaagttcaattcctgcggctactaatggtgtaggttatagaaaaaccgatatcgaagatacttctcggacttttcaataccaagaaactgaatctgaaacgtcatcatcgggattaagtgacagcgaattgtccacagactacttagacatttctagcgattcgttttctatatcttcttccttatcgtcatcttctttatcttcttctccctcaagttcatcctcatcttcccctccgcaagatggcttatcaagaactaattcgagtttccaatctacggattcaatgtctccaacttcaccacaaatgataatggaaaacgatagtatttcagtagcggaatcatatctagattctgggactaataacaaatcaagggccgcttccaagagatcccagaatttcttccataaattgagtaccaagaagagtactgattcaaaaacacattctccagtaagaaagcttaaatctaagccatcacaaagcactaaaaaaggcaacaaactgttaaaaaatacgtccaatgagactgatggaaatgcttttacaggaagttgttcaatttcttctaaaaaatctttatcgagtacaggagagcataaccaagaacttcgtaatagtagcctgaacgacactcctggccaatcacctcatcattaccaccatcgttaccaccattatcataaaaatgccgcgacgagccaacgaaattcccatacccagtacgatgttgaagaagaagacatggaagtttcggcaatgttgcaggatggtaaaatctctatgaatgaaattttttttgaagaggaaaacttccaggatataaataaaattctagaatttgataatgattttgttgcagaattttgtagccctgagagggaaatgtgcaataccagattcgaattcacggtggataatttctgcttcttaggcttacctattcatgtagattctcaaggcagatggagaaaatccaagcacaaaaataaaacccgctctaaaagatcttcgagtactacaacaaacatcagtagaaagaaatctatcgcttccaaaatttcatcactgagtgagaatactttgaagaaagttaatagtggtgaagctgacactgtttatgacagtaatattggtcatgaggcttctactgatacgccgaatttgaggataaatactgatgtcagtggaaacgaatttgagagagaaaaggaagacttgggcaaaaatatgaacatgtttcatgtatgctttgttatgaatccgcatttaatcgaatataataaaaggattgatgacatgtatcagtttgttgttacaaggttatcattattgttaagatatgtgcaatcaaaaacctcgtacatttctagcgaatgccatataattttaaaggaaaaagaacgggtactgaaacattcgaaaacataccaatctataagaggcgcaggaaacaaggggaagtatctgtaccaaagaattttagccaaatcttcgttggctagggcgctaacggaatgtgttgataaaatccaacgaaatgaaatcgcatgtcttgagatcaatgacgataaagtaatttccttgcaaatcccgattcaaaacgagtttgaaaaaatgccaaacttcaaactgcaacccgtgctaagaggctcatatttgacgtccattttgaacatgaaatttttagaaaaatcatcattgagaattgaaagtcaaaatcgtcaaaacgatcaggctcaattcagtgataccaataataacatatacaggtttggcaataatattaatagtaccggccactgtggagcagcaaatgtggatgacggggacgacaatgaaagcaattactactgcgacgacaatgatgaccttttaaactatgcgctattattattggacgagccaaataatattattagctccctcgaaactttttcataccaggacgatattggcactatcatattgaaacatttagtcagaaatatccagccaaatatccctctaaggtcgtatcgctatctgataactgatttattagataacccttcttcactggacgaccttactacagaaacaaactcattggaatcaagcatactgcgctcttgcgcattgcatttaatgtattggagacatgcaagaatagtgatcccactaagctccaaatacacgtatattgtttcacccttggctcctattcaaggttatacaatagatgattataaaagtacttcacaaaatgatgggaacgtgaaaaaaatggacgatcgcgaaaataataagagtggaagcgacagagtaccactaatttatcaaaattcgatgttgttcagatccaaattcccatcattgcccagtttacccatttttttaagtttgttgtccacggacaaacctcaagcgtacagtaacataatcccatcaagggaacataagccagtttacctgaacgcgttagcgtggttaatacagtacgggtatgtaacccaattattgactttcataaatatccgagtggacaaacacataaaaatggcagtagatgaggatctagaaaaggaaggcttccgtaagactaatactgctagaaggcccagcatggactacaaaaaaactgataaaaagctggatgatgaagatgggcaaagtagagatgcaaacgccagcgaagcgtgttcaggaaagaatgaaggcatgcagtccaacgacaacaacaaagatgtggacgaaaaagataacgaaaatgatagtcgtgttgatgatcgtgatgacaatgaaatagctattgcggatgaagaagaaatactacacttcgaatacgatgatccagaaatgcaacatgactatactataattttggaacctgaaagagccactgcgattgaaaaaagatggctttatagatgtatttatggtcagccttcagatatccagattctttttaacaagttgctcaagtacttcaatggaaaggtccccatggaattggttatcatcaaagaggaaattagcagacatgacctaaagaaattgctcaatgctctagataagtatttaatcgagatacaccattggtaa

SEQ ID NO: 4770 - DNA, 3441 bp, Artificial Sequence
  Description of Artificial Sequence: Synthetic polynucleotide
atggatgaatgtttacccaattcttgtttattgggtgttcacctcgtcatttctacgcattctgggccacaaatagtttatcactacccaccctccaatacagcatttttaacaaataatccaacgaagcatcagcacctctatggaaaccatgcaaatttgaataaaaacacaagtacaaataaagaagaaaaactctttaattctggctctacgaaaacagcttctcaaattgctttgaacgagtctgcgaaaagttacaataccgctattacgccaagcatgacaaatactaatactaataatgtgacattacctccaactagaagccatgctaatactgtaggatctcaaagttctattcctgcggctactaatggtgtaggttatagaaaaaccgatatcgaagatacttctagaacttttcaataccaagaaactgaatctgaaacgtcttcttctggattaagtgacagcgaattgtccacagactacttagacatttctagcgattctttttctatatcttcttccttatcttcttcttctttatcttcttctcccagtagttcttcctcttcttcccctccgcaagatggcttatctagaactaatagtagtttccaatctacggattctatgtctccaacttctccacaaatgataatggaaaacgatagtattagtgtagcggaaagttatttggattctgggactaataacaaatctagggccgcttccaagagatcccagaatttcttccataaattgagtaccaagaagagtactgattctaaaacacattctccagtaagaaagcttaaatctaagccatctcaaagcactaaaaaaggcaacaaattattaaaaaatacgtccaatgagactgatggaaatgcttttacaggaagttgttctatttcttctaaaaaatctttatccagtacaggagagcataaccaagaacttcgtaatagtagcttgaacgacactcctggccaaagtcctcatcattaccaccatcgttaccaccattatcataaaaatgccgcgacgagccaaagaaattcccatacccagtacgatgttgaagaagaagacatggaagtttctgcaatgttgcaggatggtaaaatctctatgaatgaaattttttttgaagaggaaaacttccaggatataaataaaattttggaatttgataatgattttgttgcagaattttgtagccctgagagggaaatgtgcaataccagattcgaattcacggtggataatttctgcttcttaggcttacctattcatgtagattctcaaggcagatggagaaaatccaagcacaaaaataaaacccgctctaaaagatcttccagtactacaacaaacatcagtagaaagaaatctatcgcttccaaaatttcttctttgagtgagaatactttgaagaaagttaatagtggtgaagctgacactgtttatgacagtaatattggtcatgaggcttctactgatacgccgaatttgaggataaatactgatgtcagtggaaacgaatttgagagagaaaaggaagacttgggcaaaaatatgaacatgtttcatgtatgctttgttatgaatccgcatttaatcgaatataataaaaggattgatgacatgtatcagtttgttgttacaaggttatctttattgttaagatatgtgcaaagtaaaacctcttacatttctagcgaatgccatataattttaaaggaaaaagaaagagtattgaaacattctaaaacataccaatctataagaggcgcaggaaacaaggggaagtatttgtaccaaagaattttagccaaatcttctttggctagggcgttgacggaatgtgttgataaaatccaaagaaatgaaatcgcatgtcttgagatcaatgacgataaagtaatttccttgcaaatcccgattcaaaacgagtttgaaaaaatgccaaacttcaaattacaacccgtgttgagaggctcctatttgacgtccattttgaacatgaaatttttagaaaaatcttctttgagaattgaaagtcaaaatcgtcaaaacgatcaggctcaattcagtgataccaataataacatatacaggtttggcaataatattaatagtaccggccactgtggagcagcaaatgtggatgacggggacgacaatgaaagcaattactactgcgacgacaatgatgaccttttaaactatgcgttattattattggacgagccaaataatattattagctccctcgaaactttttcttaccaggacgatattggcactatcatattgaaacatttagtcagaaatatccagccaaatatccctttaaggagttatcgctatttgataactgatttattagataacccttcttctttggacgaccttactacagaaacaaactctttggaaagtagcatattgcgctcttgcgcattgcatttaatgtattggagacatgcaagaatagtgatcccattaagctccaaatacacgtatattgtttctcccttggctcctattcaaggttatacaatagatgattataaaagtacttctcaaaatgatgggaacgtgaaaaaaatggacgatcgcgaaaataataagagtggaagcgacagagtaccattgatttatcaaaattctatgttgttcagatccaaattcccatctttgcccagtttacccatttttttaagtttgttgtccacggacaaacctcaagcgtacagtaacataatcccatctagggaacataagccagtttacttgaacgcgttagcgtggttaatacagtacgggtatgtaacccaattattgactttcataaatatcagagtggacaaacacataaaaatggcagtagatgaggatttggaaaaggaaggcttccgtaagactaatactgctagaaggcccagcatggactacaaaaaaactgataaaaagttggatgatgaagatgggcaaagtagagatgcaaacgccagcgaagcgtgttctggaaagaatgaaggcatgcagtccaacgacaacaacaaagatgtggacgaaaaagataacgaaaatgatagtcgtgttgatgatcgtgatgacaatgaaatagctattgcggatgaagaagaaatattacacttcgaatacgatgatccagaaatgcaacatgactatactataattttggaacctgaaagagccactgcgattgaaaaaagatggctttatagatgtatttatggtcagccttctgatatccagattctttttaacaagttgctcaagtacttcaatggaaaggtccccatggaattggttatcatcaaagaggaaattagcagacatgacttgaagaaattgctcaatgctttagataagtatttaatcgagatacaccattggtga

SEQ ID NO: 4771 - DNA, 1197 bp, Saccharomyces cerevisiae
atggctttggagggattgcggaaaaaatataaaacaaggcaggaattggtcaaagcactcactcctaaaagacggtccattcacttgaactccaatggtcactccaacggaactccctgttcaaacgcagatgttttggctcatattaagcatttcctgtcattggcggctaattcattagagcaacatcaacagcctatttcaatcgtctttcaaaacaaaaaaaaaaaaggcgatacaagcagtcctgacattcacacaacattggacttccctttgaatggcccgcatctatgcactcatcagttcaagttgaaaagatgcgcaatccttttaaacttattgaaagtcgttatggaaaaattaccgctaggtaaaaacactacagtgagagatatcttctactccaacgtggaattgtttcaaagacaagcaaacgtagtccagtggctggacgttatacgctttaatttcaagctctctccaagaaaatccttaaacattataccagctcaaaagggtttagtttattcgcctttccccattgatatttatgacaatattctgacatgtgaaaatgaaccaaagatgcaaaagcaaacaattttccctggtaagccctgtctaattccatttttccaagatgatgcggtcatcaagttagggacaacaagtatgtgtaatattgtaatagtggaaaaagaagctgtcttcaccaaattagtaaataattatcacaagttgagtacaaataccatgctcattacaggtaagggatttccagatttcttgacaaggttattcctaaaaaaactagaacaatattgctccaaattgatatcggactgttctatatttaccgatgcggacccctatgggattagcatagccctaaattatactcactcgaatgaacgcaacgcttatatttgcacgatggcaaactataaaggaattcgtattacgcaagttttggcacaaaataatgaagtgcataacaaatccattcaattattgagtttgaatcagcgcgactactccttagccaagaatttgatagcatctctgactgccaacagctgggatattgcaacttcaccattaaagaacgtcatcatagaatgtcagcgggaaatttttttccaaaagaaagctgaaatgaacgagattgatgccagaatttttgaatacaaatga

SEQ ID NO: 4772 - DNA, 1197 bp, Artificial Sequence
  Description of Artificial Sequence: Synthetic polynucleotide
atggctttggagggattgagaaaaaaatataaaacaaggcaggaattggtcaaagcactcactcctaaaagaagatccattcacttgaactccaatggtcactccaacggaactccctgttctaacgcagatgttttggctcatattaagcatttcttatctttggcggctaattctttagagcaacatcaacagcctatttccatcgtctttcaaaacaaaaaaaaaaaaggcgatacaagcagtcctgacattcacacaacattggacttccctttgaatggcccgcatttgtgcactcatcagttcaagttgaaaagatgcgcaatccttttaaacttattgaaagtcgttatggaaaaattaccgttgggtaaaaacactacagtgagagatatcttctactccaacgtggaattgtttcaaagacaagcaaacgtagtccagtggttagacgttatacgctttaatttcaagctctctccaagaaaatccttaaacattataccagctcaaaagggtttagtttattctcctttccccattgatatttatgacaatattttaacatgtgaaaatgaaccaaagatgcaaaagcaaacaattttccctggtaagccctgtttaattccatttttccaagatgatgcggtcatcaagttagggacaacaagtatgtgtaatattgtaatagtggaaaaagaagctgtcttcaccaaattagtaaataattatcacaagttgagtacaaataccatgctcattacaggtaagggatttccagatttcttgacaaggttattcttgaaaaaattagaacaatattgctccaaattgatatctgactgttctatatttaccgatgcggacccctatgggattagcatagccttgaattatactcactctaatgaacgcaacgcttatatttgcacgatggcaaactataaaggaattcgtattacgcaagttttggcacaaaataatgaagtgcataacaaatccattcaattattgagtttgaatcagcgcgactactccttagccaagaatttgatagcatctttgactgccaacagctgggatattgcaacttctccattaaagaacgtcatcatagaatgtcagagggaaatttttttccaaaagaaagctgaaatgaacgagattgatgccagaatttttgaatacaaatga

SEQ ID NO: 4773 - DNA, 1398 bp, Saccharomyces cerevisiae
atgctaagatcaaatttatgcagaggatctcgaatccttgcaagactgaccactacaccaaggacatacacatctgcggcgacagctgcggctgcgaatcggggacatatcatcaaaacatacttcaatagagattctacgacaattacgttctccatggaggagtccagcaagccggtttccgtttgctttaacaacgtttttcttagagatgcctcccatagtgccaagctggtgaccacgggagaactgtatcataacgagaaattgaccgctcctcaggacattcaaatttctgaggacggaaaatctctagtggtgaaatggaaagatggcggtcatcaccagttccctttacaattctttatcgactataaaggttccagttttgtttcgccagcaacaagaaaacaagaatccagatatagaccccagttatggaataagcgcatcctgaaagataacgtcaaggacttactttctgtgagctacaacgagtttattgatcctaaggatgactccaagcttttccaaacgctggtcaacctacaaaagtttggtatcgctttcatttccggtactccttcatcctcctctgaaggccttaccatacaaaagatctgtgaaaggatcggacccataagatcgactgtacatggtgaaggtacatttgacgtgaatgcatcccaagcgacaagtgttaatgcccattatgccaataaagacttgccgctacatacggatttaccatttttagaaaatgtgccaggtttccagattctacaatctctacctgctacagaaggggaagatcccaatactagacccatgaattacttcgtggacgcattttatgctacccgtaatgttagagaatcggattttgaggcttatgaggctttacaaattgttcctgtaaattatatatatgaaaacggcgataagaggtactaccaatccaaacctttaatcgaacatcacgacattaacgaggacaatactcttctgggtaattatgaggccttgattaaatgcattaactactctccaccataccaagcacctttcactttcggaatttatgataagccctcagatctaaataataatctggacttgaatttaattaccaccccagcaaaactaacagagagatttttgtttaagtctttcattagggggttgaacttgttcgagagtcatatcaatgacttcaacaatcaatttagattgcagttgcccgaaaactgttgtgttatctttaacaacaggagaattttgcatgctaactctttaacaagctcaaaccagcaatggttaaagggttgctatttcgattctgatactttcaagagtaaattaaagttcttggaagagaagtttcctcatgacaaataa

SEQ ID NO: 4774 - DNA, 1398 bp, Artificial Sequence
  Description of Artificial Sequence: Synthetic polynucleotide
atgttgagatctaatttatgcagaggatctagaatccttgcaagattgaccactacaccaaggacatacacatctgcggcgacagctgcggctgcgaatagaggacatatcatcaaaacatacttcaatagagattctacgacaattacgttctccatggaggagtccagcaagccggtttccgtttgctttaacaacgtttttcttagagatgcctcccatagtgccaagttagtgaccacgggagaattgtatcataacgagaaattgaccgctcctcaggacattcaaatttctgaggacggaaaatctttggtggtgaaatggaaagatggcggtcatcaccagttccctttacaattctttatcgactataaaggttccagttttgtttctccagcaacaagaaaacaagaatccagatatagaccccagttatggaataagcgcatcttgaaagataacgtcaaggacttactttctgtgagctacaacgagtttattgatcctaaggatgactccaagcttttccaaacgttagtcaacttacaaaagtttggtatcgctttcatttccggtactccttcttcctcctctgaaggccttaccatacaaaagatctgtgaaaggatcggacccataagatctactgtacatggtgaaggtacatttgacgtgaatgcatcccaagcgacaagtgttaatgcccattatgccaataaagacttgccgcttcatacggatttaccatttttagaaaatgtgccaggtttccagattttacaatctttgcctgctacagaaggggaagatcccaatactagacccatgaattacttcgtggacgcattttatgctacccgtaatgttagagaaagtgattttgaggcttatgaggctttacaaattgttcctgtaaattatatatatgaaaacggcgataagaggtactaccaatccaaacctttaatcgaacatcacgacattaacgaggacaatactcttttgggtaattatgaggccttgattaaatgcattaactactctccaccataccaagcacctttcactttcggaatttatgataagccctctgatttgaataataatttggacttgaatttaattaccaccccagcaaaattaacagagagatttttgtttaagtctttcattagggggttgaacttgttcgagagtcatatcaatgacttcaacaatcaatttagattgcagttgcccgaaaactgttgtgttatctttaacaacaggagaattttgcatgctaactctttaacaagcagtaaccagcaatggttaaagggttgctatttcgattctgatactttcaagagtaaattaaagttcttggaagagaagtttcctcatgacaaatga

SEQ ID NO: 4775 - DNA, 1215 bp, Saccharomyces cerevisiae
atgtctgaaaatcaacgtttaggattatcagaggaagaggtagaagcggctgaagtacttggggtgttgaaacaatcatgcagacagaagtcgcagccttcagaggacgtctcacaagctgacaaaatgccggcaagtgagtcgtctacgacgccgctaaacattttggatcgcgtaagtaacaaaattatcagtaacgtagtgacattctacgatgaaataaacaccaacaagaggccactgaaatcaatagggaggctgctagacgatgacgatgacgagcatgatgattacgactacaacgacgatgagttcttcaccaacaagagacagaagctgtcgcgggcgattgccaaggggaaggacaacttgaaagagtacaagctgaacatgtccatcgagtctaagaagaggcttgtaacgtgcttgcatcttttaaagctggccaataagcagctttccgataaaatctcgtgtttacaggaccttgttgaaaaggagcaggtgcatcctttgcacaagcaagatggaaatgctaggacgaccactggagctggcgaggacgagacatcgtcagacgaagacgacgacgatgaggagttttttgatgcctcagagcaggtcaacgccagcgagcagtctattgtggtgaaaatggaggtggtcggcacagtcaagaaagtctactcgctgatatcgaagttcacagcaaattcgctgccggagcccgcaagatctcaggttcgggaaagtcttctaaacttacccacaaattggttcgacagcgtccacagtacatcactgccgcatcatgcttcgtttcattatgccaactgtgaagaacaaaaagtggagcaacagcaacagcaacagcaacagcagcagcagcagcaacttttgcagcagcaactcctgcaacagcaacagcaaaaaaggaacaaggatggcgacgactcagcctcgccgtcctcctccgtaactgcgaatgggaaagtactcattctcgccaaagaatccctggaaatggtgagaaatgtcatgggcgtagtcgactccacgttgggcaaggctgaagaatgggtgaagcagaaacaggaggtaaaagaaatgatcagggagcgtttcttgcaacagcagcaacagtacaggcagcaacagcagaaggatggcaattacgtaaagccctctcaggacaacgtggatagcaaggactaa

SEQ ID NO: 4776 - DNA, 1215 bp, Artificial Sequence
  Description of Artificial Sequence: Synthetic polynucleotide
atgtctgaaaatcaacgtttaggattatctgaggaagaggtagaagcggctgaagtacttggggtgttgaaacaaagttgcagacagaagtctcagccttctgaggacgtctctcaagctgacaaaatgccggcaagtgagtcttctacgacgccgttgaacattttggatcgcgtaagtaacaaaattatcagtaacgtagtgacattctacgatgaaataaacaccaacaagaggccattgaaatctatagggaggcttttggacgatgacgatgacgagcatgatgattacgactacaacgacgatgagttcttcaccaacaagagacagaagctttctcgtgcgattgccaaggggaaggacaacttgaaagagtacaagttgaacatgtccatcgagtctaagaagaggcttgtaacgtgcttgcatcttttaaagttggccaataagcagctttccgataaaatcagttgtttacaggaccttgttgaaaaggagcaggtgcatcctttgcacaagcaagatggaaatgctaggacgaccactggagctggcgaggacgagacatcttctgacgaagacgacgacgatgaggagttttttgatgcctctgagcaggtcaacgccagcgagcagtctattgtggtgaaaatggaggtggtcggcacagtcaagaaagtctactctttgatatccaagttcacagcaaattctttaccggagcccgcaagatctcaggttagagaaagtcttttgaacttacccacaaattggttcgacagcgtccacagtacatctttaccgcatcatgcttcttttcattatgccaactgtgaagaacaaaaagtggagcaacagcaacagcaacagcaacagcagcagcagcagcaacttttgcagcagcaactcttacaacagcaacagcaaaaaaggaacaaggatggcgacgactctgcctctccgtcctcctccgtaactgcgaatgggaaagtactcattctcgccaaagaatccttagaaatggtgagaaatgtcatgggcgtagtcgactccacgttgggcaaggctgaagaatgggtgaagcagaaacaggaggtaaaagaaatgatcagggagcgtttcttgcaacagcagcaacagtacaggcagcaacagcagaaggatggcaattacgtaaagccctctcaggacaacgtggatagcaaggactga

SEQ ID NO: 4777 - DNA, 1818 bp, Saccharomyces cerevisiae
atgtcgtcaagcctttttatcctggatgaaaatctggagccattggtatcgaagaatattagagcactaccgaatctatcgtcggttctttcaagtttcaaacaatgttatcatgacgggtcgcctccaattctctcccaaaacgattggttctttatacatttgaagagagactttctgcatttcgtttcagtgatacataccacagacaaaccaaatatagacttaatgactatactagcctttttggaacaattttatcatcttttacaaaaatattttgaaatcgaggtcttaactaagaatgtcatactggacaacatcttacttgtcctggagttgattgatgaatgtatagactttggtatcgtacaagtgacggatccaagtatcatcaaggactacattcgtgtgaaggtcaacgtaccaagagttacagtagacaatgaggagtggagccctggtgaagagagcagtagtagtagcggtagcgatagcgatagcgagtacagcaatactaataagaggaaggataagaagaagaaaaggaagaagaaaaagggcactaaagggaaaagcgtgggcaaaagtaaattaaaaagtataatggtaaacaataaagaaaataggggcataaacgtggtggaaactgtcaaggagacactaaggaacaagaatgataccggtaaagaagccgctaatgacgagctccccaatgacggtaatgatttatacatcaatggcgatattgcgaagacgattataatgcccatatcatggagaacaaaggggatacattacgccaaaaacgagttctttcttgatgttattgaacgtgttcagtacttgatggattttgaaaaaggagtgattaggaaaaatctgatacatggagagattgtgtgcagatgctatttatcagggatgcccaaactgaaaatatccataaacaagatactgaacagggacccccagttcatgtcgaattccagctttcatcagtgtgtttcactagattccataaacactattgaaaaagatgaagaaaagaatagtgacgatgatgctggtttgcaggccgccacagatgcaagagaaatcgaatttataccgccggatggcgaatttgttctttgccaatacgagttgaagagacatgtaaaggatgcgccgatggtgaggttgaaagattttgaaatcaaacctaaactgaagaagtttaaaatccaaattgtaaccaaaattcaaacaaattttaaacccaccaactcaacgtcgaagctaaacgtgagaattcccctgacaaaagtcttccaggaatataaaatagacctcagcaagcaaattagattcaaggcaaacatcggcaaggtcgtgtttaacttgagtgacgattttctcctctgggagatacaaaccatgaaggggcaccgagaacatagcacaaacaagagctcacagtacaacagcgacgaagatgatccaaatacgtgtgcatccatggtggcagagttccccctcttcaaccaggaagaatatgaccgcctgcaagaagaaatgaaaacctcaatgaatccgccgcccttgcgcacgggacccaggctggaagaactatatagacaagtgcacgaccaacaaacttcccacgttactcctcgagataagttggtcaacattgatttcgagattccgtactgtacatgcagtggcctgaaagttgagtacttgaaggtcgaagagccacaattgcagtaccagtctttcccctgggtcagatacaagaccgtcagcgacgaagagtacgcatatattgtttga

SEQ ID NO: 4778 - DNA, 1818 bp, Artificial Sequence
  Description of Artificial Sequence: Synthetic polynucleotide
atgtcttctagcctttttatcttagatgaaaatttggagccattggtatccaagaatattagagcattaccgaatttatcttctgttctttccagtttcaaacaatgttatcatgacgggagccctccaattctctcccaaaacgattggttctttatacatttgaagagagactttttacatttcgtttctgtgatacataccacagacaaaccaaatatagacttaatgactatattggcctttttggaacaattttatcatcttttacaaaaatattttgaaatcgaggtcttaactaagaatgtcatattggacaacatcttacttgtcttggagttgattgatgaatgtatagactttggtatcgtacaagtgacggatccaagtatcatcaaggactacattcgtgtgaaggtcaacgtaccaagagttacagtagacaatgaggagtggagccctggtgaagagagcagtagtagtagcggtagcgatagcgatagcgagtacagcaatactaataagaggaaggataagaagaagaaaaggaagaagaaaaagggcactaaagggaaaagcgtgggcaaaagtaaattaaaaagtataatggtaaacaataaagaaaataggggcataaacgtggtggaaactgtcaaggagacattaaggaacaagaatgataccggtaaagaagccgctaatgacgagctccccaatgacggtaatgatttatacatcaatggcgatattgcgaagacgattataatgcccatatcttggagaacaaaggggatacattacgccaaaaacgagttctttcttgatgttattgaacgtgttcagtacttgatggattttgaaaaaggagtgattaggaaaaatttgatacatggagagattgtgtgcagatgctatttaagtgggatgcccaaattgaaaatatccataaacaagatattaaacagggacccccagttcatgagtaattccagctttcatcagtgtgtttctttagattccataaacactattgaaaaagatgaagaaaagaatagtgacgatgatgctggtttgcaggccgccacagatgcaagagaaatcgaatttataccgccggatggcgaatttgttctttgccaatacgagttgaagagacatgtaaaggatgcgccgatggtgaggttgaaagattttgaaatcaaacctaaattgaagaagtttaaaatccaaattgtaaccaaaattcaaacaaattttaaacccaccaactccacgtccaagttgaacgtgagaattcccttgacaaaagtcttccaggaatataaaatagacctcagcaagcaaattagattcaaggcaaacatcggcaaggtcgtgtttaacttgagtgacgattttctcctctgggagatacaaaccatgaaggggcacagagaacatagcacaaacaagagctctcagtacaacagcgacgaagatgatccaaatacgtgtgcatccatggtggcagagttccccctcttcaaccaggaagaatatgaccgcttacaagaagaaatgaaaacctccatgaatccgccgcccttgcgcacgggacccaggttagaagaattgtatagacaagtgcacgaccaacaaacttcccacgttactcctagagataagttggtcaacattgatttcgagattccgtactgtacatgcagtggcttgaaagttgagtacttgaaggtcgaagagccacaattgcagtaccagtctttcccctgggtcagatacaagaccgtcagcgacgaagagtacgcatatattgtttga

SEQ ID NO: 4779 - DNA, 363 bp, Saccharomyces cerevisiae
atgcacaacaagattgttagaatcgcgtccagtgcactcacagggggcaaactactcgagaagctaaaacccttgacccgttgggaagttcaatgggaccctaataagaccaaatgtttgggaataacaagagaggtaacattcaaggactacgaaaccacatgggcctttttgactcgtgtatcgatgagatctcatctatggggccaccatcccctgattcacacaagttacacctgggtcaagctggaacttcatacgcatgacatagacccgaaagacggggctcacagccagcttagcgatatagacgtccggatggccaagagaatagattcctacatcgatgagatgacaacttga

SEQ ID NO: 4780 - DNA, 363 bp, Artificial Sequence
  Description of Artificial Sequence: Synthetic polynucleotide
atgcacaacaagattgttagaatcgcgtccagtgcactcacagggggcaaattactcgagaagttgaaacccttgacccgttgggaagttcaatgggaccctaataagaccaaatgtttgggaataacaagagaggtaacattcaaggactacgaaaccacatgggcctttttgactcgtgtatctatgagatctcatctttggggccaccatcccttaattcacacaagttacacctgggtcaagttggaacttcatacgcatgacatagacccgaaagacggggctcacagccagcttagcgatatagacgtcagaatggccaagagaatagattcctacatcgatgagatgacaacttga

SEQ ID NO: 4781 - DNA, 1599 bp, Saccharomyces cerevisiae
atggatagaacgtggctattactgacgtggctgttgctactctgtggggtagttcaagggaaccaagaaagcataaatcaaaaatatcacgatgtctgttcagggatgtattccaaggaggatttcaatggaaaagttgacccctatatatcgtttacgttggaggaattgtcacttgctgatgaagacgatgatggcgagggggttagtgttgctgtgtttgatttccaagattatgagcatattggtgtgcggttaccaaatggagaaattcagtatatttgcgatgactacgcattggatttgggcctctgtgaggattcgtcggaggggcaatttatcattcaagagacagccatcgatccgttcaccagtaaggaacataagctaacgagtcagattttgactttcactcaacaagaattgggcactaacgacaaggtatactcaattaacaaaactggttactattgtgtgaccacgtcatctttcatttcttccagttccaagtttaaggctacagtgaattttaggaacgcttacggtcaattggacgcttcagaggcgtacaagatgcctatttatgcctttttggccgtcgcttatgccgtctgtacattagtgtactcttggctatgctggaagcatagacatgagttactgcctttacaaaggtacattttggtattttgtattttcctaacagctgatactattttcgtctggatgtactatattattgagaaccagaagggaaactccagcgtcgctcttcatgtctatatggttttcatatcgatctttagcgccggtaagatgactttcacgcttctcctcgccttgctgatatctcttggatatggtatagtatatccaaaactggaccgtacattgctaagaagatgtcaaatatttgcgatatttacgtttgcagtgtgcgttgcattcctggtccaaaaatattcccagaattctgagtctttatccaatttgattttgattactgctatccccttagtattatgtctattcgctttctattatttgacactgtcttcaatgaacaaaacaatgacttatttgagggaacaaaaccaagtggtgaaattaaacatgtacagaaaactgatcatattgtgttatatttcgttgtttatactcttcttaggcttactagtctctacttttgcatacgtcggtatggacactgttgacatgatagaacaatattggaaaacagaattcctcatcacagatacttggcctagtttcgtttacttcttggtcttcgtcattttcgcattcttctggagacctacaagtacatcatatttactagcgtgctcgcatcaattaccaactgacatggaaaatgtatcagaattcgatttagatgacataaattccttgtctgatgaggcattgcctaatagagagccacgtaatgactaccaggaacacgatcacaatatggatattgatttagcatccgattttgaagaagtgccaagtgtaaatgcaaatacgaacgcaaataatgacgtattgttcgacgtagattacgacagagatgcaaaaaatgatagaagtactacataa

SEQ ID NO: 4782 - DNA, 1599 bp, Artificial Sequence
  Description of Artificial Sequence: Synthetic polynucleotide
atggatagaacgtggttgttattgacgtggttattgttgctctgtggggtagttcaagggaaccaagaaagcataaatcaaaaatatcacgatgtctgttctgggatgtattccaaggaggatttcaatggaaaagttgacccctatatatcctttacgttggaggaattgtctcttgctgatgaagacgatgatggcgagggggttagtgttgctgtgtttgatttccaagattatgagcatattggtgtgagattaccaaatggagaaattcagtatatttgcgatgactacgcattggatttgggcctctgtgaggattcttctgaggggcaatttatcattcaagagacagccatcgatccgttcaccagtaaggaacataagttgacgagtcagattttgactttcactcaacaagaattgggcactaacgacaaggtatactctattaacaaaactggttactattgtgtgaccacgtcttctttcatttcttccagttccaagtttaaggctacagtgaattttaggaacgcttacggtcaattggacgcttctgaggcgtacaagatgcctatttatgcctttttggccgtcgcttatgccgtctgtacattagtgtactcttggttgtgctggaagcatagacatgagttattgcctttacaaaggtacattttggtattttgtattttcttaacagctgatactattttcgtctggatgtactatattattgagaaccagaagggaaactccagcgtcgctcttcatgtctatatggttttcatatccatctttagcgccggtaagatgactttcacgcttctcctcgccttgttaatatctcttggatatggtatagtatatccaaaattagaccgtacattgttaagaagatgtcaaatatttgcgatatttacgtttgcagtgtgcgttgcattcttggtccaaaaatattcccagaattctgagtctttatccaatttgattttgattactgctatccccttagtattatgtttgttcgctttctattatttgacattatcttctatgaacaaaacaatgacttatttgagggaacaaaaccaagtggtgaaattaaacatgtacagaaaattaatcatattgtgttatatttctttgtttatactcttcttaggcttattggtctctacttttgcatacgtcggtatggacactgttgacatgatagaacaatattggaaaacagaattcctcatcacagatacttggcctagtttcgtttacttcttggtcttcgtcattttcgcattcttctggagacctacaagtacatcttatttattggcgtgctctcatcaattaccaactgacatggaaaatgtatctgaattcgatttagatgacataaattccttgtctgatgaggcattgcctaatagagagccacgtaatgactaccaggaacacgatcacaatatggatattgatttagcatccgattttgaagaagtgccaagtgtaaatgcaaatacgaacgcaaataatgacgtattgttcgacgtagattacgacagagatgcaaaaaatgatagaagtactacatga

SEQ ID NO: 4783 - DNA, 2208 bp, Saccharomyces cerevisiae
atgggagaatttaaacctccgctacctcaaggcgctgggtacgctattgtattgggcctaggggccgtatttgcaggaatgatggttttgaccacttatttactgaaacgttatcaaaaggaaatcatcacagcagaagaattcaccaccgccggtagatctgtaaaaaccggcttagtggctgcagccgtggtttctagttggatctggtgttctacattgttaacgtcgtcaacaaaggaatatgcagacggtatatttggcggttatgcgtacgctgctggcgcatgcttccaaattattgcattcgcaattttggcaattaaaaccaagcaaatggctcccaatgcgcacacatatttagaattagtgagaacaagatatggtaagatcggccatggttgctacttgttttatgccatcgcgacgaatattttagtcacttcaatgcttttaacttcaggttctgctgtctttagtgatttaaccgggatgaacactatcgcatcatgttttttactgcctgtgggtgttgttgtttatactctatttggtgggattaaagcaactttcttaacggactatatgcacacatgtgtcattatcatcattgtcctcgtatttgcctttaaagtttatgcgactagtgatgttttaggctcaccgggaaaagtttatgacttagttcgtgaagccgccaagaggcatccagtagacggtaactatcagggtgaatatatgaccatgacatccaaatccgctggtattttattaattattaacctgattggaaatttcggcaccgttttccttgataatggttattggaataaagcgatttctgctagtcccgcagcgagtttgaaagcatatgccatcggtgggttagcatggtttgcagtaccttctttgatttcattgaccatgggattagcatgtcttgcggtggaaacgtctccgaacttccccacctatcctgatccacttacttcgttccaggcaaattctgggttagtcttgccggcagctgcaattgctatcatgggtaaggggggtgctgtggcatcgctgctaatgattttcatggccgtcacatctgctatgtctgctgaactaattgccgtttcatctgttttcacttacgatatctatagagaatatattgatcctcgtgcaagcggtaagaaattgatttacacatcacacgttgcttgtatcttttttggtcttgccatgagtggattttcggttggtttatactatggtggtatttctatgggttatatctatgaaatgatgggtataattattagtagtgcagtattacctgtcgttttgaccttatgttccaaagacatgaatttggtggccgctgtagtgtcgcctattttgggcacaggactggctataatgtcatggcttgtctgtaccaaatccctttataaagaattgaccgtggatactacgttcatggattatccaatgttaacaggtaacttggtggctttgctatcaccagccatttttattcctattttaacgtatgtgtttaagccacaaaattttgactgggagaaaatgaaagatattactagagttgacgaaactgcagagttagttcaggctgaccctgatatccagctttacgatgctgaagctaacgataaggaacaagaagaagaaacaaattctctggtctcagatagtgaaaaaaacgatgttagagtaaataatgaaaaattgattgagcctaaccttggtgttgtaataagtaatgccatttttcaagaagatgacacacagttacaaaatgaattagacgaagaacaaagagaactagcacgtggtttaaaaattgcatacttcctatgtgtttttttcgctttggcatttttggtagtttggcccatgcccatgtatggttccaaatatatcttcagtaaaaaattctttaccggttgggttgttgtgatgatcatctggctttttttcagtgcgtttgccgtttgtatttatccactctgggaaggtaggcatggtatatataccactttgcgaggcctttactgggatctatctggtcaaacttataaattaagggaatggcaaaattcgaacccacaagatctgcatgtagtaacaagccaaattagtgcgagagcacatagacaatcatcacatttcggacaagttgatgaaataatttag

SEQ ID NO: 4784 - DNA, 2208 bp, Artificial Sequence
  Description of Artificial Sequence: Synthetic polynucleotide
atgggagaatttaaacctccgttgcctcaaggcgctgggtacgctattgtattgggcttaggggccgtatttgcaggaatgatggttttgaccacttatttattgaaacgttatcaaaaggaaatcatcacagcagaagaattcaccaccgccggtagatctgtaaaaaccggcttagtggctgcagccgtggtttctagttggatctggtgttctacattgttaacgtcttctacaaaggaatatgcagacggtatatttggcggttatgcgtacgctgctggcgcatgcttccaaattattgcattcgcaattttggcaattaaaaccaagcaaatggctcccaatgcgcacacatatttagaattagtgagaacaagatatggtaagatcggccatggttgctacttgttttatgccatcgcgacgaatattttagtcacttctatgcttttaacttctggttctgctgtctttagtgatttaaccgggatgaacactatcgcatcttgttttttattgcctgtgggtgttgttgtttatactttatttggtgggattaaagcaactttcttaacggactatatgcacacatgtgtcattatcatcattgtcctcgtatttgcctttaaagtttatgcgactagtgatgttttaggctctccgggaaaagtttatgacttagttcgtgaagccgccaagaggcatccagtagacggtaactatcagggtgaatatatgaccatgacatccaaatccgctggtattttattaattattaacttgattggaaatttcggcaccgttttccttgataatggttattggaataaagcgatttctgctagtcccgcagcgagtttgaaagcatatgccatcggtgggttagcatggtttgcagtaccttctttgatttctttgaccatgggattagcatgtcttgcggtggaaacgtctccgaacttccccacctatcctgatccacttacttctttccaggcaaattctgggttagtcttgccggcagctgcaattgctatcatgggtaaggggggtgctgtggcatctttattgatgattttcatggccgtcacatctgctatgtctgctgaattgattgccgtttcttctgttttcacttacgatatctatagagaatatattgatcctcgtgcaagcggtaagaaattgatttacacaagtcacgttgcttgtatcttttttggtcttgccatgagtggattttctgttggtttatactatggtggtatttctatgggttatatctatgaaatgatgggtataattattagtagtgcagtattacctgtcgttttgaccttatgttccaaagacatgaatttggtggccgctgtagtgtctcctattttgggcacaggattggctataatgtcttggcttgtctgtaccaaatccctttataaagaattgaccgtggatactacgttcatggattatccaatgttaacaggtaacttggtggctttgttatctccagccatttttattcctattttaacgtatgtgtttaagccacaaaattttgactgggagaaaatgaaagatattactagagttgacgaaactgcagagttagttcaggctgaccctgatatccagctttacgatgctgaagctaacgataaggaacaagaagaagaaacaaattctttggtctctgatagtgaaaaaaacgatgttagagtaaataatgaaaaattgattgagcctaaccttggtgttgtaataagtaatgccatttttcaagaagatgacacacagttacaaaatgaattagacgaagaacaaagagaattggcacgtggtttaaaaattgcatacttcttgtgtgtttttttcgctttggcatttttggtagtttggcccatgcccatgtatggttccaaatatatcttcagtaaaaaattctttaccggttgggttgttgtgatgatcatctggctttttttcagtgcgtttgccgtttgtatttatccactctgggaaggtaggcatggtatatataccactttgagaggcctttactgggatttatctggtcaaacttataaattaagggaatggcaaaatagcaacccacaagatttgcatgtagtaacaagccaaattagtgcgagagcacatagacaatcttctcatttcggacaagttgatgaaataatttga

SEQ ID NO: 4785 - DNA, 84 bp, Saccharomyces cerevisiae
atgactgcttttgcatctttaagagaacctttggtcttggctaatctcaaaattaaagttcatatctaccgtatgaagcgctga

SEQ ID NO: 4786 - DNA, 84 bp, Artificial Sequence; identical to SEQ ID NO: 4785
  Description of Artificial Sequence: Synthetic oligonucleotide

SEQ ID NO: 4787 - DNA, 366 bp, Saccharomyces cerevisiae
atgtctgactttcaaaaggaaaaggttgaagaacaagaacaacaacaacaacaaatcatcaagattagaatcactttgacctccaccaaggttaagcaattggaaaacgtctcttccaacattgtcaagaacgctgaacaacacaacttggtcaagaagggtccagtcagactaccaaccaaggttttgaagatctccaccagaaagactccaaatggtgaaggttctaagacttgggaaacctacgaaatgagaatccacaagagatacatcgacttggaagctcctgttcaaatcgttaagagaatcactcaaatcaccattgaacctggtgtggatgtcgaagttgttgttgcttccaactaa

SEQ ID NO: 4788 - DNA, 366 bp, Artificial Sequence
  Description of Artificial Sequence: Synthetic polynucleotide
atgtctgactttcaaaaggaaaaggttgaagaacaagaacaacaacaacaacaaatcatcaagattagaatcactttgacctccaccaaggttaagcaattggaaaacgtctcttccaacattgtcaagaacgctgaacaacacaacttggtcaagaagggtccagtcagattaccaaccaaggttttgaagatctccaccagaaagactccaaatggtgaaggttctaagacttgggaaacctacgaaatgagaatccacaagagatacatcgacttggaagctcctgttcaaatcgttaagagaatcactcaaatcaccattgaacctggtgtggatgtcgaagttgttgttgcttccaactga

SEQ ID NO: 4789 - DNA, 1218 bp, Saccharomyces cerevisiae
atgaacattggtggaggaaaatttttacttgggaggatatcgaataatccaacttcagggatagtagggcttgctaatgttggtaaatcgacttttttccaagcaataacaaactcaaaattgggaaatcctgcaaattatccattcgctaccattgacgcagaatgtgccaaagtcaatatacctagcgtgccgctctctaatttattgagaatatatcagagtgcgaaatgcgtacctggaacactcacaatatatgatattgctgggctcaccagaggcgcatctcaaggccatggtttgggtaacaagttcttaaacgatatcagacacgtagaggggatatttcaagtggtgagaggattcttaaaggaagacatcacccatatagaaggtaatgttgatcctgtcagagatctatccgtggtacaagatgaactcatcttgaaagacttagaatttctggaaaacattagggaaagacttagtaagaagatgagaatggtttcgaagaattctaaagaacatcaggaaatgaagatagagacagaattattagatgcattagaggaacatttgtttaacggtaaaaaaatccggcatttcaaagatcattggaacctggatgaagtcaaaattttgaataagcataactttttaacctccaaaccaactttgatattgctaaatgtttcacctcaagattacgttaggaatgaaaataaatttgtcagaaatattatagaatggattaacgaattttcgccaggagataaattcctacttttcagtgcagaatttgaatcgcaattgatggaatgtaaaggcatagcgtcagagtattttgacaagatcaaggaagataccaatgtttctgatcaacagttagtttctgcgataccgcaaataatactagaaatgagaaagttgttgaacttaattagcttctttacatgcggcccacaagaagttcaccaatggaatataagggagggaaccaccgctcaagaggccgcgggtgtaatccatagcgacttgcgtgaaacatttatcagcgctgatgtaataaaatatgacgatctgaagaagatggaaccaccgctaaatgagtctttactaaaatctaagggacttatcaaacgtgcaggcaaacaatatattatgcaggacaatgacattgccttattcaaagccgccggtgggaaaattaagaaatag

SEQ ID NO: 4790 - DNA, 1218 bp, Artificial Sequence
  Description of Artificial Sequence: Synthetic polynucleotide
atgaacattggtggaggaaaatttttacttgggaggatatccaataatccaacttctgggatagtagggcttgctaatgttggtaaatctacttttttccaagcaataacaaactccaaattgggaaatcctgcaaattatccattcgctaccattgacgcagaatgtgccaaagtcaatatacctagcgtgccgctctctaatttattgagaatatatcagagtgcgaaatgcgtacctggaacactcacaatatatgatattgctgggctcaccagaggcgcatctcaaggccatggtttgggtaacaagttcttaaacgatatcagacacgtagaggggatatttcaagtggtgagaggattcttaaaggaagacatcacccatatagaaggtaatgttgatcctgtcagagatttatccgtggtacaagatgaactcatcttgaaagacttagaatttttggaaaacattagggaaagacttagtaagaagatgagaatggtttccaagaattctaaagaacatcaggaaatgaagatagagacagaattattagatgcattagaggaacatttgtttaacggtaaaaaaatcaggcatttcaaagatcattggaaccttgatgaagtcaaaattttgaataagcataactttttaacctccaaaccaactttgatattgttgaatgtttctcctcaagattacgttaggaatgaaaataaatttgtcagaaatattatagaatggattaacgaattttctccaggagataaattcttgcttttcagtgcagaatttgaatctcaattgatggaatgtaaaggcatagcgtctgagtattttgacaagatcaaggaagataccaatgtttctgatcaacagttagtttctgcgataccgcaaataatattggaaatgagaaagttgttgaacttaattagcttctttacatgcggcccacaagaagttcaccaatggaatataagggagggaaccaccgctcaagaggccgcgggtgtaatccatagcgacttgcgtgaaacatttatcagcgctgatgtaataaaatatgacgatttgaagaagatggaaccaccgttaaatgagtctttattgaaatctaagggacttatcaaacgtgcaggcaaacaatatattatgcaggacaatgacattgccttattcaaagccgccggtgggaaaattaagaaatga

SEQ ID NO: 4791 - DNA, 924 bp, Saccharomyces cerevisiae
atgaccggcatggaatcaggagagaatttggaaaacatggaagatattttggcgagacatcgcaaggaaaataaagatttacagaataagataacgggtatgaaaaagcaggctactaaatccaaaaggaaagaagttaattcgaaatgcctagatcttcaagataaactaaagactaagcaagaaaatgaaataagggattggaaaattgcaaataatgaagtgtttgacgcagaacaagaagatgaagtgactcctgaaaaacttttagaacaactatccatatctcgagatgagaaagaacaacagaatgttcccgttcaacaacagcaacaaggccagacaaagaagcgtcgcaatagacaaaaggaaagattggccaaaagagatgcagcaattgctaaaatgaaagaagaggctgctttagaagcatccaaacaaccggacttgaaaaaaatggagcaggagtctatagatcagttatgcgagttgaagaaactgaaacaattcgatatacaacccgatggccactgtctctttgcatctatattagatcagttaaaattacgccatgatccaaaaaaactggatcaagacatggatgtcatgaagctgagatggttgagttgtaattacgtacaggagcacagggatgatttcattccatatttgtttgatgaagaaactatgaagatgaaagacattgatgagtatacgaaagagatggagcatacagctcaatggggtggtgaaattgagattttggctctctctcacgttttcgactgccccattagcattctgatgagtggaagacctattcaagtgtacaatgaatgtgggaaaaatcctgaattgaagctagtttactataaacacagctatgcattaggtgagcattataattcattgcatgattcttga

SEQ ID NO: 4792 - DNA, 924 bp, Artificial Sequence
  Description of Artificial Sequence: Synthetic polynucleotide
atgaccggcatggaatctggagagaatttggaaaacatggaagatattttggcgagacatcgcaaggaaaataaagatttacagaataagataacgggtatgaaaaagcaggctactaaatccaaaaggaaagaagttaattctaaatgcttagatcttcaagataaattgaagactaagcaagaaaatgaaataagggattggaaaattgcaaataatgaagtgtttgacgcagaacaagaagatgaagtgactcctgaaaaacttttagaacaattatccatatctagagatgagaaagaacaacagaatgttcccgttcaacaacagcaacaaggccagacaaagaagcgtcgcaatagacaaaaggaaagattggccaaaagagatgcagcaattgctaaaatgaaagaagaggctgctttagaagcatccaaacaaccggacttgaaaaaaatggagcaggagtctatagatcagttatgcgagttgaagaaattgaaacaattcgatatacaacccgatggccactgtctctttgcatctatattagatcagttaaaattacgccatgatccaaaaaaattggatcaagacatggatgtcatgaagttgagatggttgagttgtaattacgtacaggagcacagggatgatttcattccatatttgtttgatgaagaaactatgaagatgaaagacattgatgagtatacgaaagagatggagcatacagctcaatggggtggtgaaattgagattttggctctctctcacgttttcgactgccccattagcattttgatgagtggaagacctattcaagtgtacaatgaatgtgggaaaaatcctgaattgaagttggtttactataaacacagctatgcattaggtgagcattataattctttgcatgattcttga

SEQ ID NO: 4793 - DNA, 1482 bp, Saccharomyces cerevisiae
atgacggttttctctggagtaaataaaatagagtttgaaggtactttcgaaggtattggaaaggatgttgttatgtcacaaatgataagggccttgcagaaacattttccttcgatacgtgacaagaattatgagtttagcctatttttgcacatttttcaaagatatgtcttagaaaatacttcaatcacccatgatctagtttgtgacaaaattagattaccgataattgatgaagtggttgaactcgatgatattaaaaattacggtttgttagagggtaaactattatcaaagttagctattttaaaattaaccggaaaggctaatccaatcattggtaaagaaagccctttattcgaagtaaaaaatgggatgtcttcattggatgtaatagttcgacaaacgcaaaatttgaatgtacgatataattcagacgttcctcttatatttatgacctcgcttgaaactgaatctcaagtatcaaacttccttgaagagcattattcttctagcaaagtgagatggaaaaccgtagttcagtcaagctttccacaaattgataaagatagattattacctatcgatttacaaataaattctcatgaaaatgatttttggtatccttgcgggactggtaacctaactgacactttgtatttttcaggagaattggacaaattaattgctcaaggaaaagagattttatttgtttcaaatgttgacaatttgggcgctacaggagatttgaacattttaaatttcatcataaatgaaaaaatcgagtatcttgttgaagtagttgaaaggactgcaaatgtttcaaacactggagtgttggcaacatataaaggtaaactacgatcggtttattacaactgcttatccaatgaaagtgcaagcacgtgtcgaattgtcaacactaataacatttggattgatttgaaaaagctaaaggtgctaatagagtctaatagtttaaatttgccaattcattctagtgaaagtaaaataacacacaaaaatgaagagatagagtgtcttcaatttaagacacagttggtcgattgtattgccttctttccgaacagtcgagtattgaaagtatcaagagacagatttttacccctaagaacatgtaaggacttgtttttgttgaaatcaacattatatgatctcgattcaaatggaacatttaacctctaccctctgaaatttggattattaccttcaatcgacttgggcgatgagtttgcaacttatgagacttttaagataggagtaccagatattcctaatattctggaattagagcatttaactgtgatgggaaatgtgttttttggtcgtaatataactctgaaagggacggtcattataatatgtgatgaaaatgatgtaattactgttcccgatggctctattttggaaaatgtaacgatttggcataaatctcagctggaggatatgaatggatattaa

SEQ ID NO: 4794 - DNA, 1482 bp, Artificial Sequence
  Description of Artificial Sequence: Synthetic polynucleotide
atgacggttttctctggagtaaataaaatagagtttgaaggtactttcgaaggtattggaaaggatgttgttatgtctcaaatgataagggccttgcagaaacattttccttccatacgtgacaagaattatgagtttagcttgtttttgcacatttttcaaagatatgtcttagaaaatacttctatcacccatgatttggtttgtgacaaaattagattaccgataattgatgaagtggttgaactcgatgatattaaaaattacggtttgttagagggtaaattattatccaagttagctattttaaaattaaccggaaaggctaatccaatcattggtaaagaaagccctttattcgaagtaaaaaatgggatgtcttctttggatgtaatagttcgtcaaacgcaaaatttgaatgtaagatataatagtgacgttcctcttatatttatgacctctcttgaaactgaatctcaagtatccaacttccttgaagagcattattcttctagcaaagtgagatggaaaaccgtagttcagagtagctttccacaaattgataaagatagattattacctatcgatttacaaataaattctcatgaaaatgatttttggtatccttgcgggactggtaacttgactgacactttgtatttttctggagaattggacaaattaattgctcaaggaaaagagattttatttgtttctaatgttgacaatttgggcgctacaggagatttgaacattttaaatttcatcataaatgaaaaaatcgagtatcttgttgaagtagttgaaaggactgcaaatgtttctaacactggagtgttggcaacatataaaggtaaacttagatctgtttattacaactgcttatccaatgaaagtgcaagcacgtgtagaattgtcaacactaataacatttggattgatttgaaaaagttgaaggtgttgatagagtctaatagtttaaatttgccaattcattctagtgaaagtaaaataacacacaaaaatgaagagatagagtgtcttcaatttaagacacagttggtcgattgtattgccttctttccgaacagtagagtattgaaagtatctagagacagatttttacccttgagaacatgtaaggacttgtttttgttgaaatctacattatatgatctcgattctaatggaacatttaacctctaccctttgaaatttggattattaccttccatcgacttgggcgatgagtttgcaacttatgagacttttaagataggagtaccagatattcctaatattttggaattagagcatttaactgtgatgggaaatgtgttttttggtcgtaatataactttgaaagggacggtcattataatatgtgatgaaaatgatgtaattactgttcccgatggctctattttggaaaatgtaacgatttggcataaatctcagttggaggatatgaatggatattga

SEQ ID NO: 4795 - DNA, 963 bp, Saccharomyces cerevisiae
atgccaacaaattccatcaaattattagcaccagatgtccaccgaggtttagctgaacttgttgccaaaaggctaggtctacagttaacaagcagcaaactaaagagagatccaaccggtgaggtttccttttctattggagaatctgttagggaccaagatatctttatcatcacgcaaattggctctggtgtcgtgaacgatcgtgttctagaactactgatcatgatcaatgcttcgaagactgcgtctgcaagaagaatcactgctattattccaaatttcccatatgcaagacaagatagaaaggataagtctcgtgctcctattaccgctaaattgatggccgatatgttaacaacagccgggtgtgatcatgttattactatggatttgcatgcttcccaaattcaagggttcttcgacgtcccagtagataatttatatgcagaaccaagcgtagttaggtatatcaaggaaaatgtcaactatatggattcaataataatttcgccagatgctggtggggcaaaacgtgctgccactttggctgatcgtttggatctaaattttgcattgatccataaggaaagagctcgtgccaatgaggtttctcgtatggttcttgttggggatgttactgataagatttgtatcattgttgatgatatggccgatacttgtggtactttagctaaggctgctgaaattcttttggagaatagagctaaatctgttattgctattgtcacgcacggtgttttatcaggcagagctattgaaaatattaacaattctaaactggatagagttgtttgcacaaatactgttccatttgaagaaaaaatcaagaagtgcccaaaactggcagtcattgacatcagtagtgtgctggctgaaagtattcgtcgtttgcataatggtgaaagtatttcttatttatttaagaattatcccttataa

SEQ ID NO: 4796 - DNA, 963 bp, Artificial Sequence
  Description of Artificial Sequence: Synthetic polynucleotide
atgccaacaaattccatcaaattattagcaccagatgtccacagaggtttagctgaacttgttgccaaaaggcttggtttacagttaacaagcagcaaattgaagagagatccaaccggtgaggtttccttttctattggagaatctgttagggaccaagatatctttatcatcacgcaaattggctctggtgtcgtgaacgatcgtgttttggaattattgatcatgatcaatgcttccaagactgcgtctgcaagaagaatcactgctattattccaaatttcccatatgcaagacaagatagaaaggataagtctcgtgctcctattaccgctaaattgatggccgatatgttaacaacagccgggtgtgatcatgttattactatggatttgcatgcttcccaaattcaagggttcttcgacgtcccagtagataatttatatgcagaaccaagcgtagttaggtatatcaaggaaaatgtcaactatatggattctataataatttctccagatgctggtggggcaaaacgtgctgccactttggctgatcgtttggatttgaattttgcattgatccataaggaaagagctcgtgccaatgaggtttctcgtatggttcttgttggggatgttactgataagatttgtatcattgttgatgatatggccgatacttgtggtactttagctaaggctgctgaaattcttttggagaatagagctaaatctgttattgctattgtcacgcacggtgttttaagtggcagagctattgaaaatattaacaattctaaattggatagagttgtttgcacaaatactgttccatttgaagaaaaaatcaagaagtgcccaaaattggcagtcattgacatcagtagtgtgttggctgaaagtattcgtcgtttgcataatggtgaaagtatttcttatttatttaagaattatcccttatga

SEQ ID NO: 4797 - DNA, 1758 bp, Saccharomyces cerevisiae
atggatcaatttgagtatatcattactttagaatttggaaaccaaaatcaggttgaatccgcttatcaaattttcaagagtattccgaaaaagttgaaggcaaaaagtatcggggaagaaagtattaaaagtaataatcaagactggcaggattggagagtctgtgacttggaaatagacatgataactgatttcaaaaatcaaacatcaaaagaagaggaaagtgatttgattacttcacaatacttaggccatgggataataaggctattcaagctaagcaatgccaataatactcttaatgagaaggagattttgactatcccgggagatgatactatgatatgtatcctgtttgttccaacttattttaccgttcacgatttattgcatttttatattggtgatgatattgttaataagcaagtttcaaactttcgtatattacgaaatcagcagaagggaatgggttttaatttcacggtcttaattaaattcaggaatgcacttgatgcgaaaaatttcaaggaagagttcaatggcaaaagtttcagcaggatggatcccgaaacatgccatgtgatctctgtaaaagaaatagtttttcaaaaaaagctcttccaaagaccagccgctaacgaggacttcccctatctgcttactgatccattcactgttaagaaaaaaaaggaactggtaaaagtcgaactccccacatgtcccgtttgccttgaaagaatggattcagaaactactggattagtaacgatcccgtgccagcacacttttcattgccaatgcttaaataagtggaagaattcaaggtgtccagtgtgtcgacattcaagtctgcggctaagcagggaatcattattgaaacaggcaggtgattccgcacattgtgcaacatgtggttccactgataatctatggatttgcttgatctgcggtaatgttggatgcggtcgttacaattccaaacacgcaatcaagcattatgaagaaactttacattgttttgcgatggatatacggacacaaagagtgtgggattatgcgggtgataattatgtccatcgcctagttcaaaatgaagttgatgggaagttagtagaggtcggcggctccggtgacgatgacaacaatgatataggcaactccgatgaactacaaaatgttgtttacgggaacaggagcaaaaacggtgagaaatcgaactctaataaaaaagatggcgagctggcggcaaattttttaaggcatagggagtatcatctagaatatgtgcaagtcctaatatctcaattagagtctcaaagagaatattatgaactgaaattacaagaaaaagatcaaactgcgtctgattcttcgaatgttgaaagtttgaagaagtctatggaagatttgaaactccaatttcaggtcactcaaaaggagtggcagaaaagggaaatggcccagaaatctaagcttgaggaagatatgttagtaatcgaaggactacaagcgaacctagatcacttatcaaaaaaacaagagcagttagagcgagaaaacaaagcgttagaagagtctaaacaagatttggaagagcaagtcaaggacctaatgttttatctagattctcaagaaaaattcaaagacgctgatgagagtgtaaaagaaggtaccatcctaatacagcaaccacatggggcagcacaggcatccaaaagcaagaagaagcgcaacaaaaataaaaaagcagggaaatga

SEQ ID NO: 4798 - DNA, 1758 bp, Artificial Sequence
  Description of Artificial Sequence: Synthetic polynucleotide
atggatcaatttgagtatatcattactttagaatttggaaaccaaaatcaggttgaatccgcttatcaaattttcaagagtattccgaaaaagttgaaggcaaaaagtatcggggaagaaagtattaaaagtaataatcaagactggcaggattggagagtctgtgacttggaaatagacatgataactgatttcaaaaatcaaacaagtaaagaagaggaaagtgatttgattacttctcaatacttaggccatgggataataaggttgttcaagttgagcaatgccaataatactcttaatgagaaggagattttgactatcccgggagatgatactatgatatgtatcttatttgttccaacttattttaccgttcacgatttattgcatttttatattggtgatgatattgttaataagcaagtttctaactttcgtatattaagaaatcagcagaagggaatgggttttaatttcacggtcttaattaaattcaggaatgcacttgatgcgaaaaatttcaaggaagagttcaatggcaaaagtttcagcaggatggatcccgaaacatgccatgtgatctctgtaaaagaaatagtttttcaaaaaaagctcttccaaagaccagccgctaacgaggacttcccctatttacttactgatccattcactgttaagaaaaaaaaggaattggtaaaagtcgaactccccacatgtcccgtttgccttgaaagaatggattctgaaactactggattagtaacgatcccgtgccagcacacttttcattgccaatgcttaaataagtggaagaattctaggtgtccagtgtgtagacattctagtttgagattgagcagggaatctttattgaaacaggcaggtgattccgcacattgtgcaacatgtggttccactgataatttatggatttgcttgatctgcggtaatgttggatgcggtcgttacaattccaaacacgcaatcaagcattatgaagaaactttacattgttttgcgatggatataagaacacaaagagtgtgggattatgcgggtgataattatgtccatcgccttgttcaaaatgaagttgatgggaagttagtagaggtcggcggctccggtgacgatgacaacaatgatataggcaactccgatgaattacaaaatgttgtttacgggaacaggagcaaaaacggtgagaaaagtaactctaataaaaaagatggcgagttagcggcaaattttttaaggcatagggagtatcatttggaatatgtgcaagtcttgatatctcaattagagtctcaaagagaatattatgaattgaaattacaagaaaaagatcaaactgcgtctgattcttccaatgttgaaagtttgaagaagtctatggaagatttgaaactccaatttcaggtcactcaaaaggagtggcagaaaagggaaatggcccagaaatctaagcttgaggaagatatgttagtaatcgaaggattacaagcgaaccttgatcacttatccaaaaaacaagagcagttagagagagaaaacaaagcgttagaagagtctaaacaagatttggaagagcaagtcaaggacttgatgttttatttggattctcaagaaaaattcaaagacgctgatgagagtgtaaaagaaggtaccatcttaatacagcaaccacatggggcagcacaggcatccaaaagcaagaagaagcgcaacaaaaataaaaaagcagggaaatga

SEQ ID NO: 4799 - DNA, 993 bp, Saccharomyces cerevisiae
atgacgccttctaatatggatgataataccagcggattcatgaaatttattaaccctcaatgccaagaggaggattgttgtatcagaaatagtctattccaagaagatagcaaatgtataaaacaacaaccagacctattgagcgagcaaacagcacccttcccaattttggaagaccagtgtcctgctttgaaccttgacagatcaaataatgatttgctattacagaacaacatatctttccctaagggtagtgatcttcaagcaattcaactaacccctatttcaggcgactactctacctatgttatggcagataacaataataatgataatgatagttatagtaatacaaattatttttctaaaaataatggtatatctccaagttcgaggagtccctcagttgctcataatgagaatgttccagatgactctaaggcaaagaaaaaggctcaaaacagagccgcccaaaaagccttcagagagagaaaagaagccagaatgaaagaattacaagataaattgttagaaagtgaaaggaaccgccaaagtttattgaaagaaattgaggaactaagaaaggcaaatactgaaatcaacgcagagaacagactgctactgcggagtggtaatgaaaatttttcaaaggacatagaagatgataccaactacaaatattctttcccaacgaaagatgaattttttacctctatggtcctggaaagcaaactgaatcacaaaggcaagtattcgctaaaggataatgaaattatgaagcgaaatacccagtatactgacgaagcaggaagacatgtactaacagtccccgccacctgggagtatctttacaaactttcagaagagagggactttgatgtgacatacgttatgagcaaattgcaaggacaagaatgttgtcatacccatggacctgcgtatccaagaagtttaatcgattttctagtggaggaagctactttgaatgaatga

SEQ ID NO: 4800 - DNA, 993 bp, Artificial Sequence
  Description of Artificial Sequence: Synthetic polynucleotide
atgacgccttctaatatggatgataataccagcggattcatgaaatttattaaccctcaatgccaagaggaggattgttgtatcagaaatagtttattccaagaagatagcaaatgtataaaacaacaaccagacttgttgagcgagcaaacagcacccttcccaattttggaagaccagtgtcctgctttgaaccttgacagatctaataatgatttgttattacagaacaacatatctttccctaagggtagtgatcttcaagcaattcaattgacccctatttctggcgactactctacctatgttatggcagataacaataataatgataatgatagttatagtaatacaaattatttttctaaaaataatggtatatctccaagttctaggagtccctctgttgctcataatgagaatgttccagatgactctaaggcaaagaaaaaggctcaaaacagagccgcccaaaaagccttcagagagagaaaagaagccagaatgaaagaattacaagataaattgttagaaagtgaaaggaaccgccaaagtttattgaaagaaattgaggaattgagaaaggcaaatactgaaatcaacgcagagaacagattattattaagaagtggtaatgaaaatttttccaaggacatagaagatgataccaactacaaatattctttcccaacgaaagatgaattttttacctctatggtcttggaaagcaaattgaatcacaaaggcaagtattctttgaaggataatgaaattatgaagagaaatacccagtatactgacgaagcaggaagacatgtattaacagtccccgccacctgggagtatctttacaaactttctgaagagagggactttgatgtgacatacgttatgagcaaattgcaaggacaagaatgttgtcatacccatggacctgcgtatccaagaagtttaatcgattttttagtggaggaagctactttgaatgaatga

SEQ ID NO: 4801 - DNA, 1884 bp, Saccharomyces cerevisiae
atggttgacgactcaaactatcttacaccacatgaaactgcattagcggtggtggccactgcaatgaagaaagcaagactgcaactagatacattgctaataaattccatacttggtggcgttctgtttagtagtggttcgttcctattggtagcggtatattccgaagatcctgacatagtcgcacgaaacccgggtattgtgaatcttattactggtgttaatttcgccatgggactattctatgtagtaatgatgggtgctgacctcttcaactctaatatcctatttttctccgttggagttctgagaaaagcagtaactatctatgatttgatgatttcgtgggttgtcagttggttaggtaatattgctggctcactttttgtttcatatctttttggtcatctttctggtattagttctcagaagctttggataataggctcacggcaaatcatagaacaaaaagtttcatattcattcgtccaaacctttttaaaaggaatagcgtgcaatttttttgtttgtttagccatatatttacagttaatggcaaaacctattcatgtgaagtttattctaatgtcattccctatcattgactttattggtatcggatttacacatgtagtcggagatatgtctgcatctttcattgcaatgcttaacggtgcaaatgtttcagtgggtaaatatatatggaaactactaattcccgcttctttaggtaacatcgttggaggactcttttttagtgcagtcgttcccttctacttacatttggtggttgtggaacgtgatagaaagagattatctttaccagaatacgaagcaagagatgagcaaccagaactgaatatggattcaagagttgtaagaatacaaaaaaatgagtgtgacgatgatgcaactgaaaccggtgaagatcttgaaaaccttactgaaaagggctttgcaagcatttataatacaaatcacgataactcgagctatttcaccggcagaagtctaaattcgcttcgatccataccttcatcagttataacttccgacaatgttacaatggaatcggacttgggagaacccgtacaattcatacctaaaagtaactctacgacaagatctccacacctggggttgcctcacaatctgcctcacaatcactcgatcaaatctattaacaggcaccgtattaacaagcgccacagtttgagatcgccgcctggtgtctttcctgtaaggggaatgggggaaccgctagaaagagaaaaaacgattgaagatgcaacttacgaccctaaggaaaatgagcttttcttaagaagagccgaaacacataactccgcgtacgtgaagaataaaaaaaaggaggatgataacctgttaaggctagtgaaaactgaagaagatcgtgagcaaaaggagtacgaaaaaaatggtggttataatattttggaaaataaaccaggtaccaggctagaaaaaataattacccatcttgctgaaaatgtatcttctagggaagtgacgcctccgatattacctagaacgacacaggatacttttcctcataacgctcccgcctcgtctccagcatacacagacgatgctcattcattacgtaaagcaaacagtaccacgttgggcggactgtttagggcggtgtcgaaagaatttcactcaagcaaggatgcagaaagcccagatgacttactcaaaaaaatggctgctgttggcataaaccgcaatgctagaattacagcaaataatgtagccggaattgttaacctaaataaagaggacctggacagcactacaaggcggcaaaaaattactgagcccaaaaacttttataatcgtcacacatccccccagttatga

SEQ ID NO: 4802 - DNA, 1884 bp, Artificial Sequence
  Description of Artificial Sequence: Synthetic polynucleotide
atggttgacgactccaactatcttacaccacatgaaactgcattagcggtggtggccactgcaatgaagaaagcaagattacaattggatacattgttaataaattccatacttggtggcgttttatttagtagtggttctttcttgttggtagcggtatattccgaagatcctgacatagtcgcaagaaacccgggtattgtgaatcttattactggtgttaatttcgccatgggattattctatgtagtaatgatgggtgctgacctcttcaactctaatatcttatttttctccgttggagttttgagaaaagcagtaactatctatgatttgatgatttcttgggttgtcagttggttaggtaatattgctggctctctttttgtttcttatctttttggtcatctttctggtattagttctcagaagctttggataataggctctagacaaatcatagaacaaaaagtttcttattctttcgtccaaacctttttaaaaggaatagcgtgcaatttttttgtttgtttagccatatatttacagttaatggcaaaacctattcatgtgaagtttattttgatgagtttccctatcattgactttattggtatcggatttacacatgtagtcggagatatgtctgcatctttcattgcaatgcttaacggtgcaaatgtttctgtgggtaaatatatatggaaattattgattcccgcttctttaggtaacatcgttggaggactcttttttagtgcagtcgttcccttctacttacatttggtggttgtggaacgtgatagaaagagattatctttaccagaatacgaagcaagagatgagcaaccagaattgaatatggattccagagttgtaagaatacaaaaaaatgagtgtgacgatgatgcaactgaaaccggtgaagatcttgaaaaccttactgaaaagggctttgcaagcatttataatacaaatcacgataactccagctatttcaccggcagaagtttgaattctcttcgttccataccttcttctgttataacttccgacaatgttacaatggaaagtgacttgggagaacccgtacaattcatacctaaaagtaactctacgacaagatctccacaccttgggttgcctcacaatttacctcacaatcactccatcaaatctattaacaggcaccgtattaacaagcgccacagtttgagatctccgcctggtgtctttcctgtaaggggaatgggggaaccgttggaaagagaaaaaacgattgaagatgcaacttacgaccctaaggaaaatgagcttttcttaagaagagccgaaacacataactccgcgtacgtgaagaataaaaaaaaggaggatgataacttattaaggttggtgaaaactgaagaagatcgtgagcaaaaggagtacgaaaaaaatggtggttataatattttggaaaataaaccaggtaccaggttagaaaaaataattacccatcttgctgaaaatgtatcttctagggaagtgacgcctccgatattacctagaacgacacaggatacttttcctcataacgctcccgcctcttctccagcatacacagacgatgctcattctttacgtaaagcaaacagtaccacgttgggcggattatttagggcggtgtctaaagaatttcacagtagcaaggatgcagaaagcccagatgacttactcaaaaaaatggctgctgttggcataaaccgcaatgctagaattacagcaaataatgtagccggaattgttaacttgaataaagaggacttggacagcactacaaggagacaaaaaattactgagcccaaaaacttttataatcgtcacacatccccccagttatga

SEQ ID NO: 4803 - DNA, 2820 bp, Saccharomyces cerevisiae
atgagcaatgatccatctgctgtatcggaactaccagacaaggacagtcttgataacggtatcagcaatgacaatgaaagggccatgggcggcaatggcgatggcggcgatggattacgattaccaaggaccactggaactttgaacgtcaatgccttacaaaaaggcactaatgctgcccatgaagctggtggatacaaatccatggatcctgcgaagaacgcggagacaaccaatgatgatgacaataatgtcgtttcactagatgatcctattcaatttacccgagtatcttcctcctctgtcatcagtggaatgtcttcatccatgagtcctcattctaacatcgatgaaaccaaatctctagaagcagtcactccaaacataaataccagcaatataaccccggatcattctgctgacaacacattttctaccataaatgcgtccgagtcagatcaccagtttaatgacactttactatcaaaactgtcgttaacagattctacagaaactatagaaaataacgcgacagtgaagcaccagcagccagttgcatcttccacagtaaactcgaataagagctccactgatatacgaagggctacaccagtgtccactcccgttatctctaaaccatcgatgacaaccacgccaagacagatcaattcagcttcccattcgctttcgaaccctaagcataagcaacataaaccaaaagttaaaccgtccaagcctgaagcaaaaagtaaaccggtttctgtgaaaaaaagctttccttcgaaaaatcctttaaaaaactcctctccacctaaaaagcaaacagaaaaatcgtattattcttcctcttcgaaaaaaaggaaaagcggttcaaatagtggtacactaagaatgaaagatgtctttacgtcctttgtacagaatataaagagaaattctcaggatgataaaagggcctcatcgtcgtccaataattcttcctcatcttctataaccaccgctttgaggatatctacgccatacaatgccaagcatatccaccatgtgggcgtggactccaagactggtgagtacacaggtttgccggaggaatgggaaaaattgttgacttctagtggtatttccaaaagagaacaacagcaaaacatgcaagcagtcatggatattgtcaaattctatcaggatgtcacggaaacaaacggtgaagataaaatgttcaagactttcaacacaaccacaggattgccgggaagtcctcaagtttcaacaccgcctgcaaactcattcaataaatttcctccgtcgacaagtgattcgcacaattacggttccagaacaggtacaccaatgtccaatcacgtcatgtctccaaccttaaatacagattctagttcagcaaacgggaaattcataccaagtagaccggctcctaagcccccatcttctgcgtccgcttcagctccaattataaaatcacccgtcatgaattctgccgccaatgtttcgcccttgaagcagactcatgcacctacaactccgaacaggaccagcccaaacaggtcctcaatatcaagaaatgccactttaaaaaaagaggagcagccactaccaccaatacctccaaccaaatccaaaacgtctccaatcatctccacagctcacacaccacagcaagttgctcaatcgccaaaagcgccggcgcaagagacggtaacgacacctacttcgaagccagctcaagcaagaagcttgtctaaagaattaaatgagaaaaagagagaggaaagggaaagacgtaaaaaacaactatatgccaaattgaacgaaatttgctcagacggtgacccaagtacaaaatatgccaatttagtaaaaattggtcaaggtgcatcaggtggtgtttatactgcttatgaaataggtacgaatgtctcagtggccattaagcaaatgaatctcgaaaagcaaccaaaaaaggagctaatcatcaatgagattctggtcatgaagggtagcaaacaccctaatatagttaatttcattgattcttacgttttaaaaggcgacctttgggtcattatggaatacatggaaggtggctccttaactgatgtggtcacccattgtattttgacagaaggtcaaattggtgccgtttgtagagaaactttgagtgggttggaatttttacattctaaaggtgttcttcacagagatatcaaatccgataacatcctattgtccatggaaggggatattaagttaacggatttcggtttttgcgctcaaatcaatgaattgaacttgaaaagaactactatggtgggaacgccttattggatggcgcctgaagtggtttctaggaaagaatatggcccaaaagtagatatctggtcgttgggtatcatgatcattgaaatgatcgagggggagcctccatatttaaatgaaaccccgctaagagcactgtatttaattgctacaaatggtacacccaagttaaaggaacccgagaatctatcgtcaagcttgaaaaaattccttgattggtgtttatgtgtggagcccgaagatagagcaagcgctacggaattgcttcatgatgaatatatcacggagatagctgaagccaattcctcattggccccgctagtcaagttagcaagattgaagaaagtagctgagaacatggatgctgatgaagataatgacgacgataacgacaacgagcatattaataagacaaacaattgtgacgacaataacgatagcaaagaaaccgtaaatttggacgtaactgaagatgataaacaaaagtaa

SEQ ID NO: 4804 - DNA, 2820 bp, Artificial Sequence
  Description of Artificial Sequence: Synthetic polynucleotide
atgagcaatgatccatctgctgtatctgaattaccagacaaggacagtcttgataacggtatcagcaatgacaatgaaagggccatgggcggcaatggcgatggcggcgatggattaagattaccaaggaccactggaactttgaacgtcaatgccttacaaaaaggcactaatgctgcccatgaagctggtggatacaaatccatggatcctgcgaagaacgcggagacaaccaatgatgatgacaataatgtcgtttctttagatgatcctattcaatttaccagagtatcttcctcctctgtcatcagtggaatgtcttcttccatgagtcctcattctaacatcgatgaaaccaaatctttggaagcagtcactccaaacataaataccagcaatataaccccggatcattctgctgacaacacattttctaccataaatgcgtccgagtctgatcaccagtttaatgacactttattatccaaattatctttaacagattctacagaaactatagaaaataacgcgacagtgaagcaccagcagccagttgcatcttccacagtaaacagtaataagagctccactgatataagaagggctacaccagtgtccactcccgttatctctaaaccaagcatgacaaccacgccaagacagatcaattctgcttcccattctctttccaaccctaagcataagcaacataaaccaaaagttaaaccgtccaagcctgaagcaaaaagtaaaccggtttctgtgaaaaaaagctttccttccaaaaatcctttaaaaaactcctctccacctaaaaagcaaacagaaaaaagttattattcttcctcttctaaaaaaaggaaaagcggtagtaatagtggtacattaagaatgaaagatgtctttacgtcctttgtacagaatataaagagaaattctcaggatgataaaagggcctcttcttcttccaataattcttcctcttcttctataaccaccgctttgaggatatctacgccatacaatgccaagcatatccaccatgtgggcgtggactccaagactggtgagtacacaggtttgccggaggaatgggaaaaattgttgacttctagtggtatttccaaaagagaacaacagcaaaacatgcaagcagtcatggatattgtcaaattctatcaggatgtcacggaaacaaacggtgaagataaaatgttcaagactttcaacacaaccacaggattgccgggaagtcctcaagtttctacaccgcctgcaaactctttcaataaatttcctccgtccacaagtgattctcacaattacggttccagaacaggtacaccaatgtccaatcacgtcatgtctccaaccttaaatacagattctagttctgcaaacgggaaattcataccaagtagaccggctcctaagcccccatcttctgcgtccgcttctgctccaattataaaaagtcccgtcatgaattctgccgccaatgtttctcccttgaagcagactcatgcacctacaactccgaacaggaccagcccaaacaggtcctccatatctagaaatgccactttaaaaaaagaggagcagccattaccaccaatacctccaaccaaatccaaaacgtctccaatcatctccacagctcacacaccacagcaagttgctcaatctccaaaagcgccggcgcaagagacggtaacgacacctacttctaagccagctcaagcaagaagcttgtctaaagaattaaatgagaaaaagagagaggaaagggaaagacgtaaaaaacaattatatgccaaattgaacgaaatttgctctgacggtgacccaagtacaaaatatgccaatttagtaaaaattggtcaaggtgcatctggtggtgtttatactgcttatgaaataggtacgaatgtctctgtggccattaagcaaatgaatctcgaaaagcaaccaaaaaaggagttgatcatcaatgagattttagtcatgaagggtagcaaacaccctaatatagttaatttcattgattcttacgttttaaaaggcgacctttgggtcattatggaatacatggaaggtggctccttaactgatgtggtcacccattgtattttgacagaaggtcaaattggtgccgtttgtagagaaactttgagtgggttggaatttttacattctaaaggtgttcttcacagagatatcaaatccgataacatcttgttgtccatggaaggggatattaagttaacggatttcggtttttgcgctcaaatcaatgaattgaacttgaaaagaactactatggtgggaacgccttattggatggcgcctgaagtggtttctaggaaagaatatggcccaaaagtagatatctggtctttgggtatcatgatcattgaaatgatcgagggggagcctccatatttaaatgaaaccccgttaagagcattatatttaattgctacaaatggtacacccaagttaaaggaacccgagaatttatcttctagcttgaaaaaattccttgattggtgtttatgtgtggagcccgaagatagagcaagcgctacggaattgcttcatgatgaatatatcacggagatagctgaagccaattcctctttggccccgttagtcaagttagcaagattgaagaaagtagctgagaacatggatgctgatgaagataatgacgacgataacgacaacgagcatattaataagacaaacaattgtgacgacaataacgatagcaaagaaaccgtaaatttggacgtaactgaagatgataaacaaaagtga

SEQ ID NO: 4805 - DNA, 453 bp, Saccharomyces cerevisiae
atgcagtttgaagagcggttgcaacagctagtagaaagcgattggagcctggatcagtcaagcccaaacgtactggtgatagtccttggagacactgccaggaagtacgtagagttaggaggactgaaggagcacgtgactacgaacactgtggcaggtcacgtggcaagccgggagcgggtatccgtagtttttttgggccgggtaaagtacttatacatgtacctcacccggatgcaagcgcaggcgaatggtccgcaatactctaatgtactcgtctatggattgtgggatctcaccgcgacacaagatggaccgcaacagctgcggctacttagccttgtgttacggcagtgcctcagtctgccatctaaagttgaattctatccagaaccgccttctagtagcgtgcctgcccggctattgcgattctgggaccatattatcagatag

SEQ ID NO: 4806 - DNA, 453 bp, Artificial Sequence
  Description of Artificial Sequence: Synthetic polynucleotide
atgcagtttgaagagagattgcaacagttggtagaaagcgattggagcttagatcagagtagcccaaacgtattggtgatagtccttggagacactgccaggaagtacgtagagttaggaggattgaaggagcacgtgactacgaacactgtggcaggtcacgtggcaagcagagagagggtatccgtagtttttttgggcagagtaaagtacttatacatgtacctcaccagaatgcaagcgcaggcgaatggtccgcaatactctaatgtactcgtctatggattgtgggatctcaccgcgacacaagatggaccgcaacagttaaggttacttagccttgtgttaagacagtgcctcagtttaccatctaaagttgaattctatccagaaccgccttctagtagcgtgcctgccagattattgagattctgggaccatattatcagatga

SEQ ID NO: 4807 - DNA, 393 bp, Saccharomyces cerevisiae
atgagaaaagagtcgtttctcactttttatttctcgaatcacctgtatttgtgccccgcgataatcaggctctcgagcgtatgtacacttgccagaactgattattatttaccatcaaatatagcagtgacctacgacatacaaatttcatctctcggattcacttaccgaattgatttttttcttgcactcttttctgacccggcacggccttttcttaccgagataaacaggaaaatagggcagtatgcgtgtgttatacgtgagagagagcaagcgggtgagtattcgtttcattacagtttatgcattaacataaacgtatacatattacacatacacatatacatagatagatacatatacgcatatattaatgctcaggtgcaataa

SEQ ID NO: 4808 - DNA, 393 bp, Artificial Sequence
  Description of Artificial Sequence: Synthetic polynucleotide
atgagaaaagagtcttttctcactttttatttcagtaatcacttgtatttgtgccccgcgataatcaggctctctagcgtatgtacacttgccagaactgattattatttaccatccaatatagcagtgacctacgacatacaaatttcttctctcggattcacttacagaattgatttttttcttgcactcttttctgacccggcaagaccttttcttaccgagataaacaggaaaatagggcagtatgcgtgtgttatacgtgagagagagcaagcgggtgagtattcttttcattacagtttatgcattaacataaacgtatacatattacacatacacatatacatagatagatacatatacgcatatattaatgctcaggtgcaatga

SEQ ID NO: 4809 - DNA, 1185 bp, Saccharomyces cerevisiae
atgcagagacacgtttttgcgaggaatttcagacgtctttccttattgaggaacccttcccttaccaaaaggtttcagtcgtcagcatccggtgcggccaacacccctaacaataacgatgaggtgatgctgttgcaacagaaacttttgtatgatgaaattagatcagaattgaagtctctatctcaggtaccagaagatgaaatattacctgagttgaaaaagtcattagagcaagacaaactctctgacaaagaacagcagctggaggctgaattgagtgactttttcagaaattatgctctgttgaacaagttgtttgacagcaagacattagatggacaatcttctacaacgacagcagcagccacgccaaccaagccttaccctaaccttataccttcggccaatgacaaaccatattcctctcaagaacttttcttgcgtcaactaaaccattccatgcgtaccgctaaattgggtgccactatttcgaaggtttactatcctcataaggacattttctatccgcccctcccagaaaacattactgttgagagcttaatgtctgctggtgttcacttgggccagtctacctcactttggaggtcttccacacaatcctacatatacggtgaatataaaggtattcacataatagatctaaaccaaactttgtcctatttgaagagagccgccaaggtagtagagggcgtttcggaatccggtggcattatcctatttctgggtacaagacaaggccagaaaagagggctcgaggaagctgctaagaagacacatggttattatgtgtctaccagatggatcccgggtactttgacgaattctacagaaatttcaggtatctgggagaagcaggaaatcgactctaatgacaatcccaccgaaagagcgttatcaccgaatgaaacatcaaagcaggttaagcctgacttgctggtcgtattaaatcccacagaaaatagaaacgctttgttagaagcaattaaatcaagggtcccaactatcgcaatcatcgatactgactccgaaccttctttggtgacctaccctatcccaggtaacgatgattcattgagatctgtcaatttcttactaggagtcttggcgagagctggccaaagaggcttgcaaaatcgcttggccagaaataacgaaaaatga

SEQ ID NO: 4810 - DNA, 1185 bp, Artificial Sequence
  Description of Artificial Sequence: Synthetic polynucleotide
atgcagagacacgtttttgcgaggaatttcagacgtctttccttattgaggaacccttcccttaccaaaaggtttcagtcttctgcatccggtgcggccaacacccctaacaataacgatgaggtgatgcttttgcaacagaaacttttgtatgatgaaattagaagtgaattgaagtctttatctcaggtaccagaagatgaaatattacctgagttgaaaaagtctttagagcaagacaaactctctgacaaagaacagcagttggaggctgaattgagtgactttttcagaaattatgctttattgaacaagttgtttgacagcaagacattagatggacaatcttctacaacgacagcagcagccacgccaaccaagccttaccctaaccttataccttctgccaatgacaaaccatattcctctcaagaacttttcttgcgtcaattgaaccattccatgcgtaccgctaaattgggtgccactatttccaaggtttactatcctcataaggacattttctatccgcccctcccagaaaacattactgttgagagcttaatgtctgctggtgttcacttgggccagtctacctctctttggaggtcttccacacaatcctacatatacggtgaatataaaggtattcacataatagatttgaaccaaactttgtcctatttgaagagagccgccaaggtagtagagggcgtttctgaatccggtggcattatcttatttttaggtacaagacaaggccagaaaagagggctcgaggaagctgctaagaagacacatggttattatgtgtctaccagatggatcccgggtactttgacgaattctacagaaatttctggtatctgggagaagcaggaaatcgactctaatgacaatcccaccgaaagagcgttatctccgaatgaaacatccaagcaggttaagcctgacttgttggtcgtattaaatcccacagaaaatagaaacgctttgttagaagcaattaaatctagggtcccaactatcgcaatcatcgatactgactccgaaccttctttggtgacctaccctatcccaggtaacgatgattctttgagatctgtcaatttcttattaggagtcttggcgagagctggccaaagaggcttgcaaaatcgcttggccagaaataacgaaaaatga

SEQ ID NO: 4811 - DNA, 1236 bp, Saccharomyces cerevisiae
atgacatcagctacggacaaatctatcgataggttagttgttaatgcaaaaacaagaagacgaaactcttccgtgggtaaaattgatttaggtgatacagttcctggctttgcagccatgcctgaaagtgctgcctctaaaaatgaggccaaaaaaaggatgaaagccttgactggtgactctaaaaaggatagtgacctactgtggaaggtttggttttcatatagagaaatgaattaccgtcatagttggttgacaccattcttcatacttgtatgcgtgtatagcgcgtactttttatctgggaatagaacagaatcaaacccgctgcacatgttcgtagccatatcatatcaagttgatggcacagactcatatgcaaaaggtatcaaagatttgagttttgtgtttttctacatgattttcttcacatttttacgtgagtttttgatggatgttgtaattcgaccattcacggtatacctaaatgttacttccgagcatcgtcaaaagcgtatgctagaacaaatgtatgccatattttattgcggagtttcagggccctttggtctttatattatgtaccatagtgatttgtggttgttcaagacaaaaccaatgtacagaacatatcctgttataaccaatccgttcttgtttaagatattttacttgggtcaagcggcattttgggcgcaacaggcttgtgttcttgttctacaattagaaaagccaagaaaggattacaaggaattggtttttcatcacattgtgacattattattaatttggtcatcatatgttttccattttaccaaaatgggattggctatctatattactatggatgtgtcagattttttcctttctttgtctaagacattaaactatctgaattctgtatttactccctttgtgttcggcttgttcgtgttcttttggatctatctgcgccatgtcgtgaatatcagaatattatggtcagtcttaacagaattccgtcatgaaggtaattatgtgttgaattttgccacacaacaatacaaatgttggatttcgttgccaattgtatttgtactaattgctgcgttacaattagttaacctgtattggctgtttttaattcttagaatcttgtacagattgatatggcaaggtatccaaaaggacgaaagaagtgacagtgattctgatgagagcgctgaaaatgaagaatctaaggaaaagtgtgaataa

SEQ ID NO: 4812 - DNA, 1236 bp, Artificial Sequence
  Description of Artificial Sequence: Synthetic polynucleotide
atgacatctgctacggacaaatctatcgataggttagttgttaatgcaaaaacaagaagaagaaactcttccgtgggtaaaattgatttaggtgatacagttcctggctttgcagccatgcctgaaagtgctgcctctaaaaatgaggccaaaaaaaggatgaaagccttgactggtgactctaaaaaggatagtgacttattatggaaggtttggttttcttatagagaaatgaattaccgtcatagttggttgacaccattcttcatacttgtatgcgtgtatagcgcgtactttttatctgggaatagaacagaatctaacccgttgcacatgttcgtagccatatcttatcaagttgatggcacagactcttatgcaaaaggtatcaaagatttgagttttgtgtttttctacatgattttcttcacatttttacgtgagtttttgatggatgttgtaattagaccattcacggtatacttgaatgttacttccgagcatcgtcaaaagcgtatgttggaacaaatgtatgccatattttattgcggagtttctgggccctttggtctttatattatgtaccatagtgatttgtggttgttcaagacaaaaccaatgtacagaacatatcctgttataaccaatccgttcttgtttaagatattttacttgggtcaagcggcattttgggcgcaacaggcttgtgttcttgttttgcaattagaaaagccaagaaaggattacaaggaattggtttttcatcacattgtgacattattattaatttggtcttcttatgttttccattttaccaaaatgggattggctatctatattactatggatgtgtctgattttttcctttctttgtctaagacattaaactatttgaattctgtatttactccctttgtgttcggcttgttcgtgttcttttggatctatttgcgccatgtcgtgaatatcagaatattatggtctgtcttaacagaattccgtcatgaaggtaattatgtgttgaattttgccacacaacaatacaaatgttggatttctttgccaattgtatttgtacttattgctgcgttacaattagttaacttatattggttatttttaattcttagaatcttgtacagattgatatggcaaggtatccaaaaggacgaaagaagtgacagtgattctgatgagagcgctgaaaatgaagaatctaaggaaaagtgtgaatga

SEQ ID NO: 4813 - DNA, 1359 bp, Saccharomyces cerevisiae
atgtcatcatctgcgattaaaataaggaatgcactgttgaaggcaacagatcccaagttgagaagtgataactggcaatacattttagatgtttgcgatttggtgaaggaagatcccgaagataatggacaagaggttatgtctcttatagagaagaggctagaacaacaggatgctaacgtgatcttaagaaccctctctttgacggtatctttggcagaaaattgtggttcccgcttaagacaggaaattagttcaaaaaattttacctctttgttatatgcgctcatcgagagccattctgtacacattactctaaaaaaagcggtgactgatgttgtcaagcaactgtctgattcattcaaggatgacccatcattacgcgccatgggagatctatatgacaaaattaaaagaaaggctccatatttggtacagcctaatgtaccagagaagcataacatgagtacccaggcagacaactcagatgatgaggaattacaaaaagcactaaaaatgtctttgtttgagtacgaaaagcaaaaaaagctacaagaacaggaaaaagaaagtgccgaagtccttccgcagcaacagcagcagcatcagcagcagaatcaagctcctgctcacaaaataccggcacaaaccgttgtgagaagagttcgggctctatatgacttaaccacaaacgaaccggatgaattgtcctttaggaagggcgatgttattacagtgctggaacaagtatatagagattggtggaagggagctcttcgaggaaatatgggtatatttccattaaattatgtaacaccgattgttgagccatcgaaagaagaaattgagaaggaaaaaaataaggaagccatagtattctctcaaaaaactaccatagatcaacttcataattcgcttaatgcagcttctaaaacgggaaattcaaatgaagttttgcaagatcctcatattggagatatgtacggatctgtaacgcctttgagacctcaagttacgagaatgttaggtaaatatgctaaagaaaaagaagacatgttatccctgcgtcaagtcttagcaaatgcagaacgctcatataatcaactaatggatcgtgcagctaacgcacatatctcaccaccagttccaggccctgcactctacgcaggaatgactcatgctaataatactccagtaatgccacctcagaggcagagttaccaaagcaatgagtactcaccttacccttctaatttgccaatccaacatcctacgaatagcgcaaataataccccacaatacggttatgatcttggatattcagttgttagccaaccaccacctggttatgaacaatag

SEQ ID NO: 4814 - DNA, 1359 bp, Artificial Sequence
  Description of Artificial Sequence: Synthetic polynucleotide
atgtcttcttctgcgattaaaataaggaatgcattattgaaggcaacagatcccaagttgagaagtgataactggcaatacattttagatgtttgcgatttggtgaaggaagatcccgaagataatggacaagaggttatgtctcttatagagaagaggttagaacaacaggatgctaacgtgatcttaagaaccctctctttgacggtatctttggcagaaaattgtggttcccgcttaagacaggaaattagttctaaaaattttacctctttgttatatgcgctcatcgagagccattctgtacacattactttgaaaaaagcggtgactgatgttgtcaagcaattatctgattctttcaaggatgacccatctttacgcgccatgggagatttatatgacaaaattaaaagaaaggctccatatttggtacagcctaatgtaccagagaagcataacatgagtacccaggcagacaacagtgatgatgaggaattacaaaaagcattgaaaatgtctttgtttgagtacgaaaagcaaaaaaagttacaagaacaggaaaaagaaagtgccgaagtccttccgcagcaacagcagcagcatcagcagcagaatcaagctcctgctcacaaaataccggcacaaaccgttgtgagaagagttagagctttgtatgacttaaccacaaacgaaccggatgaattgtcctttaggaagggcgatgttattacagtgttggaacaagtatatagagattggtggaagggagctcttagaggaaatatgggtatatttccattaaattatgtaacaccgattgttgagccatctaaagaagaaattgagaaggaaaaaaataaggaagccatagtattctctcaaaaaactaccatagatcaacttcataattctcttaatgcagcttctaaaacgggaaatagtaatgaagttttgcaagatcctcatattggagatatgtacggatctgtaacgcctttgagacctcaagttacgagaatgttaggtaaatatgctaaagaaaaagaagacatgttatccttacgtcaagtcttagcaaatgcagaacgctcttataatcaattgatggatcgtgcagctaacgcacatatctctccaccagttccaggccctgcactctacgcaggaatgactcatgctaataatactccagtaatgccacctcagaggcagagttaccaaagcaatgagtactctccttacccttctaatttgccaatccaacatcctacgaatagcgcaaataataccccacaatacggttatgatcttggatattctgttgttagccaaccaccacctggttatgaacaatga

SEQ ID NO: 4815 - DNA, 417 bp, Saccharomyces cerevisiae
atgtccactgattctattgttaaagcctccaactggagattagtcgaagtcggccgtgtcgttttgatcaaaaagggtcaatccgcaggtaaattggctgctatcgttgaaattatcgaccaaaagaaggttttgattgatggtccaaaagctggtgtcccacgtcaagccatcaacttgggtcaagttgtcttaactccattgacctttgctctaccaagaggtgctagaactgctaccgtttctaagaagtgggctgctgctggtgtttgcgaaaagtgggctgcttcatcttgggctaagaagattgctcaacgtgaaagacgtgctgctttgactgactttgaaagattccaagttatggttttaagaaagcaaaagagatacactgtcaagaaggctttggctaaggcttaa

SEQ ID NO: 4816 - DNA, 417 bp, Artificial Sequence
  Description of Artificial Sequence: Synthetic polynucleotide
atgtccactgattctattgttaaagcctccaactggagattagtcgaagtcggccgtgtcgttttgatcaaaaagggtcaatccgcaggtaaattggctgctatcgttgaaattatcgaccaaaagaaggttttgattgatggtccaaaagctggtgtcccacgtcaagccatcaacttgggtcaagttgtcttaactccattgacctttgctttgccaagaggtgctagaactgctaccgtttctaagaagtgggctgctgctggtgtttgcgaaaagtgggctgcttcttcttgggctaagaagattgctcaacgtgaaagacgtgctgctttgactgactttgaaagattccaagttatggttttaagaaagcaaaagagatacactgtcaagaaggctttggctaaggcttga

SEQ ID NO: 4817 - DNA, 1314 bp, Saccharomyces cerevisiae
atggctctcaataaactaaagaatataccttctttaacaaacagttctcatagctcaattaacggcattgcatccaatgctgcaaattccaaaccaagcggagcagacacggatgatatcgatgagaatgatgaatctgggcaaagtattctattaaatattatttcccagctgaagccaggttgtgatttatctagaatcacacttccgacatttattctggaaaaaaaatcgatgttggagagaatcactaatcaattacaattcccagatgttcttttagaagcacactccaataaagacgggctgcaaaggttcgttaaagtggtagcatggtacctagcaggttggcacattgggcccagggctgtgaagaagcccctaaatcccattcttggagaacactttacagcttattgggatttgcctaacaagcaacaagccttttacattgcagaacaaacgagtcaccatcctcctgaatctgcgtatttttacatgattccagaatcgaatattagagttgatggagttgttgtgccaaaatcgaaatttttaggaaactcaagtgctgcaatgatggaggggttaactgtattgcaattccttgatatcaaggatgcaaatggtaaaccagagaaatatactctatcgcaaccaaatgtttacgcaaggggaattctgtttggcaagatgaggattgaattgggagatcacatggtcattatgggtcctaagtatcaagtggatattgagttcaaaacaaagggctttatttctggtacctatgatgcaattgaaggtacaattaaggattacgatggtaaggaatactaccaaattagtggtaagtggaatgatattatgtatatcaaagatttgagggaaaaaagctctaaaaagactgttctcttcgatactcatcagcattttcctctagctcctaaagtccgcccattggaggaacagggagaatacgaatcgagaaggctttggaagaaggttacggatgcgctggctgtacgtgaccatgaagtagctacagaagaaaagtttcagatagaaaaccgccaaagagagctggccaaaaagagggccgaagacggcgttgaatttcattcaaaactatttagaagggcagagccaggtgaggatttagattattatatttacaagcacatccctgaagggaccgacaagcatgaagaacagatcaggagcattttggaaactgccccgattttaccaggacagacattcactgaaaaattttctattccggcttataaaaagcatggaatccaaaagaattag

SEQ ID NO: 4818 - DNA, 1314 bp, Artificial Sequence
  Description of Artificial Sequence: Synthetic polynucleotide
atggctctcaataaattgaagaatataccttctttaacaaacagttctcatagctctattaacggcattgcatccaatgctgcaaattccaaaccaagcggagcagacacggatgatatcgatgagaatgatgaatctgggcaaagtattttattaaatattatttcccagttgaagccaggttgtgatttatctagaatcacacttccgacatttattttggaaaaaaaatctatgttggagagaatcactaatcaattacaattcccagatgttcttttagaagcacactccaataaagacgggttgcaaaggttcgttaaagtggtagcatggtacttggcaggttggcacattgggcccagggctgtgaagaagcccttgaatcccattcttggagaacactttacagcttattgggatttgcctaacaagcaacaagccttttacattgcagaacaaacgagtcaccatcctcctgaatctgcgtatttttacatgattccagaaagtaatattagagttgatggagttgttgtgccaaaatctaaatttttaggaaacagtagtgctgcaatgatggaggggttaactgtattgcaattccttgatatcaaggatgcaaatggtaaaccagagaaatatactttatctcaaccaaatgtttacgcaaggggaattttatttggcaagatgaggattgaattgggagatcacatggtcattatgggtcctaagtatcaagtggatattgagttcaaaacaaagggctttatttctggtacctatgatgcaattgaaggtacaattaaggattacgatggtaaggaatactaccaaattagtggtaagtggaatgatattatgtatatcaaagatttgagggaaaaaagctctaaaaagactgttctcttcgatactcatcagcattttcctttggctcctaaagtccgcccattggaggaacagggagaatacgaatctagaaggctttggaagaaggttacggatgcgttagctgtacgtgaccatgaagtagctacagaagaaaagtttcagatagaaaaccgccaaagagagttggccaaaaagagggccgaagacggcgttgaatttcattctaaattatttagaagggcagagccaggtgaggatttagattattatatttacaagcacatccctgaagggaccgacaagcatgaagaacagatcaggagcattttggaaactgccccgattttaccaggacagacattcactgaaaaattttctattccggcttataaaaagcatggaatccaaaagaattga

SEQ ID NO: 4819 - DNA, 234 bp, Saccharomyces cerevisiae
atggcgtacacttctcatctgtcttcaaaaactggtctacatttcggtagactttctttaagaagtttaacagcttatgctccgaatttaatgttatggggtggtgctagcatgcttgggctatttgtattcacagaaggatggcctaagtttcaagatacgctatacaaaaagattccgttgttaggacctacattggaagatcatactccaccagaagataaacctaattga

SEQ ID NO: 4820 - DNA, 234 bp, Artificial Sequence
  Description of Artificial Sequence: Synthetic polynucleotide
atggcgtacacttctcatttatcttctaaaactggtttgcatttcggtagactttctttaagaagtttaacagcttatgctccgaatttaatgttatggggtggtgctagcatgcttgggttgtttgtattcacagaaggatggcctaagtttcaagatacgttgtacaaaaagattccgttgttaggacctacattggaagatcatactccaccagaagataaacctaattga

SEQ ID NO: 4821 - DNA, 1074 bp, Saccharomyces cerevisiae
atgacgcgagatagcccagattctaacgacagctataagcatataaacaagaatactacacaaaaaacctcgtttgatagaaattcattcgattatattgtacgatcgggattagctggaggtatatcaggttcatgtgcgaaaacactaatcgcacccttagatagaataaaaattttatttcaaacatcaaatccgcactacacaaagtacacaggctcactaataggattagtagaggcagccaagcatatatggatcaatgatggggtaagggggttttttcaaggccattcagcaacccttttaaggatttttccatatgctgctgtcaaatttgttgcttatgaacagattaggaataccttgattccctcaaaagaatttgagtcacattggagaaggttggtgagtggttcactggcaggattatgcagtgttttcataacatatccgttagatctcgtgagggttaggttagcatatgaaacagaacataagagagtaaagctaggaagaataatcaagaaaatatataaggaaccagcttcagccacgctaatcaaaaatgattatattcctaactggttttgtcattggtgtaatttttataggggttatgttccaactgtacttggcatgataccatatgcaggtgtttccttttttgctcacgatttacttcatgatgtgctgaagagtcctttctttgccccttattcagtattagaactttcagaagatgatgaattggaaagagtacagaaaaagcagagaaggcctttgcgtacgtgggctgaattgatctctggtggtctagctggtatggcctcccaaacggcagcatatccatttgaaattattaggagaaggctccaagtaagtgcactgtcaccaaaaactatgtatgatcataaatttcaatcgatatctgaaattgctcacataatatttaaagaacgtggagtacgtggattttttgttggtctaagcataggttatattaaagtaacacctatggttgcatgtagttttttcgtctatgaaagaatgaaatggaattttggcatttaa

SEQ ID NO: 4822 - DNA, 1074 bp, Artificial Sequence
  Description of Artificial Sequence: Synthetic polynucleotide
atgacgagggatagcccagattctaacgacagctataagcatataaacaagaatactacacaaaaaacctcttttgatagaaattctttcgattatattgtaagatctggattagctggaggtatatctggttcttgtgcgaaaacattgatcgcacccttagatagaataaaaattttatttcaaacaagtaatccgcactacacaaagtacacaggctccttgataggattagtagaggcagccaagcatatatggatcaatgatggggtaagggggttttttcaaggccattctgcaacccttttaaggatttttccatatgctgctgtcaaatttgttgcttatgaacagattaggaataccttgattccctctaaagaatttgagtctcattggagaaggttggtgagtggttctttggcaggattatgcagtgttttcataacatatccgttagatctcgtgagggttaggttagcatatgaaacagaacataagagagtaaagttgggaagaataatcaagaaaatatataaggaaccagcttctgccacgttgatcaaaaatgattatattcctaactggttttgtcattggtgtaatttttataggggttatgttccaactgtacttggcatgataccatatgcaggtgtttccttttttgctcacgatttacttcatgatgtgttgaagagtcctttctttgccccttattctgtattagaactttctgaagatgatgaattggaaagagtacagaaaaagcagagaaggcctttgcgtacgtgggctgaattgatctctggtggtttagctggtatggcctcccaaacggcagcatatccatttgaaattattaggagaaggctccaagtaagtgcattatctccaaaaactatgtatgatcataaatttcaaagtatatctgaaattgctcacataatatttaaagaacgtggagtacgtggattttttgttggtttaagcataggttatattaaagtaacacctatggttgcatgtagttttttcgtctatgaaagaatgaaatggaattttggcatttga

SEQ ID NO: 4823 - DNA, 1290 bp, Saccharomyces cerevisiae
atggcaaataatacgtggaagttaattgctactacagctcttatatcggtgttttcaacccaacttgccaaaagtgtatggaaagaatacaaactttcatgtgcggctaataagaataaaaccgtatcgcgacctcgtcaatatgatgaccacttatttagggaacaattggctcgtaactatgcatttcttggcgaagaaggtatgaggaagatcaaagaacagtatatagttatagtcggagctggagaagtgggatcgtgggtatgcacaatgttaattcgttcaggctgtcagaaaattatgattatagatccagaaaacatatctatcgactctttgaatacccactgttgcgcagttttatcagatattggaaagcccaaagttcaatgcttgaaagaacacttgtctaaaattgctccttggtctgaaataaaagcaagggccaaggcctggactaaagaaaactcacacgatttaatttttgcagacggtgagtccccaacttttatcgtggattgtctagataatctagaatctaaggtagacctattagagtacgcccatcacaataaaatagatgttatttcttccatgggtgttgccacgaaatcagatcctacccgtgtgagtataaatgacatatccatgacagaatttgaccctatatctcgttgtgtaagaagaaaattgaggaagaggggtatcgccacggggatttccgttgtttttagtaatgaaatgctcgatccacgccgagacgacatactctctcctatagattgcgaacatcgtgcaatcaatgctgtcagagatgaggctctcagacatttaccggaattagggaccatgcctggtatttttggtttgagtattgcgacatggattttaaccaaagtgtcaggctatccaatgaaagaaaatgaggtcaaaaataggttaaagttttatgacagcatcctagagactttccaaaagcagatggcgcggttgaatgaaaataaggagcgatcgtcattgcttggattagaagaggtcggttatatagttgaagaaatgtttagaggcaagtctcctattagcggatactctacgaaactagctctaacaaaatgggaagctaacaaagaaatctccttaaccaatgttgttctgatgacgaaagaagagcaagaaattcacgaaaaaaggattttgctggatggtgagaaactgacagctgtatactctgaagaagttctcgattttattgagaggctttttaaagaggaggagtactattcttag

SEQ ID NO: 4824 - DNA, 1290 bp, Artificial Sequence
  Description of Artificial Sequence: Synthetic polynucleotide
atggcaaataatacgtggaagttaattgctactacagctcttatatctgtgttttccacccaacttgccaaaagtgtatggaaagaatacaaactttcctgtgcggctaataagaataaaaccgtatctagacctcgtcaatatgatgaccacttatttagggaacaattggctcgtaactatgcatttcttggcgaagaaggtatgaggaagatcaaagaacagtatatagttatagtcggagctggagaagtgggatcttgggtatgcacaatgttaattcgtagcggctgtcagaaaattatgattatagatccagaaaacatatctatcgactctttgaatacccactgttgcgcagttttaagtgatattggaaagcccaaagttcaatgcttgaaagaacacttgtctaaaattgctccttggtctgaaataaaagcaagggccaaggcctggactaaagaaaactctcacgatttaatttttgcagacggtgagtccccaacttttatcgtggattgtttggataatttggaatctaaggtagacttattagagtacgcccatcacaataaaatagatgttatttcttccatgggtgttgccacgaaatctgatcctacccgtgtgagtataaatgacatatccatgacagaatttgaccctatatctcgttgtgtaagaagaaaattgaggaagaggggtatcgccacggggatttccgttgtttttagtaatgaaatgctcgatccacgcagagacgacatactctctcctatagattgcgaacatcgtgcaatcaatgctgtcagagatgaggctctcagacatttaccggaattagggaccatgcctggtatttttggtttgagtattgcgacatggattttaaccaaagtgtctggctatccaatgaaagaaaatgaggtcaaaaataggttaaagttttatgacagcatcttggagactttccaaaagcagatggcgcgtttgaatgaaaataaggagaggagttctttgcttggattagaagaggtcggttatatagttgaagaaatgtttagaggcaagtctcctattagcggatactctacgaaattggctttaacaaaatgggaagctaacaaagaaatctccttaaccaatgttgttttgatgacgaaagaagagcaagaaattcacgaaaaaaggattttgttggatggtgagaaattaacagctgtatactctgaagaagttctcgattttattgagaggctttttaaagaggaggagtactattcttga

SEQ ID NO: 4825 - DNA, 1341 bp, Saccharomyces cerevisiae
atgaatgccctaaaatatttctcaaatcatttaataactacaaagaaacaaaaaaaaatcaatgttgaggtgacaaagaatcaagatctactaggcccttcaaaggaagtttcgaacaaatatactagccacagcgaaaatgattgcgttagtgaggtggaccaacagtacgaccactcctcaagccacttaaaagaatctgatcaaaatcaagagcgcaaaaattctgttcctaaaaaaccaaaagctttacgttccatcctaatagagaaaatagcgtcaattttgtgggcactactactttttcttccgtattatctgataatcaagcccttgatgtctttatggtttgtttttaccttcccactaagtgtcatcgagcgtcgtgtaaaacacaccgataagagaaacaggggttcaaatgctagtgagaatgagctgcctgtcagttcaagcaatattaacgattctagcgagaaaacaaatcctaaaaattgcaatctaaatacgattcccgaggcagttgaggatgacttaaatgccagtgatgagataattctacaaagggataatgttaaaggctcattacttagagctcaatctgtcaaatcaaggccaagaagttattccaaatcagaactatcactttctaatcattcaagttctaataccgtatttggtacaaaacgaatgggaaggttcttatttccaaagaagctgatacctaaatccgtgcttaacacacaaaagaaaaagaaactggttatagatctcgatgagaccttaattcactcggcttctcgaagtacaacgcatagtaattcttctcagggtcacttggtggaagtgaagtttggattgagcggaattcgtacactatactttattcacaagaggccttactgtgatttatttttgacaaaagttagcaaatggtacgaccttatcatttttacagcatccatgaaagaatacgctgatcctgtgatagattggttagaaagctccttcccatccagtttttcaaaaagatattaccgttctgattgcgttctaagggatggtgttggatacattaaagatttgagcattgtcaaggactccgaagaaaacgggaaaggcagctcctcttctttggatgatgtcattattatagataacagcccggtaagttacgcaatgaatgtagataacgctattcaagtagaaggatggataagtgatccaactgatacggacttactgaacctgttacctttcttggaggctatgaggtattcaacagatgtcaggaatatactggcattgaaacatggagagaaggcattcaacataaactga

SEQ ID NO: 4826 - DNA, 1341 bp, Artificial Sequence
  Description of Artificial Sequence: Synthetic polynucleotide
atgaatgccttgaaatatttcagtaatcatttaataactacaaagaaacaaaaaaaaatcaatgttgaggtgacaaagaatcaagatttattaggcccttctaaggaagtttctaacaaatatactagccacagcgaaaatgattgcgttagtgaggtggaccaacagtacgaccactcctctagccacttaaaagaatctgatcaaaatcaagagcgcaaaaattctgttcctaaaaaaccaaaagctttacgttccatcttaatagagaaaatagcgtccattttgtgggcattattactttttcttccgtattatttgataatcaagcccttgatgtctttatggtttgtttttaccttcccattaagtgtcatcgagcgtcgtgtaaaacacaccgataagagaaacaggggtagtaatgctagtgagaatgagcttcctgtcagtagtagcaatattaacgattctagcgagaaaacaaatcctaaaaattgcaatttgaatacgattcccgaggcagttgaggatgacttaaatgccagtgatgagataattttacaaagggataatgttaaaggctctttacttagagctcaatctgtcaaatctaggccaagaagttattccaaaagtgaattatctctttctaatcattctagttctaataccgtatttggtacaaaaagaatgggaaggttcttatttccaaagaagttaatacctaaatccgtgcttaacacacaaaagaaaaagaaattggttatagatctcgatgagaccttaattcactctgcttctagaagtacaacgcatagtaattcttctcagggtcacttggtggaagtgaagtttggattgagcggaattcgtacattgtactttattcacaagaggccttactgtgatttatttttgacaaaagttagcaaatggtacgaccttatcatttttacagcatccatgaaagaatacgctgatcctgtgatagattggttagaaagctccttcccatccagtttttccaaaagatattaccgttctgattgcgttttgagggatggtgttggatacattaaagatttgagcattgtcaaggactccgaagaaaacgggaaaggcagctcctcttctttggatgatgtcattattatagataacagcccggtaagttacgcaatgaatgtagataacgctattcaagtagaaggatggataagtgatccaactgatacggacttattaaacttattacctttcttggaggctatgaggtattctacagatgtcaggaatatattggcattgaaacatggagagaaggcattcaacataaactga

SEQ ID NO: 4827 - DNA, 1419 bp, Saccharomyces cerevisiae
atggggtgtacagtgagtacgcaaacaataggagacgaaagtgatccttttctacagaacaaaagagccaatgatgtcatcgagcaatcgttgcagctggagaaacaacgtgacaagaatgaaataaaactgttactattaggtgccggtgagtcaggtaaatcaacggttttaaaacaattaaaattattacatcaaggcggtttctcccatcaagaaaggttacagtatgctcaagtgatatgggcagatgccatacaatcaatgaaaattttgattattcaggccagaaaactaggtattcaacttgactgtgatgatccgatcaacaataaagatttgtttgcatgcaagagaatactgctaaaggctaaagctttagattatatcaacgccagtgttgccggtggttctgattttctaaatgattatgtactgaagtactcagaaaggtatgaaactaggaggcgtgttcagagtaccggacgagcaaaagctgctttcgatgaagacggaaatatttctaatgtcaaaagtgacactgacagagatgctgaaacggtgacgcaaaatgaggatgctgatagaaacaacagtagtagaattaacctacaggatatttgcaaggacttgaaccaagaaggcgatgaccagatgtttgttagaaaaacatcaagggaaattcaaggacaaaatagacgaaatcttattcacgaagacattgctaaggcaataaagcaactttggaataacgacaaaggtataaagcagtgttttgcacgttctaatgagtttcaattggagggctcagctgcatactactttgataacattgagaaatttgctagtccgaattatgtctgtacggatgaagacattttgaagggccgtataaagactacaggcattacagaaaccgaatttaacatcggctcgtccaaattcaaggttctcgacgctggtgggcagcgttctgaacgtaagaagtggattcattgtttcgaaggaattacagcagttttatttgttttagcaatgagtgaatacgaccagatgttgtttgaggatgaaagagtgaacagaatgcatgaatcaataatgctatttgacacgttattgaactctaagtggttcaaagatacaccgtttattttgtttttaaataaaattgatttgttcgaggaaaaggtaaaaagcatgcccataagaaagtactttcctgattaccagggacgtgtcggcgatgcagaagcgggtctaaaatattttgagaagatatttttgagcttgaataagacaaacaaaccaatctacgtgaaacgaacctgcgctaccgatacccaaactatgaagttcgtattgagtgcagtcaccgatctaatcatccagcaaaaccttaaaaaaattggtattatatga

SEQ ID NO: 4828 - DNA, 1419 bp, Artificial Sequence
  Description of Artificial Sequence: Synthetic polynucleotide
atggggtgtacagtgagtacgcaaacaataggagacgaaagtgatccttttttgcagaacaaaagagccaatgatgtcatcgagcaatctttgcagttggagaaacaacgtgacaagaatgaaataaaattattattattaggtgccggtgagtctggtaaatctacggttttaaaacaattaaaattattacatcaaggcggtttctcccatcaagaaaggttacagtatgctcaagtgatatgggcagatgccatacaatctatgaaaattttgattattcaggccagaaaattgggtattcaacttgactgtgatgatccgatcaacaataaagatttgtttgcatgcaagagaatattattgaaggctaaagctttagattatatcaacgccagtgttgccggtggttctgattttttgaatgattatgtattgaagtactctgaaaggtatgaaactaggaggcgtgttcagagtaccggaagggcaaaagctgctttcgatgaagacggaaatatttctaatgtcaaaagtgacactgacagagatgctgaaacggtgacgcaaaatgaggatgctgatagaaacaacagtagtagaattaacttacaggatatttgcaaggacttgaaccaagaaggcgatgaccagatgtttgttagaaaaacatccagggaaattcaaggacaaaatagaagaaatcttattcacgaagacattgctaaggcaataaagcaactttggaataacgacaaaggtataaagcagtgttttgcacgttctaatgagtttcaattggagggctctgctgcatactactttgataacattgagaaatttgctagtccgaattatgtctgtacggatgaagacattttgaagggccgtataaagactacaggcattacagaaaccgaatttaacatcggcagctccaaattcaaggttctcgacgctggtgggcagcgttctgaacgtaagaagtggattcattgtttcgaaggaattacagcagttttatttgttttagcaatgagtgaatacgaccagatgttgtttgaggatgaaagagtgaacagaatgcatgaaagtataatgttatttgacacgttattgaactctaagtggttcaaagatacaccgtttattttgtttttaaataaaattgatttgttcgaggaaaaggtaaaaagcatgcccataagaaagtactttcctgattaccagggacgtgtcggcgatgcagaagcgggtttgaaatattttgagaagatatttttgagcttgaataagacaaacaaaccaatctacgtgaaaagaacctgcgctaccgatacccaaactatgaagttcgtattgagtgcagtcaccgatttgatcatccagcaaaaccttaaaaaaattggtattatatga

SEQ ID NO: 4829 - DNA, 282 bp, Saccharomyces cerevisiae
atgtctttcttaggtttcggtggtggtcagcctcaattatcatctcaacaaaagattcaagctgcggaagctgaactagatttggtcacagacatgttcaataaattggttaataactgttataaaaaatgtatcaatacttcttattccgagggtgagctgaataagaatgaatcttcgtgcctagacagatgtgtggccaaatattttgagaccaatgttcaagtcggtgaaaacatgcagaaaatgggccaatcatttaacgcagccggtaagttttag

SEQ ID NO: 4830 - DNA, 282 bp, Artificial Sequence
  Description of Artificial Sequence: Synthetic polynucleotide
atgtctttcttaggtttcggtggtggtcagcctcaattatcttctcaacaaaagattcaagctgcggaagctgaattagatttggtcacagacatgttcaataaattggttaataactgttataaaaaatgtatcaatacttcttattccgagggtgagttgaataagaatgaatctagttgcttggacagatgtgtggccaaatattttgagaccaatgttcaagtcggtgaaaacatgcagaaaatgggccaaagttttaacgcagccggtaagttttga

SEQ ID NO: 4831 - DNA, 1626 bp, Saccharomyces cerevisiae
atgcctatcttatcactatcttcaacacggaacagcgtgttaacaaggatatatgactaccttaaagcattagtgcagcaagtgattgtgcccaatgtggaagacgacaaatcttcgaaaagtactcctttcgaaaagttagaacctgcgaaacagaaccatccacagaaagactgctgtgctaccgaaaaggacgatctggttgacgtgagcgaattatttcccaaacagaacaacaaacaattgagtctaacatcaaaatcttcagttgtaccctgtgctttaaatttggataacctagaaacacctttctcaattaaaattgataataatggtgcagtcactacacagttgaacttggacgaaccgattttacggggccctagccgcggcgagccagcaaagttacagaatgacttgataagttctcccccgctagaggaatcctatatcaataatgaccagtacaaagctcttttcccctctaatttccttccaatcacgcccgtaagtagcgtaatcactcctgcatcgaagaaaagtattgatgaatctcccctatccgatgaggttcaaggaattgctgatgagtcatccgaaactttaccatatatatgtcactattgcgatgctaggttccgaatcagaggttacttaacacgacacataaaaaagcatgcgaaaaggaaggcctatcactgtccattttttgataatagcatttcgcaagaattgcgatgccatacttctggggggtttagcagaagagatacctacaaaacacatttgaaatctagacatttcacttacccagaaggtgttaagcctcaggaccgtaataaatcacctggagtgtgcactcaatgtggggaacactttagcactagtgagagctgggtggaaaaccacattgaggctgggagttgcaaaggtttaccagaaggctattcagagggaatacgagagaagaaaaagacgtctaaaatgaaaatgataaagacttcggatggccaaacaaggttcatctcatccgacgaaagtgtttccgaaccagctttacaaaataagaattgtatagaagcgacagtaatgcagtccaaggaacgccctaatgacaagatcataccaaccaaaaccgaaaaaaacgattttggaataggcactcaatggtttgaacgcaaacaaatatcaagacctacacaaactacacaatcaagaggacctacagaagtccaaaatctcaaagagtggtcaataatatctcccccaattttgtcaccccaaaatgcatcttctgtaccacaagagtatcaatcatcaagatacacattgcatatggattctccagcattatcctctgcctcctcagcgctatctccactttcaggcgatccaataacaactacagaaacaaataagtcatacccattggattcagagcaatcgttgttggagccagacaaaaccgaggaggacgcaatcaatcagtcaaaggaaagcaatatgatttccattaatgagatgttacagaagcaaatggactttgaacttctgggtgagaatcatttgaaggagactcaagattatctggccctttacaaaaaagcttatgggatagaattttaa

SEQ ID NO: 4832 - DNA, 1626 bp, Artificial Sequence
  Description of Artificial Sequence: Synthetic polynucleotide
atgcctatcttaagtttatcttctacaagaaacagcgtgttaacaaggatatatgactaccttaaagcattagtgcagcaagtgattgtgcccaatgtggaagacgacaaatcttctaaaagtactcctttcgaaaagttagaacctgcgaaacagaaccatccacagaaagactgctgtgctaccgaaaaggacgatttggttgacgtgagcgaattatttcccaaacagaacaacaaacaattgagtttgacaagtaaatcttctgttgtaccctgtgctttaaatttggataacttggaaacacctttctccattaaaattgataataatggtgcagtcactacacagttgaacttggacgaaccgattttaagaggccctagccgcggcgagccagcaaagttacagaatgacttgataagttctcccccgttagaggaatcctatatcaataatgaccagtacaaagctcttttcccctctaatttccttccaatcacgcccgtaagtagcgtaatcactcctgcatccaagaaaagtattgatgaatctcccttgtccgatgaggttcaaggaattgctgatgagtcttccgaaactttaccatatatatgtcactattgcgatgctaggttcagaatcagaggttacttaacaagacacataaaaaagcatgcgaaaaggaaggcctatcactgtccattttttgataatagcatttctcaagaattgagatgccatacttctggggggtttagcagaagagatacctacaaaacacatttgaaatctagacatttcacttacccagaaggtgttaagcctcaggaccgtaataaatctcctggagtgtgcactcaatgtggggaacactttagcactagtgagagctgggtggaaaaccacattgaggctgggagttgcaaaggtttaccagaaggctattctgagggaataagagagaagaaaaagacgtctaaaatgaaaatgataaagacttctgatggccaaacaaggttcatctcttccgacgaaagtgtttccgaaccagctttacaaaataagaattgtatagaagcgacagtaatgcagtccaaggaacgccctaatgacaagatcataccaaccaaaaccgaaaaaaacgattttggaataggcactcaatggtttgaacgcaaacaaatatctagacctacacaaactacacaatctagaggacctacagaagtccaaaatctcaaagagtggtccataatatctcccccaattttgagcccccaaaatgcatcttctgtaccacaagagtatcaatcttctagatacacattgcatatggattctccagcattatcctctgcctcctctgcgctttctccactttctggcgatccaataacaactacagaaacaaataagtcctacccattggattctgagcaatctttgttggagccagacaaaaccgaggaggacgcaatcaatcagtccaaggaaagcaatatgatttccattaatgagatgttacagaagcaaatggactttgaacttttgggtgagaatcatttgaaggagactcaagattatttggccctttacaaaaaagcttatgggatagaattttga

SEQ ID NO: 4833 - DNA, 1593 bp, Saccharomyces cerevisiae
atgtctgctaccaagtcaatcgttggagaggcattggaatacgtaaacattggtttaagtcatttcttggctttaccattggcccaaagaatctctttgatcataataattcctttcatttacaatattgtatggcaattactatattctttgagaaaggaccgtccacctctagtgttttactggattccatgggtcggtagtgctgttgtgtacggtatgaagccatacgagtttttcgaagaatgtcaaaagaaatacggtgatattttttcattcgttttgttaggaagagtcatgactgtgtatttaggaccaaagggtcacgaatttgtcttcaacgctaagttggcagatgtttcagcagaagctgcttacgctcatttgactactccagttttcggtaaaggtgttatttacgattgtccaaattctagattgatggagcaaaagaagtttgttaagggtgctctaaccaaagaagccttcaagagctacgttccattgattgctgaagaagtgtacaagtacttcagagactccaaaaacttccgtttgaatgaaagaactactggtactattgacgtgatggttactcaacctgaaatgactattttcaccgcttcaagatcattattgggtaaggaaatgagagcaaaattggataccgattttgcttacttgtacagtgatttggataagggtttcactccaatcaacttcgtcttccctaacttaccattggaacactatagaaagagagatcacgctcaaaaggctatctccggtacttacatgtctttgattaaggaaagaagaaagaacaacgacattcaagacagagatttgatcgattccttgatgaagaactctacctacaaggatggtgtgaagatgactgatcaagaaatcgctaacttgttaattggtgtcttaatgggtggtcaacatacttctgctgccacttctgcttggattttgttgcacttggctgaaagaccagatgtccaacaagaattgtacgaagaacaaatgcgtgttttggatggtggtaagaaggaattgacctacgatttattacaagaaatgccattgttgaaccaaactattaaggaaactctaagaatgcaccatccattgcactctttgttccgtaaggttatgaaagatatgcacgttccaaacacttcttatgtcatcccagcaggttatcacgttttggtttctccaggttacactcatttaagagacgaatacttccctaatgctcaccaattcaacattcaccgttggaacaaagattctgcctcctcttattccgtcggtgaagaagtcgattacggtttcggtgccatttctaagggtgtcagctctccatacttacctttcggtggtggtagacacagatgtatcggtgaacactttgcttactgtcagctaggtgttctaatgtccatttttatcagaacattaaaatggcattacccagagggtaagaccgttccacctcctgactttacatctatggttactcttccaaccggtccagccaagatcatctgggaaaagagaaatccagaacaaaagatctaa

SEQ ID NO: 4834 - DNA, 1593 bp, Artificial Sequence
  Description of Artificial Sequence: Synthetic polynucleotide
atgtctgctaccaagtctatcgttggagaggcattggaatacgtaaacattggtttaagtcatttcttggctttaccattggcccaaagaatctctttgatcataataattcctttcatttacaatattgtatggcaattattatattctttgagaaaggaccgtccacctttagtgttttactggattccatgggtcggtagtgctgttgtgtacggtatgaagccatacgagtttttcgaagaatgtcaaaagaaatacggtgatattttttctttcgttttgttaggaagagtcatgactgtgtatttaggaccaaagggtcacgaatttgtcttcaacgctaagttggcagatgtttctgcagaagctgcttacgctcatttgactactccagttttcggtaaaggtgttatttacgattgtccaaattctagattgatggagcaaaagaagtttgttaagggtgctttgaccaaagaagccttcaagagctacgttccattgattgctgaagaagtgtacaagtacttcagagactccaaaaacttccgtttgaatgaaagaactactggtactattgacgtgatggttactcaacctgaaatgactattttcaccgcttccagatctttattgggtaaggaaatgagagcaaaattggataccgattttgcttacttgtacagtgatttggataagggtttcactccaatcaacttcgtcttccctaacttaccattggaacactatagaaagagagatcacgctcaaaaggctatctccggtacttacatgtctttgattaaggaaagaagaaagaacaacgacattcaagacagagatttgatcgattccttgatgaagaactctacctacaaggatggtgtgaagatgactgatcaagaaatcgctaacttgttaattggtgtcttaatgggtggtcaacatacttctgctgccacttctgcttggattttgttgcacttggctgaaagaccagatgtccaacaagaattgtacgaagaacaaatgcgtgttttggatggtggtaagaaggaattgacctacgatttattacaagaaatgccattgttgaaccaaactattaaggaaactttgagaatgcaccatccattgcactctttgttccgtaaggttatgaaagatatgcacgttccaaacacttcttatgtcatcccagcaggttatcacgttttggtttctccaggttacactcatttaagagacgaatacttccctaatgctcaccaattcaacattcaccgttggaacaaagattctgcctcctcttattccgtcggtgaagaagtcgattacggtttcggtgccatttctaagggtgtcagctctccatacttacctttcggtggtggtagacacagatgtatcggtgaacactttgcttactgtcagttgggtgttttgatgtccatttttatcagaacattaaaatggcattacccagagggtaagaccgttccacctcctgactttacatctatggttactcttccaaccggtccagccaagatcatctgggaaaagagaaatccagaacaaaagatctga

SEQ ID NO: 4835 - DNA, 216 bp, Saccharomyces cerevisiae
atgcatcgtaaaaaaagaaaaaaagaaaagaaaagaaccgaaaaagacaatacaaccaaccttcctccactttttctttttccttgttctctctcgcttcctacgttactcgcgcctgtgcactacattcccaccagattaactcaccaccaggcagagaaccaattgttcttgttattgttccaaccgataattgtaaagccattaaggtcgtaa

SEQ ID NO: 4836 - DNA, 216 bp, Artificial Sequence
  Description of Artificial Sequence: Synthetic polynucleotide
atgcatcgtaaaaaaagaaaaaaagaaaagaaaagaaccgaaaaagacaatacaaccaaccttcctccactttttctttttccttgttctctctcccttcctacgttactcgcgcctgtgcactacattcccaccagattaactcaccaccaggcagagaaccaattgttcttgttattgttccaaccgataattgtaaagccattaaggtcttga

SEQ ID NO: 4837 - DNA, 702 bp, Saccharomyces cerevisiae
atgttcgcgaaaacagcagctgctaatttaaccaagaagggtggtttgtcattgctctccaccacagcaaggagaaccaaagtcaccttgccagacttgaagtgggacttcggtgcattggaaccttatatctccggtcaaatcaacgaattgcattacaccaagcaccatcaaacttatgtgaacggattcaacactgctgttgaccaattccaagaactctcagatcttctggccaaggagccctctcccgcaaacgcaagaaaaatgattgctatccaacaaaacatcaagttccatggcggtggtttcacaaaccactgtctattctgggaaaacctggctccagagtcgcagggcggtggtgaaccacccaccggcgctttggcaaaggcaatcgacgagcagtttggcagtctggacgagctgattaagttgaccaacacaaagctagcaggcgtgcagggctccggatgggccttcattgtgaaaaacctctctaatggaggcaagctggacgttgttcaaacctacaaccaggataccgtcacaggcccactagttcctctagttgccattgacgcctgggaacacgcctactacttgcagtaccaaaacaagaaagccgactacttcaaagccatttggaatgtggtcaactggaaagaagcatccagaagattcgatgctggcaagatctga

SEQ ID NO: 4838 - DNA, 702 bp, Artificial Sequence
  Description of Artificial Sequence: Synthetic polynucleotide
atgttcgcgaaaacagcagctgctaatttaaccaagaagggtggtttgtctttgctctccaccacagcaaggagaaccaaagtcaccttgccagacttgaagtgggacttcggtgcattggaaccttatatctccggtcaaatcaacgaattgcattacaccaagcaccatcaaacttatgtgaacggattcaacactgctgttgaccaattccaagaactctctgatcttttagccaaggagccctctcccgcaaacgcaagaaaaatgattgctatccaacaaaacatcaagttccatggcggtggtttcacaaaccactgtttgttctgggaaaacttggctccagagagccagggcggtggtgaaccacccaccggcgctttggcaaaggcaatcgacgagcagtttggcagtttggacgagttgattaagttgaccaacacaaagttagcaggcgtgcagggctccggatgggccttcattgtgaaaaacctctctaatggaggcaagttggacgttgttcaaacctacaaccaggataccgtcacaggcccattagttcctttggttgccattgacgcctgggaacacgcctactacttgcagtaccaaaacaagaaagccgactacttcaaagccatttggaatgtggtcaactggaaagaagcatccagaagattcgatgctggcaagatctga

SEQ ID NO: 4839 - DNA, 1572 bp, Saccharomyces cerevisiae
atgggtgaagattttatgcacccaccgtttcaaacgtacccttcaaagaacagcgaagggaaaaaacatattgtcattgtaggtggcggtatcatcggttgctgtactgcttactacttgacccagcatccaagtttcagcccttcgacgcatcatattaccatcattgaatcgaggcgcattgctggaggggcttctggtaaagcaggtggcttgcttgcatcttgggctttccctcaccaaatcgtacctttaagtttccagctacatcaggagttgagtgatgaatatgatggagaaaacaactgggactacagaagattgacgactgtgtccttagaagcagatgttcgcgaagaagtcattgaaaactacgaaagactgagcaagaaggcatataatctgaatgtccctcctccaaagaagagaccgggctacatatccaacaagtttaacatcggggactctaattcatctttgagttcttcgggctcttctttgaaaaacgactccgctagtaacgaggaagaaggatcagacattcatgtttctagctcagtacccagtttacactctctaacaaatgagcgcatgagaagccacacaaatagcgcatctgatcttgactctgtaagtcccgtggagcaactgagagagactaatatccataatcctttgcctgctgatttagattggataagaagagaattggttaatgattggtcatcactaggtggtactgataccacagcgcagcttcatccctataaattcacccatttcatcttatcgaaggcaatggaaacaggtgctgtcgatcttctcctaggtaaggtagttgggctaaagtgtgacgagatggattgtgttcattctcttaagtaccttccatctgtcgtcaagaatcgcagaaatagcagagggcatgcagaaaatccagacattaagctgggtacaatcttcaacgatgagaacgcgaagcccattgaaatcaatgacatccagcagattgttttgagtatgggaccctggacttccaagattctaaaagattgtccaatttctggattgagagcccactctgtcaccattaagcctagtgaaaagacagtttcaccttacgctattcttgctgaactaaaagttaacgaccgtgaatttttctcccctgaaatgtatgctagaaaagatgaagtttatgtgtgcggcgaaggcgacactttagtcaatatacctgaaagttcggacgatgtggaggtagtttcggagaagtgtgatgaattgtaccattacgtatccaaattatcgccaactctatcaaagggccatctcttgcggaaacaagcctgttttttgccagttttaaacgttcctacaagttctggtcccttaattggtgagacaaatgtcaaggatctttatattgcaagtggacattcttgttggggtattaacaatgcgccagcaacaggtaaattaatggctgagattctccttgatggcgaagcaacctctgcggaaatctcaagtttggatccaaagttatatttcgacgccaccatcctttcttaa

SEQ ID NO: 4840 - DNA, 1572 bp, Artificial Sequence
  Description of Artificial Sequence: Synthetic polynucleotide
atgggtgaagattttatgcacccaccgtttcaaacgtacccttctaagaacagcgaagggaaaaaacatattgtcattgtaggtggcggtatcatcggttgctgtactgcttactacttgacccagcatccaagtttcagcccttctacgcatcatattaccatcattgaaagtaggcgcattgctggaggggcttctggtaaagcaggtggcttgcttgcatcttgggctttccctcaccaaatcgtacctttaagtttccagttacatcaggagttgagtgatgaatatgatggagaaaacaactgggactacagaagattgacgactgtgtccttagaagcagatgttcgcgaagaagtcattgaaaactacgaaagattgagcaagaaggcatataatttgaatgtccctcctccaaagaagagaccgggctacatatccaacaagtttaacatcggggactctaattcttctttgagttcttctggctcttctttgaaaaacgactccgctagtaacgaggaagaaggatctgacattcatgtttctagctctgtacccagtttacactctttaacaaatgagcgcatgagaagccacacaaatagcgcatctgatcttgactctgtaagtcccgtggagcaattgagagagactaatatccataatcctttgcctgctgatttagattggataagaagagaattggttaatgattggtcttctttgggtggtactgataccacagcgcagcttcatccctataaattcacccatttcatcttatccaaggcaatggaaacaggtgctgtcgatcttctcttaggtaaggtagttgggttgaagtgtgacgagatggattgtgttcattctcttaagtaccttccatctgtcgtcaagaatcgcagaaatagcagagggcatgcagaaaatccagacattaagttgggtacaatcttcaacgatgagaacgcgaagcccattgaaatcaatgacatccagcagattgttttgagtatgggaccctggacttccaagattttgaaagattgtccaatttctggattgagagcccactctgtcaccattaagcctagtgaaaagacagtttctccttacgctattcttgctgaattgaaagttaacgaccgtgaatttttctcccctgaaatgtatgctagaaaagatgaagtttatgtgtgcggcgaaggcgacactttagtcaatatacctgaaagtagtgacgatgtggaggtagtttctgagaagtgtgatgaattgtaccattacgtatccaaattatctccaactttatccaagggccatctcttgagaaaacaagcctgttttttgccagttttaaacgttcctacaagttctggtcccttaattggtgagacaaatgtcaaggatctttatattgcaagtggacattcttgttggggtattaacaatgcgccagcaacaggtaaattaatggctgagattctccttgatggcgaagcaacctctgcggaaatctccagtttggatccaaagttatatttcgacgccaccatcctttcttga

SEQ ID NO: 4841 - DNA, 411 bp, Saccharomyces cerevisiae
atggctaagttcttgaaagctggtaaagttgctgtcgttgtccgtggtcgttacgccggtaagaaggttgttatcgttaaaccacatgatgaaggttccaagtctcacccatttggtcacgctttggttgccggtattgaaagatacccattgaaggtcaccaagaagcacggtgccaagaaggttgctaagagaaccaagatcaagcctttcatcaaggtcgtcaactacaaccatttattgccaaccagatacactttagatgttgaagctttcaaatccgttgtttctactgaaactttcgaacaaccttcccaacgtgaagaagctaagaaagtcgtcaagaaggctttcgaagaaagacaccaagctggtaagaaccaatggttcttctctaagttgagattttaa

SEQ ID NO: 4842 - DNA, 411 bp, Artificial Sequence
  Description of Artificial Sequence: Synthetic polynucleotide
atggctaagttcttgaaagctggtaaagttgctgtcgttgtccgtggtcgttacgccggtaagaaggttgttatcgttaaaccacatgatgaaggttccaagtctcacccatttggtcacgctttggttgccggtattgaaagatacccattgaaggtcaccaagaagcacggtgccaagaaggttgctaagagaaccaagatcaagcctttcatcaaggtcgtcaactacaaccatttattgccaaccagatacactttagatgttgaagctttcaaatccgttgtttctactgaaactttcgaacaaccttcccaacgtgaagaagctaagaaagtcgtcaagaaggctttcgaagaaagacaccaagctggtaagaaccaatggttcttctctaagttgagattttga

SEQ ID NO: 4843 - DNA, 1341 bp, Saccharomyces cerevisiae
atgattataaggcgcttattttcaatttcaaatcgctcattcttcttgaagaaacctcaatttgatgtaaaaaaaataatagagatgattcctcagtaccaaacttctatccagaatagagagctgatagaggcggatagtattatacgaagcttacaactgttgggtgaacggtatcaaaatataaaagagattgataaagttattgcggatattcaaatacagaggaaatcaattgaggctcaaatcaaaaaggataaaacaaaaattacggaatactcagctgcgctgaaggccctgaaagaacagtacaacgatcaaaatagcaaatcgtcggagctgaaaaagaaaatcttggagacctgcaaatcacttccaaataccttggatcctacggtcccattagatgccccacagattgaacaatggataaaccctttaaaaacacataaaacttcagaagctcaggcgcatgttgatatcatgcttaaaaagaatatgttagacctacagactgcctcgaacgttacaggaatgtcatggtactatctattgaatgacggagcacgtctcgaacaagcattggtagcatatgcattgaaaaaggcaaacgaaaatgggttttcaagctgcgtaccgccaagcatcacgaagaaggagttaatagatgcatgtggatttaatccaagagatatgaataatgaaaggcaaatttacgctcttcaagacaccaatttaggattggtggctaccgcggagatacctttggcaggtctaggggcaaacaaagttctagagttaaactcgggagaatgttctaagaaactagttggagtaagtagatgttacagagctgaggcaggtgccaggggaaaagatacgaaaggtctctatcgcgttcatgagtttactaaagtagaattattttgctggagcaagccagaaaccagtgcaaaggtccttgaggaaataaagcaatttcagatttctgtagttgaggaattaggaataccggccaaagtactaaatatgccatcaaacgatcttggtaatcccgctttcaagaaatacgacatcgaagcttggatgccaggaagggggaaatttggcgagataagtagtgcctccaattgtaccgatttccaaagtagaagattaaatacaaagtacagggacgataacacaggaaagctagaatatgtgcacacgctgaatggcacagcaatggctatcccaagagtgatagtagcactagtagaaaatttctatgacccaagcaccggtaagatatctgttcctgaatgtttgagggagtttatgaatggccaacgatacatttaa

SEQ ID NO: 4844 - DNA, 1341 bp, Artificial Sequence
  Description of Artificial Sequence: Synthetic polynucleotide
atgattataaggcgcttattttctatttctaatcgctctttcttcttgaagaaacctcaatttgatgtaaaaaaaataatagagatgattcctcagtaccaaacttctatccagaatagagagttgatagaggcggatagtattataagaagcttacaattattgggtgaaagatatcaaaatataaaagagattgataaagttattgcggatattcaaatacagaggaaatccattgaggctcaaatcaaaaaggataaaacaaaaattacggaatactctgctgcgttaaaggccttgaaagaacagtacaacgatcaaaatagcaaaagctctgagttgaaaaagaaaatcttggagacctgcaaatctcttccaaataccttggatcctacggtcccattagatgccccacagattgaacaatggataaaccctttaaaaacacataaaacttctgaagctcaggcgcatgttgatatcatgcttaaaaagaatatgttagacttacagactgcctccaacgttacaggaatgtcttggtactatcttttgaatgacggagcacgtctcgaacaagcattggtagcatatgcattgaaaaaggcaaacgaaaatgggttttctagctgcgtaccgccaagcatcacgaagaaggagttaatagatgcatgtggatttaatccaagagatatgaataatgaaaggcaaatttacgctcttcaagacaccaatttaggattggtggctaccgcggagatacctttggcaggtttgggggcaaacaaagttttggagttaaactctggagaatgttctaagaaattggttggagtaagtagatgttacagagctgaggcaggtgccaggggaaaagatacgaaaggtctctatcgcgttcatgagtttactaaagtagaattattttgctggagcaagccagaaaccagtgcaaaggtccttgaggaaataaagcaatttcagatttctgtagttgaggaattaggaataccggccaaagtattgaatatgccatctaacgatcttggtaatcccgctttcaagaaatacgacatcgaagcttggatgccaggaagggggaaatttggcgagataagtagtgcctccaattgtaccgatttccaaagtagaagattaaatacaaagtacagggacgataacacaggaaagttggaatatgtgcacacgttgaatggcacagcaatggctatcccaagagtgatagtagcattggtagaaaatttctatgacccaagcaccggtaagatatctgttcctgaatgtttgagggagtttatgaatggccaaagatacatttga

SEQ ID NO: 4845 - DNA, 849 bp, Saccharomyces cerevisiae
atgttgttgttagcattaagtgatgcacatattcctgatagagcaactgatttacctgtaaaattcaaaaaattactaagcgttcctgataaaatatctcaggtcgctttattaggtaatagtacaaagtcttatgactttttgaaatttgtcaatcagatatctaacaatataacaatcgtaagaggagaatttgataatgggcacttaccaagcacgaagaaagataaagcatcagataactctagaccgatggaagaaattcctatgaatagtataataaggcaaggtgctttgaaaatcggctgttgtagcggttataccgttgtgccaaagaacgaccccttatctttgttagcattggcacgccagttggatgtagacattttattgtggggtggtactcataacgttgaagcttataccttagagggaaaatttttcgttaatccaggtagctgtacgggtgcttttaatacagattggccaattgtctttgatgttgaggatagcgatgaagctgtgacatcagaggtggacaagccgactaaggagaatcagtcggaggatgacgatgccaagggtggatcaacaggaaaggaacaacctgggtcttacacgcctaaagaaggcactgctggggaacgtgagaatgagaatgaaagcaacgttaagcctgaaaaccaatttaaggaagacgaggttgatatgtcagattcggatataaatgggtctaattcaccaagtttctgcctcttggatattcaaggcaatacctgcacgttatacatttatttatacgttaatggagaagtgaaggtcgataaagtggtttatgaaaaggaatag

SEQ ID NO: 4846 - DNA, 849 bp, Artificial Sequence
  Description of Artificial Sequence: Synthetic polynucleotide
atgttgttgttagcattaagtgatgcacatattcctgatagagcaactgatttacctgtaaaattcaaaaaattattaagcgttcctgataaaatatctcaggtcgctttattaggtaatagtacaaagtcttatgactttttgaaatttgtcaatcagatatctaacaatataacaatcgtaagaggagaatttgataatgggcacttaccaagcacgaagaaagataaagcatctgataactctagaccgatggaagaaattcctatgaatagtataataaggcaaggtgctttgaaaatcggctgttgtagcggttataccgttgtgccaaagaacgaccccttatctttgttagcattggcacgccagttggatgtagacattttattgtggggtggtactcataacgttgaagcttataccttagagggaaaatttttcgttaatccaggtagctgtacgggtgcttttaatacagattggccaattgtctttgatgttgaggatagcgatgaagctgtgacaagtgaggtggacaagccgactaaggagaatcagtctgaggatgacgatgccaagggtggaagtacaggaaaggaacaacctgggtcttacacgcctaaagaaggcactgctggggaacgtgagaatgagaatgaaagcaacgttaagcctgaaaaccaatttaaggaagacgaggttgatatgagtgattctgatataaatgggtctaattctccaagtttctgcctcttggatattcaaggcaatacctgcacgttatacatttatttatacgttaatggagaagtgaaggtcgataaagtggtttatgaaaaggaatga

SEQ ID NO: 4847 - DNA, 717 bp, Saccharomyces cerevisiae
atgcctattaatattcgcagagcgacaatcaatgacattatatgtatgcaaaatgccaaccttcataacctacccgaaaattatatgatgaaatattatatgtatcatattctctcgtggccagaggcttcgtttgttgctactaccaccactttggactgtgaagatagtgatgaacaagatgagaacgacaaattggaattgaccttagatgggaccaatgacggcaggacaatcaagttggatccaacatacttggctccgggcgaaaaattagttggatacgttctcgtgaagatgaacgacgaccccgaccagcaaaacgagccaccaaatggtcatattacttccttaagtgtcatgagaacctatagaaggatggggattgccgaaaacttaatgagacaagctttatttgcgttgagagaagttcatcaagcggaatatgtttccttgcatgtgagacaatctaatagagcagctttacacttgtacagggacacattggcgtttgaggtgttgagtatcgagaaaagctactatcaggatggtgaagatgcatacgccatgaagaaggttttaaaattagaggagttgcagataagcaacttcacccatcgccgtttgaaagagaatgaggaaaaactagaagacgatctagaaagcgatctactagaggatatcattaagcaaggcgtaaatgatatcattgtataa

SEQ ID NO: 4848 - DNA, 717 bp, Artificial Sequence
  Description of Artificial Sequence: Synthetic polynucleotide
atgcctattaatattcgcagagcgacaatcaatgacattatatgtatgcaaaatgccaaccttcataacttgcccgaaaattatatgatgaaatattatatgtatcatattctctcttggccagaggcttcttttgttgctactaccaccactttggactgtgaagatagtgatgaacaagatgagaacgacaaattggaattgaccttagatgggaccaatgacggcaggacaatcaagttggatccaacatacttggctccgggcgaaaaattagttggatacgttctcgtgaagatgaacgacgaccccgaccagcaaaacgagccaccaaatggtcatattacttccttaagtgtcatgagaacctatagaaggatggggattgccgaaaacttaatgagacaagctttatttgcgttgagagaagttcatcaagcggaatatgtttccttgcatgtgagacaatctaatagagcagctttacacttgtacagggacacattggcgtttgaggtgttgagtatcgagaaaagctactatcaggatggtgaagatgcatacgccatgaagaaggttttaaaattagaggagttgcagataagcaacttcacccatcgccgtttgaaagagaatgaggaaaaattagaagacgatttggaaagcgatttattggaggatatcattaagcaaggcgtaaatgatatcattgtatga

SEQ ID NO: 4849 - DNA, 876 bp, Saccharomyces cerevisiae
atggcacccagaaaacgctttaggctactcgaattagggtcaccaacacattctaaaaggaaagttcaaaaacctcttcaagagaagaccccaaacttgcgagtttctccacttgcttttaaaattggtaaagaaatcaagaataaggaaatcagaaaaacaaaaaaaacagaatcagaaaatatattcaattcgaaacatgtcgatttaagactagaaagcccacatccaggattaaattttgtaagtgatgctcaacagtactcaaaggctggagatgttcgatatttgaaaaataaatcaagcaataccttgaaaaacgaaagacaaacaatagagcgcccctcatttgataattccttaaggttcgaggacattgagcagcctccaaaatctacttcaacgccggttctttctcaatcttctcaaataaatgtagaaagagaagcacccatgtttccagttccttactatattgctccttctcctatgtataattttagcccgtatcaaaatttcgttggaaacccaacgttcctgacgccaagtcataacccaaacctaaactatgccattcccatccaacggccggagttgctttatccgaatgttaacgtatacgattcgccattgtttaagaaaacaagactgccccatcagaccaaaagtctagataaagaaaaaaattaccaatatcttccaatatatccggtctcgatttctaataacggagattttgttggccaagagacaccaagggcagcaccaaagttaagtaaaaagagactttcaaatacattggatgttaattgttccgattatgagtctagtggacaaaatgcaacttataatgatagtgagtcttcccttaattaa

SEQ ID NO: 4850 - DNA, 876 bp, Artificial Sequence
  Description of Artificial Sequence: Synthetic polynucleotide
atggcacccagaaaacgctttaggttactcgaattagggtctccaacacattctaaaaggaaagttcaaaaacctcttcaagagaagaccccaaacttgagagtttctccacttgcttttaaaattggtaaagaaatcaagaataaggaaatcagaaaaacaaaaaaaacagaaagtgaaaatatattcaattctaaacatgtcgatttaagattagaaagcccacatccaggattaaattttgtaagtgatgctcaacagtactccaaggctggagatgttagatatttgaaaaataaaagtagcaataccttgaaaaacgaaagacaaacaatagagcgccccagttttgataattccttaaggttcgaggacattgagcagcctccaaaatctacttccacgccggttctttctcaatcttctcaaataaatgtagaaagagaagcacccatgtttccagttccttactatattgctccttctcctatgtataattttagcccgtatcaaaatttcgttggaaacccaacgttcttgacgccaagtcataacccaaacttgaactatgccattcccatccaaaggccggagttgctttatccgaatgttaacgtatacgattctccattgtttaagaaaacaagattaccccatcagaccaaaagtttggataaagaaaaaaattaccaatatcttccaatatatccggtctctatttctaataacggagattttgttggccaagagacaccaagggcagcaccaaagttaagtaaaaagagactttctaatacattggatgttaattgttccgattatgagtctagtggacaaaatgcaacttataatgatagtgagtcttcccttaattga

SEQ ID NO: 4851 - DNA, 1980 bp, Saccharomyces cerevisiae
atgccaaactctcatggtaatgtattgaataatatctctttaaatagcaagcaaaatcccagatcgatttctaaaagttgcccaaatgataaagatgcaaggcagaaaagcttcaaaacgatatcagcccaagcactagtacgcgtgcaaggagctggatataagctcggtgatgtgaaattaaaggatgctgaagtcaaagaaaagaatagcctcaaaaaatacgattgtaaaaatgcaactcaagaaaagaaagaacaagagcaagtatttgaaaaaactgttgcaaagggaagcgtgcaaaaatatatcacgaaaacttcaaagacaaatagtttgtttataggaaatctgaaatcaactgtcactgaagaaatgctaaggaagatattcaaaaggtatcaatcttttgaatctgctaaagtgtgtcgtgattttctcaccaaaaaatcattgggttatggctatttgaatttcaaggataaaaacgatgcagaatctgcaaggaaagaatttaattatacggttttttttggtcaagaagttaaaataatgccatctatgaaaaatacattatttagaaaaaacatcggaacaaatgtttttttctctaacttaccactggaaaatccccaactgaccacaagatcattttatctaataatgatcgagtacggaaatgtactgtcatgtcttctagaaagaagaaaaaacattgggttcgtttatttcgataacgatatttctgctagaaatgtaatcaaaaaatacaataaccaagaattttttggaaataaaattatatgtggattgcattttgacaaagaagtaagaactagacctgaatttacaaaaagaaaaaaaatgattggctccgacatagttatcgaagacgaactattggctagcaataatttatcagataatgctcgttcgaaaacaatattagtcaaaaatttaccatctgacacaacacaagaagaggtcttggattacttcagcactattggccccataaaatctgtattcatctctgaaaagcaggcgaacacaccacataaagcgttcgtcacatataaaaatgaagaagaatctaaaaaggcacagaaatgtttgaataaaacaatttttaaaaaccataccatttgggttggtcctggtaaagataagcctgttcataatcaaattggaacgaacaagaaaacaaaggtttatctaaaaaatttaagcttcaattgcaataaggagtttatttctcaactatgtttacaagaaaaaataagattcagtgaaattaagatcacaaactataactcattaaattggacattttgtggacatgttgagtgtttttctcgtagtgatgctgagagattatttaatattttggataggagactaattggaagtagtttggttgaggcatcatggtcaaagaataatgataatatactaaatgagatagactatgacgatggtaacaacaatgaaaattataagaaattaatcaacattagttccatgatgcgtttccgcacacaagagttatcagctcatcaaaagggattaacgtcacagtttcaacaagtagtttccccattctcatcatattcaaattcctacacaaacatgaactctctcgtagctacgccgatgaaacctcatccagcatttaatttaattacaaatactgttgacgaaaaactgcatcagcctaagagaactaaacaggagaatgcagaaatacttgagtccttaaaaaaaattataaacagaaatttacaacgtataagtatttctggtttaaataaagaagaaaatctgcgcagcatttccgagtttatttttgacgtattttgggagcatgactcagaaaggctatcgcactttttattaatgacaaatacttcattagaatcacagaaaattctacaaaaacaagtcactagagctgctgaaagcctcggatttacagtttga

SEQ ID NO: 4852 - DNA, 1980 bp, Artificial Sequence
  Description of Artificial Sequence: Synthetic polynucleotide
atgccaaactctcatggtaatgtattgaataatatctctttaaatagcaagcaaaatcccagatctatttctaaaagttgcccaaatgataaagatgcaaggcagaaaagcttcaaaacgatatctgcccaagcattggtacgcgtgcaaggagctggatataagctcggtgatgtgaaattaaaggatgctgaagtcaaagaaaagaatagcctcaaaaaatacgattgtaaaaatgcaactcaagaaaagaaagaacaagagcaagtatttgaaaaaactgttgcaaagggaagcgtgcaaaaatatatcacgaaaacttctaagacaaatagtttgtttataggaaatttgaaatctactgtcactgaagaaatgttaaggaagatattcaaaaggtatcaatcttttgaatctgctaaagtgtgtcgtgattttctcaccaaaaaatctttgggttatggctatttgaatttcaaggataaaaacgatgcagaatctgcaaggaaagaatttaattatacggttttttttggtcaagaagttaaaataatgccatctatgaaaaatacattatttagaaaaaacatcggaacaaatgtttttttctctaacttaccattggaaaatccccaattgaccacaagatctttttatttgataatgatcgagtacggaaatgtattaagttgtcttttagaaagaagaaaaaacattgggttcgtttatttcgataacgatatttctgctagaaatgtaatcaaaaaatacaataaccaagaattttttggaaataaaattatatgtggattgcattttgacaaagaagtaagaactagacctgaatttacaaaaagaaaaaaaatgattggctccgacatagttatcgaagacgaattattggctagcaataatttaagtgataatgctcgttctaaaacaatattagtcaaaaatttaccatctgacacaacacaagaagaggtcttggattacttcagcactattggccccataaaatctgtattcatctctgaaaagcaggcgaacacaccacataaagcgttcgtcacatataaaaatgaagaagaatctaaaaaggcacagaaatgtttgaataaaacaatttttaaaaaccataccatttgggttggtcctggtaaagataagcctgttcataatcaaattggaacgaacaagaaaacaaaggtttatttgaaaaatttaagcttcaattgcaataaggagtttatttctcaattatgtttacaagaaaaaataagattcagtgaaattaagatcacaaactataactctttaaattggacattttgtggacatgttgagtgtttttctcgtagtgatgctgagagattatttaatattttggataggagattgattggaagtagtttggttgaggcatcttggtccaagaataatgataatatattgaatgagatagactatgacgatggtaacaacaatgaaaattataagaaattaatcaacattagttccatgatgcgtttccgcacacaagagttatctgctcatcaaaagggattaacgagccagtttcaacaagtagtttccccattctcttcttattctaattcctacacaaacatgaactctctcgtagctacgccgatgaaacctcatccagcatttaatttaattacaaatactgttgacgaaaaattgcatcagcctaagagaactaaacaggagaatgcagaaatacttgagtccttaaaaaaaattataaacagaaatttacaacgtataagtatttctggtttaaataaagaagaaaatttacgcagcatttccgagtttatttttgacgtattttgggagcatgactctgaaaggctttctcactttttattaatgacaaatacttctttagaatctcagaaaattttacaaaaacaagtcactagagctgctgaaagcctcggatttacagtttga

SEQ ID NO: 4853 - DNA, 1407 bp, Saccharomyces cerevisiae
atgggtatcaataatccaattcctcgaagcttgaaaagcgagaccaagaaggccgcgaaagttctaaggagttttgttaaaccaaatcaagtatttggagcagaccaagttattccaccatatgtgctaaaaagagctaaaggtctagcaattatcacggttttaaaggctggcttcttgttttcagggagagcaggttctggggtgattgtggccaggttaaaagacggtacatggtcggctccctctgctatcgctatggcaggtgctggtgcaggtggtatggtcggcgttgaattgacagattttgtttttattttaaattcggaagaggcagtgaggtccttttctgaatttggtacaattactttaggtggtaatgtgtcagtttccgcaggtcctcttggaagaagtgcagaagctgcagcttctgcatccacaggtggtgtctcggcagtttttgcctattccaaaagcaaaggtttatttgccggtgtgtctgtggaaggttcagccatcttggagagaagggaagctaatcgaaagttttacggcgataactgtacatcaaagatgattttgtcaggtagagtaaaagttccaccagcagcagaccccctactccgtatcttggaatcaagagcgttcaactttacacgccacgaccatgatgacaacgctagcggtgatgatttttatgatgacggtcaatacagcgacaacacaagccattattacgacgatattccagattcctttgattctactgatgaatcctcaacacgtccaaacacaagatcatcaagaagaagaggaatgtcgctggggtcacgcagtcgttatgatgatgattatgatgatgatggttacggacgtggtcgcgggtatggagattttgatagcgaagatgaagattatgattacggaagatctccaaatagaaacagcagccgcaatagaggcccacagatagataggggtactaagccgcgtgcgaatacccgatgggaagatgatttgtatgatagagatactgaatactcccgtcccaaccattccggtagggattatgataatacccgaggaaataggcgtggttatggtagagaaaggggttatagccttggtcatggcccaactcaccccagcaatatgagcaatgtcgatgatttatcacataaaatgtcgaagacagggttaggtaatgaatccactgctacaaattcggcgacaccaacggctgttgctctctacaattttgctggagaacaaccaggcgacttggctttcaaaaaaggtgatgttattactatcttaaaaaaatcagattctcaaaatgattggtggacaggcaggactaacggaaaagaaggaatattccctgcaaactacgttagagtttcttaa

SEQ ID NO: 4854 - DNA, 1407 bp, Artificial Sequence
  Description of Artificial Sequence: Synthetic polynucleotide
atgggtatcaataatccaattcctcgtagcttgaaaagcgagaccaagaaggccgcgaaagttttgaggagttttgttaaaccaaatcaagtatttggagcagaccaagttattccaccatatgtgttgaaaagagctaaaggtttggcaattatcacggttttaaaggctggcttcttgttttctgggagagcaggttctggggtgattgtggccaggttaaaagacggtacatggagtgctccctctgctatcgctatggcaggtgctggtgcaggtggtatggtcggcgttgaattgacagattttgtttttattttaaattctgaagaggcagtgaggtccttttctgaatttggtacaattactttaggtggtaatgtgtctgtttccgcaggtcctcttggaagaagtgcagaagctgcagcttctgcatccacaggtggtgtctctgcagtttttgcctattccaaaagcaaaggtttatttgccggtgtgtctgtggaaggttctgccatcttggagagaagggaagctaatagaaagttttacggcgataactgtacatccaagatgattttgtctggtagagtaaaagttccaccagcagcagaccccttactccgtatcttggaatctagagcgttcaactttacacgccacgaccatgatgacaacgctagcggtgatgatttttatgatgacggtcaatacagcgacaacacaagccattattacgacgatattccagattcctttgattctactgatgaatcctctacacgtccaaacacaagaagtagtagaagaagaggaatgtctttagggtctcgcagtcgttatgatgatgattatgatgatgatggttacggacgtggtcgcgggtatggagattttgatagcgaagatgaagattatgattacggaagatctccaaatagaaacagcagccgcaatagaggcccacagatagataggggtactaagccgcgtgcgaataccagatgggaagatgatttgtatgatagagatactgaatactcccgtcccaaccattccggtagggattatgataataccagaggaaataggcgtggttatggtagagaaaggggttatagccttggtcatggcccaactcaccccagcaatatgagcaatgtcgatgatttatctcataaaatgtccaagacagggttaggtaatgaatccactgctacaaattctgcgacaccaacggctgttgctctctacaattttgctggagaacaaccaggcgacttggctttcaaaaaaggtgatgttattactatcttaaaaaaatctgattctcaaaatgattggtggacaggcaggactaacggaaaagaaggaatattccctgcaaactacgttagagtttcttga

SEQ ID NO: 4855 - DNA, 1158 bp, Saccharomyces cerevisiae
atggcttggtctggtggtaaggatatagtggatcagatatttgatgctgggtattggctcgtctcgaaaagcgctgtcttgagcgatgagatcaagaaccacgtcgaaaaatcaattgaatccatatctggaaagatatccaacaaggagactcctcgactacaggaaaacgacagtaacagatctaaagtatataaaactttgaggatcgggctccaggatcattggaagctaggcttgggaatttctgccacctccctgtgcttataccttgggtataggaccttttttaaactgccacctaatttacctgaagcagaatctcaagtggtattaatactgggcgatatgaatgatcctatcataaggaatcaagtgatggatttatatcgcagacggtttacagtatatatttgtactgaaaatgcagacgtctataagaagcacgaagaagatcaggatttcatatattacattgatcccacctgcgaaaaagacttcgagggtttttttgttgatgtaccaaggctagcatccatattgtttatgccaaggttatcatatcatccatccggagtaatttcatgtgactcattggaatctgaaattcattcaagtatatttgtgtattatcaagcattattaagcattataccccatttgaagagaaaaacccaactaattatgttcaatccatctttgactgcggacctgaacttagtccatcatagtacagaaattataacgtctggaataatcgactcactatttaaaattttcaaggaatatcaaaggttaaatgtttccacaatcaagcttggaatcctgcagattgggtcacaaccatcgaactataaatttttgagaatggccggttcagacattcacgaggccctacattatccagtttacaaaatgataatgagtgcgaatgggtataaactaagacaactgctaagttggttaacgactttgggaggttacaatagtgtgtattattgcggccgttttagttatttagtctcatggccatttgcttcacttatattcaaccatcacacacgtctttccctgaaacgcttgagaggaagattagccaaggtatatagcagcattatttcgtttttttgccggtcatcttctaaatcatccaaataa

SEQ ID NO: 4856 - DNA, 1158 bp, Artificial Sequence
  Description of Artificial Sequence: Synthetic polynucleotide
atggcttggtctggtggtaaggatatagtggatcagatatttgatgctgggtattggctcgtctccaaaagcgctgtcttgagcgatgagatcaagaaccacgtcgaaaaatccattgaatccatatctggaaagatatccaacaaggagactcctcgtttgcaggaaaacgacagtaacagatctaaagtatataaaactttgaggatcgggctccaggatcattggaagttgggcttgggaatttctgccacctccttatgcttataccttgggtataggaccttttttaaattaccacctaatttacctgaagcagaatctcaagtggtattaatattgggcgatatgaatgatcctatcataaggaatcaagtgatggatttatatcgcagaagatttacagtatatatttgtactgaaaatgcagacgtctataagaagcacgaagaagatcaggatttcatatattacattgatcccacctgcgaaaaagacttcgagggtttttttgttgatgtaccaaggttagcatccatattgtttatgccaaggttatcttatcatccatccggagtaattagttgtgactctttggaatctgaaattcattctagtatatttgtgtattatcaagcattattaagcattataccccatttgaagagaaaaacccaattgattatgttcaatccatctttgactgcggacttgaacttagtccatcatagtacagaaattataacgtctggaataatcgactctttatttaaaattttcaaggaatatcaaaggttaaatgtttccacaatcaagcttggaatcttacagattgggagccaaccatctaactataaatttttgagaatggccggttctgacattcacgaggccttgcattatccagtttacaaaatgataatgagtgcgaatgggtataaattgagacaattattaagttggttaacgactttgggaggttacaatagtgtgtattattgcggccgttttagttatttagtctcttggccatttgcttctcttatattcaaccatcacacacgtctttccttgaaacgcttgagaggaagattagccaaggtatatagcagcattatttcctttttttgcagatcttcttctaaatcttccaaatga

SEQ ID NO: 4857 - DNA, 1392 bp, Saccharomyces cerevisiae
atgtcagacggcactcaaaaactatggggtgggagattcactggtgaaaccgatcctttgatgcacctttacaatgcgtctcttccgtatgattataagatgtataaggcagatttagaaggaactaaagtatacacagcgggcttgcagaagttgggtcttctaacggagacagaattggcaaagatccatgaaggtttggctgaaatcaaaaaagaatgggacgctgacaaatttgtccgtcatccaaacgacgaggatatccatactgcgaatgaaagacgtcttggtgaactaattggccgcgatattgctggtaaagtccacaccggtagatcccgtaatgatcaagttgttaccgatttgagaatatactgtcgtgacattgtcaatgacaccctctttccagctttaaagggcttggttgaagttctaattaagagggccgaaggtgagatagatgtcttaatgccaggctacacacatttacaaagggcacaacctattagatggtctcattggttgagctcttatgcaacatacttcaccgaagattacaagagactgggtcaaatactacacagattgaatcaatcaccactgggtgcaggcgctcttgctggtcatccttacggcattgatagagaatttttggctgaaggtttgggtttcaatagtgtaattggtaactccttggttgctgtttctgatagagatttcatcgtggagttgatgttttggggaactttgttcatgaaccatatttctcgttttgctgaagatttgattatatattgtacagcagaatttggtttcatacagttgagcgacgcctattcaacaggttcttctttaatgcctcagaagaagaatgcagactcgttagagttgttaagaggtaaatccggtagagtatttggtgatctgacaggattcttgatgagtttgaagggtatcccatctacttatgataaagacatgcaagaagacaaagagccactattcgattgcttaacaactgtagagcactccatgctgattgccacaggtgttatttctaccttaactgtaaataaggaaaagatggaagctgctctcacgatggatatgctagctaccgacttggcagattacttggtcagaaagggtgttccattcagagagactcatcacatatctggtgagtgtgtcgctactgctgaaagacttggtctaagcggtattgataaattaaccttggagcagtatcaaaagatcgattcgagattcggacaagatctttttgaaacttttaactttgaacaaagcgttgaaagacgagatgctactggtggaaccgctaaatctgctgtattgaagcaattggataatttgaaatcccaattaaattag

SEQ ID NO: 4858 - DNA, 1392 bp, Artificial Sequence
  Description of Artificial Sequence: Synthetic polynucleotide
atgtctgacggcactcaaaaattatggggtgggagattcactggtgaaaccgatcctttgatgcacctttacaatgcgtctcttccgtatgattataagatgtataaggcagatttagaaggaactaaagtatacacagcgggcttgcagaagttgggtcttttgacggagacagaattggcaaagatccatgaaggtttggctgaaatcaaaaaagaatgggacgctgacaaatttgtccgtcatccaaacgacgaggatatccatactgcgaatgaaagacgtcttggtgaattgattggccgcgatattgctggtaaagtccacaccggtagatcccgtaatgatcaagttgttaccgatttgagaatatactgtcgtgacattgtcaatgacaccctctttccagctttaaagggcttggttgaagttttgattaagagggccgaaggtgagatagatgtcttaatgccaggctacacacatttacaaagggcacaacctattagatggtctcattggttgagctcttatgcaacatacttcaccgaagattacaagagattaggtcaaatattacacagattgaatcaatctccattgggtgcaggcgctcttgctggtcatccttacggcattgatagagaatttttggctgaaggtttgggtttcaatagtgtaattggtaactccttggttgctgtttctgatagagatttcatcgtggagttgatgttttggggaactttgttcatgaaccatatttctcgttttgctgaagatttgattatatattgtacagcagaatttggtttcatacagttgagcgacgcctattctacaggttcttctttaatgcctcagaagaagaatgcagactctttagagttgttaagaggtaaatccggtagagtatttggtgatttaacaggattcttgatgagtttgaagggtatcccatctacttatgataaagacatgcaagaagacaaagagccattattcgattgcttaacaactgtagagcactccatgttgattgccacaggtgttatttctaccttaactgtaaataaggaaaagatggaagctgctctcacgatggatatgttggctaccgacttggcagattacttggtcagaaagggtgttccattcagagagactcatcacatatctggtgagtgtgtcgctactgctgaaagacttggtttaagcggtattgataaattaaccttggagcagtatcaaaagatcgattccagattcggacaagatctttttgaaacttttaactttgaacaaagcgttgaaagaagagatgctactggtggaaccgctaaatctgctgtattgaagcaattggataatttgaaatcccaattaaattga

SEQ ID NO: 4859 - DNA, 1665 bp, Saccharomyces cerevisiae
atgtcatctttgtacattaaggaggctaccggtgtagacgaattgaccacagccggttcacaagaccatccattcaaaaccccagcatatgctttgttcgcatctcaacagaagagcgatgccacggaacctaagcttttcgtgtttaagacagaagacaacgagtaccaggaaatcagtgcttctgctttgaagaaggctcgtaagggctgtgatggtttgaagaaaaaggcagtcaagcaaaaggaacaggagttgaagaaacaacaaaaagaggcagaaaatgctgccaagcaattgtctgctttgaatatcaccattaaggaggacgaatcgctaccagctgccattaagactagaatttatgactcttattccaaggtcggacaaagagttaaggtttccggttggatccatagattacgttctaacaagaaggttattttcgtcgtcctcagagacggatctggtttcattcaatgtgtcttgtccggtgatttggcattggctcaacaaactttggacctgactttggaatccaccgttactctgtacggtaccatagtcaaattgcctgagggtaaaaccgctccaggtggtgttgaattgaatgtcgactattacgaagttgtaggtttggcccccggtggtgaagactcctttacaaacaaaatcgcagagggctcagacccttctttactgttggaccaacgtcatttggccttgagaggagatgccttgtctgcagtcatgaaagtccgtgctgctctactgaaaagcgttagacgtgtttatgatgaagaacatttgacagaagttaccccaccatgtatggtgcaaactcaagtcgaaggtggttccactttgttcaagatgaactattacggcgaggaagcttacttgacccaaagttcccaattatatttagaaacctgtttggcctccctaggtgatgtttataccatccaagaatctttcagagctgaaaagtcccacacaagaagacatttgtccgaatatacccatatcgaagctgaattggccttcttgactttcgacgatctattacaacatattgaaactttgatcgtcaaatccgtgcaatacgttttggaagacccaattgctggcccactcgtaaaacaattgaatccaaactttaaggctccaaaggctccattcatgagattacagtacaaggatgccattacctggttgaacgaacacgacatcaagaacgaagagggcgaagactttaaatttggtgacgatattgcagaagctgctgaaagaaagatgaccgataccatcggcgtcccaatctttttgacgagattcccagtagaaatcaagtctttctacatgaagcgttgttctgacgacccccgcgtcactgaatccgtcgacgttttgatgccaaacgttggtgaaatcactggtggttctatgagaatcgacgacatggacgaactaatggcagggtttaagcgtgagggtattgataccgacgcctactactggttcattgaccaaagaaaatacggtacttgcccacatggtggttacggtatcggtaccgaacgtattttagcctggttgtgtgacagattcactgtcagagactgttccttgtatccacgtttcagcggtagatgtaagccatga

SEQ ID NO: 4860 - DNA, 1665 bp, Artificial Sequence
  Description of Artificial Sequence: Synthetic polynucleotide
atgtcttctttgtacattaaggaggctaccggtgtagacgaattgaccacagccggttctcaagaccatccattcaaaaccccagcatatgctttgttcgcatctcaacagaagagcgatgccacggaacctaagcttttcgtgtttaagacagaagacaacgagtaccaggaaatcagtgcttctgctttgaagaaggctcgtaagggctgtgatggtttgaagaaaaaggcagtcaagcaaaaggaacaggagttgaagaaacaacaaaaagaggcagaaaatgctgccaagcaattgtctgctttgaatatcaccattaaggaggacgaatctttaccagctgccattaagactagaatttatgactcttattccaaggtcggacaaagagttaaggtttccggttggatccatagattacgttctaacaagaaggttattttcgtcgtcctcagagacggatctggtttcattcaatgtgtcttgtccggtgatttggcattggctcaacaaactttggacttgactttggaatccaccgttactttgtacggtaccatagtcaaattgcctgagggtaaaaccgctccaggtggtgttgaattgaatgtcgactattacgaagttgtaggtttggcccccggtggtgaagactcctttacaaacaaaatcgcagagggctctgacccttctttattattggaccaacgtcatttggccttgagaggagatgccttgtctgcagtcatgaaagtccgtgctgctttattgaaaagcgttagacgtgtttatgatgaagaacatttgacagaagttaccccaccatgtatggtgcaaactcaagtcgaaggtggttccactttgttcaagatgaactattacggcgaggaagcttacttgacccaaagttcccaattatatttagaaacctgtttggcctccttgggtgatgtttataccatccaagaatctttcagagctgaaaagtcccacacaagaagacatttgtccgaatatacccatatcgaagctgaattggccttcttgactttcgacgatttattacaacatattgaaactttgatcgtcaaatccgtgcaatacgttttggaagacccaattgctggcccactcgtaaaacaattgaatccaaactttaaggctccaaaggctccattcatgagattacagtacaaggatgccattacctggttgaacgaacacgacatcaagaacgaagagggcgaagactttaaatttggtgacgatattgcagaagctgctgaaagaaagatgaccgataccatcggcgtcccaatctttttgacgagattcccagtagaaatcaagtctttctacatgaagcgttgttctgacgacccccgcgtcactgaatccgtcgacgttttgatgccaaacgttggtgaaatcactggtggttctatgagaatcgacgacatggacgaattgatggcagggtttaagcgtgagggtattgataccgacgcctactactggttcattgaccaaagaaaatacggtacttgcccacatggtggttacggtatcggtaccgaacgtattttagcctggttgtgtgacagattcactgtcagagactgttccttgtatccacgtttcagcggtagatgtaagccatga

SEQ ID NO: 4861 - DNA, 2067 bp, Saccharomyces cerevisiae
atgcctgtttcggaagcgtttgccaagttgtgtgtgaatgagaagcctcctgctgaatctgccgttgcggtgaagtctttggtcttcaaaccaaagactccaaagtccgccacccctgttcctatcgttgtggtggctttgcaatctactactactccttctgcgttgattgccaacgctacgtccagtaaggatccaagattggctcgcgatgatttggtcaagcaagcgttccaatctgaatccgctagagcttttatcttgggggatttggctaacgccacgtccaattttcacttgctaattgatcacgagttgggtactgttgacggtgacactatcttgcagttaaacgacagtacttatatgaagaaatctgacatgatgaaatttctaaacaattttgaggatagtcaaaaagtggttgatttctcccaagaggtgtctaaggaaaccgctacagaaggcaagaaacaacagaaaaagcagcaaccttctaaggcaggcactgcagcagcagcagcagcagcagctttggaagacgccaaacttattggtatcaccgtagacaaagcgttggatttcccaggctggtaccaacaaatcttgaccaagggtgaaatgttggactactacgatgtttctggctgttacatcttaagacctccttcttatgcgatctgggaaaacattcagaaatggttcgacgacaagatcaaggccattggtgtacaaaatgcctatttcccaatgtttgtttcctcacgtgtgttggaaaaggaaaaggaccatgttgaaggctttgctccagaagttgcctgggtcaccagagctggctcctctgaattggaagaaccaatcgccattagaccaacttctgaaactgtcatgtatccttactacgcaaaatgggtccagtcttacagagatttaccattgaaactaaaccaatggaattctgtggttagatgggaattcaagcatcctcagccctttttaagaaccagagaattcttgtggcaagaaggtcatactgctcacttgactgctaaggatgccgaagaggaggttttgcaaatcttagatttctacgctggggtttacgaagagttattagctgttccagtggttaagggtagaaagaccgaaaaggaaaaatttgctggtggtgacttcaccacaacttgtgaaggctatattccacaaaccggtcgtggtattcaaggtgccacctctcaccatttgggccaaaacttttctaagatgttcaatttgtctgtggagaacccactaggttctgatcatccaaagatctttgcgtaccaaaattcatggggtttatccactcgtgtcattggtgtcatggtcatgatccactctgacaacaagggtttggttatcccaccaagagtgtcccaattccaatccgttgtcattccagtgggcatcacaaagaagacctctgaggaacagcgtaaacacattcatgaaacagccagaagtgtggaatcccgtttgaaaaaggttggcattagagcctttggtgactataacgataattacacaccaggttggaaattttcccaatacgagctaaagggtattccaatccgtattgaattaggtcctaaggatattgaaaaaaaccaagtcgttgtcgttcgtagaaatgactccaagaaatacgtcgtttctttcgacgaattggaagcccgtatcccagaaatcttagaagaaatgcaaggagatttgttcaaaaaagccaaggagctattcgacacccacagagttatcgttaatgaatggagtggttttgttccagcattgaacaagaagaacgttatcttagcaccatggtgtggtgtgatggaatgtgaagaagatatcaaggaatcttctgcaaagaaagacgatggtgaagaattcgaggaagatgacaaggcaccaagtatgggtgccaaatctttatgtatcccattcgaccaacctgtattgaatgaaggtcaaaaatgtatcaagtgtgaacgtattgctgtcaattactgtatgttcggtcgttcttattag

SEQ ID NO: 4862 - DNA, 2067 bp, Artificial Sequence
  Description of Artificial Sequence: Synthetic polynucleotide
atgcctgtttctgaagcgtttgccaagttgtgtgtgaatgagaagcctcctgctgaatctgccgttgcggtgaagtctttggtcttcaaaccaaagactccaaagtccgccacccctgttcctatcgttgtggtggctttgcaatctactactactccttctgcgttgattgccaacgctacgtccagtaaggatccaagattggctcgcgatgatttggtcaagcaagcgttccaatctgaatccgctagagcttttatcttgggggatttggctaacgccacgtccaattttcacttgttaattgatcacgagttgggtactgttgacggtgacactatcttgcagttaaacgacagtacttatatgaagaaatctgacatgatgaaatttttgaacaattttgaggatagtcaaaaagtggttgatttctcccaagaggtgtctaaggaaaccgctacagaaggcaagaaacaacagaaaaagcagcaaccttctaaggcaggcactgcagcagcagcagcagcagcagctttggaagacgccaaacttattggtatcaccgtagacaaagcgttggatttcccaggctggtaccaacaaatcttgaccaagggtgaaatgttggactactacgatgtttctggctgttacatcttaagacctccttcttatgcgatctgggaaaacattcagaaatggttcgacgacaagatcaaggccattggtgtacaaaatgcctatttcccaatgtttgtttcctctcgtgtgttggaaaaggaaaaggaccatgttgaaggctttgctccagaagttgcctgggtcaccagagctggctcctctgaattggaagaaccaatcgccattagaccaacttctgaaactgtcatgtatccttactacgcaaaatgggtccagtcttacagagatttaccattgaaattgaaccaatggaattctgtggttagatgggaattcaagcatcctcagccctttttaagaaccagagaattcttgtggcaagaaggtcatactgctcacttgactgctaaggatgccgaagaggaggttttgcaaatcttagatttctacgctggggtttacgaagagttattagctgttccagtggttaagggtagaaagaccgaaaaggaaaaatttgctggtggtgacttcaccacaacttgtgaaggctatattccacaaaccggtcgtggtattcaaggtgccacctctcaccatttgggccaaaacttttctaagatgttcaatttgtctgtggagaacccattgggttctgatcatccaaagatctttgcgtaccaaaattcttggggtttatccactcgtgtcattggtgtcatggtcatgatccactctgacaacaagggtttggttatcccaccaagagtgtcccaattccaatccgttgtcattccagtgggcatcacaaagaagacctctgaggaacagcgtaaacacattcatgaaacagccagaagtgtggaatcccgtttgaaaaaggttggcattagagcctttggtgactataacgataattacacaccaggttggaaattttcccaatacgagttgaagggtattccaatccgtattgaattaggtcctaaggatattgaaaaaaaccaagtcgttgtcgttcgtagaaatgactccaagaaatacgtcgtttctttcgacgaattggaagcccgtatcccagaaatcttagaagaaatgcaaggagatttgttcaaaaaagccaaggagcttttcgacacccacagagttatcgttaatgaatggagtggttttgttccagcattgaacaagaagaacgttatcttagcaccatggtgtggtgtgatggaatgtgaagaagatatcaaggaatcttctgcaaagaaagacgatggtgaagaattcgaggaagatgacaaggcaccaagtatgggtgccaaatctttatgtatcccattcgaccaacctgtattgaatgaaggtcaaaaatgtatcaagtgtgaacgtattgctgtcaattactgtatgttcggtcgttcttattga

SEQ ID NO: 4863 - DNA, 249 bp, Saccharomyces cerevisiae
atggttttagttcaagatttgttgcacccaactgctgcttctgaagccagaaagcacaagttaaagactttggttcaaggcccaagatcctacttcttggatgtcaaatgcccaggttgtttgaacatcaccactgttttttctcatgctcaaactgctgtcacttgtgaatcatgctctactgtcttatgtactccaaccggtggtaaggccaaattatctgaaggtacttctttcagaagaaagtaa

SEQ ID NO: 4864 - DNA, 249 bp, Artificial Sequence
  Description of Artificial Sequence: Synthetic polynucleotide
atggttttagttcaagatttgttgcacccaactgctgcttctgaagccagaaagcacaagttaaagactttggttcaaggcccaagatcctacttcttggatgtcaaatgcccaggttgtttgaacatcaccactgttttttctcatgctcaaactgctgtcacttgtgaaagttgctctactgtcttatgtactccaaccggtggtaaggccaaattatctgaaggtacttctttcagaagaaagtga

SEQ ID NO: 4865 - DNA, 456 bp, Saccharomyces cerevisiae
atgaacagatcttttcactttctaataaagtacatatatatacatgttcttcttgttttttattttcacattaagcagcaggctattatgcctttttttatttttttcttttcatcattcgacggactttcatttgaccttcgagtggtagcgtttttagccaagcacgttttcgttggcgtttgttcacccttttttgttgtaggtttttttggttcatctagagtagttgttactgaatggctttcgaagcttgtattacctcctcctccagtttcaataacacaggtcttctctttgtcacgtaagagaggcgaattctccagcggatacatcttgattataaacccttacaaaagtttcctgcgatcacttttagatttttcaattttcaataatactgccaagaacaaatcttcaacatttacattgaacttggaggatgtctcaaaatag

SEQ ID NO: 4866 - DNA, 456 bp, Artificial Sequence
  Description of Artificial Sequence: Synthetic polynucleotide
atgaacagatcttttcactttttaataaagtacatatatatacatgttcttcttgttttttattttcacattaagcagcaggctattatgcctttttttatttttttcttttcttctttcgacggactttcttttgaccttcgtgtggtagcgtttttagccaagcacgttttcgttggcgtttgttctcccttttttgttgtaggtttttttggttcttctagagtagttgttactgaatggctttccaagcttgtattacctcctcctccagtttctataacacaggtcttctctttgtctcgtaagagaggcgaattctccagcggatacatcttgattataaacccttacaaaagtttcttaagatctcttttagatttttctattttcaataatactgccaagaacaaatcttctacatttacattgaacttggaggatgtctccaaatga

SEQ ID NO: 4867 - DNA, 771 bp, Saccharomyces cerevisiae
atgagtgttcgcttatcatacggcgcaagccttgcgtcaatcccaagatgtttcgacttgaaatcttcgaagattactgtaatgggggatgatcattctggaaaaacttctctggttcgcagttggctaggtagttcatttcaaatatcagatgctaatcgttatagggtttcggacctctaccacaagacaatccaatttgatactttggtaaaatactatcgtacctttggcgtaaaaggacagttgccgaattatgcgggtttcaaagctaaaaactctggcacaatttatgaaagttgtggcaatttcctagaagagcgcctgatcaatgccaataaatcgactgctcaaagacgcaccagtattgatgttcaagtttttgataccaatcaaatggaggtttcgtacctttcggagctaactactcttcaaattaggcagtctgatgcaattatattatgtttcgattctactaatgacagctctcttgccagcttagagtcttatatttgtattattcaccacgtacgtttggaatgtgaattggatattccaattattatagcgtgtacgaaatgtgatcttgattcggaaagaacaattactcatgaaaaggttttaacatttatccaagagctgggtttctcgccaggcaatttagactattttgagacatcctccaagttcaatgtaaatgttgaagatttgttcttggcagtattattgaaaattgaaaaatctaaaagtgatcgcaggaaacttttgtaa

SEQ ID NO: 4868 - DNA, 771 bp, Artificial Sequence
  Description of Artificial Sequence: Synthetic polynucleotide
atgagtgttcgcttatcttacggcgcaagccttgcgtctatcccaagatgtttcgacttgaaatcttccaagattactgtaatgggggatgatcattctggaaaaacttctttggttcgcagttggttaggtagttcttttcaaatatctgatgctaatcgttatagggtttctgacctctaccacaagacaatccaatttgatactttggtaaaatactatcgtacctttggcgtaaaaggacagttgccgaattatgcgggtttcaaagctaaaaactctggcacaatttatgaaagttgtggcaatttcttggaagagcgcttgatcaatgccaataaatctactgctcaaagacgcaccagtattgatgttcaagtttttgataccaatcaaatggaggtttcttacctttctgagttaactactcttcaaattaggcagtctgatgcaattatattatgtttcgattctactaatgacagctctcttgccagcttagagtcttatatttgtattattcaccacgtacgtttggaatgtgaattggatattccaattattatagcgtgtacgaaatgtgatcttgattctgaaagaacaattactcatgaaaaggttttaacatttatccaagagttaggtttctctccaggcaatttagactattttgagacatcctccaagttcaatgtaaatgttgaagatttgttcttggcagtattattgaaaattgaaaaatctaaaagtgatcgcaggaaacttttgtga

SEQ ID NO: 4869 - DNA, 90 bp, Saccharomyces cerevisiae
atgaaaatcaaattctcaagaggggctcgattttcagcgaccttttcttttgataagtaccctttcttgctatacgaggtggtccgataa

SEQ ID NO: 4870 - DNA, 90 bp, Artificial Sequence
  Description of Artificial Sequence: Synthetic oligonucleotide
atgaaaatcaaattcagtagaggggctagattttctgcgaccttttcttttgataagtaccctttcttgttgtacgaggtggtccgttga

SEQ ID NO: 4871 - DNA, 5787 bp, Saccharomyces cerevisiae
atgaccggcgggcagtcttgcagttctaatatgatcgtctggataccagatgagaaagaagttttcgtaaaaggggagctgatgagtaccgatatcaacaagaataaatttacaggccaagaagaacaaataggaattgtccacccgttggattccacagaggtttctaatctagtgcaggtacgaatatccgatgtatttccagttaacccatcgacttttgacaaagtagagaatatgtctgagttaacccatttgaatgagccgtctgtgctttataacctagaaaagaggtacgattgtgatctaatatacacctattccggcttatttttagtggcgattaacccttatcacaatttgaatttatattctgaagaccatataaacttgtaccacaacaagcataacaggttatcaaagagcagattggatgaaaactcccatgaaaaactgccgccgcatatatttgcaattgcagaagaagcctatgagaatcttttatctgaaggaaaagatcaatctattttagtcactggtgaatccggtgcgggcaagacagaaaatacgaaaaagattctacaatatctagcatctataacttctggctctccttccaatatagctcctgttagtggtagttctattgtagaaagcttcgaaatgaaaattctacaaagtaaccctatcttagagtcttttggtaatgcacagactgtacgaaataacaactcttcaagattcggtaaattcataaagatagaatttaatgaacatggtatgatcaatggtgcgcatatcgagtggtaccttttagagaaatcaagaattgttcatcaaaattcgaaagaaagaaattatcatatattttaccaactattatccggtttagacgattctgagttgaaaaatctacgccttaaatctaggaacgtaaaagattacaaaattttatccaattctaaccaggatattataccaggaatcaacgacgtagagaattttaaagaactgctctcggcattgaatattattgggttttcaaaagatcaaataagatggatatttcaagtagtggcaattattttattaatcggtaacattgagttcgtatcagacagagcagaacaagcatctttcaaaaatgatgttagcgcaatttgtagcaatttaggcgtggacgaaaaagatttccaaactgccatattaaggcctagatcaaaagccggaaaagagtgggtttcacagtccaaaaactctcaacaagctaagttcatcttgaatgccttatcaagaaatctttatgagcggttgttcggatatattgtggatatgattaataaaaacttggaccatgggagtgcaactttgaattacattggattgttggatattgctggttttgaaatattcgaaaataattcctttgaacaattatgcatcaactatacaaatgaaaaattacagcagttctttaataaccatatgtttgttttagaacagagcgaatatttaaaggaaaacattcaatgggattatatagattacggaaaagatttgcaactgacgattgatttgatcgaaagcaaggggccaccgaccggtgtactaccgttgttggatgaggaagccgttttgcccaaatccactgatgagtcattctactctaaactgatctcaacttgggaccaaaactcttcaaagtttaaacgttcaagattaaaaaatgggttcattttgaaacactatgctggggatgtggaatacactgtggaaggctggttatccaaaaacaaagatcctttaaacgataatctcttgtctttgttgtcttcttcacaaaacgatatcatttcaaaactgttccagccagagggcgaaaaatcttctagtgctggtgtggaagccaacatctccaaccaagaagttaagaaatcagctaggacaagtaccttcaagactacatcatcacgccatagagaacagcagataacattactaaatcaactagcttctacccacccacattttgttcgttgtataattccaaacaacgtgaaaaaagtgaaaacatttaacagaaggttaatcttagatcaattacgttgtaatggtgtgctagagggtattagacttgccagagaaggttacccaaataggatagcattccaagaatttttccagcggtataggatcttgtatcctgaaaattcaaccaccacgactttcagttctaaattaaaagccagtaccaaacaaaactgtgagtttcttctaacgtctttgcaactggatacaaaagtttataaaattggtaatactaaactgtttttcaaagctggagtattggcagatttggaaaaacaaaaagatgttaagctgaataatattatgattaaactaacagcaactatacgaggttacacagtaagaaaagaaataacgtaccatctacaaaaattaaagaaaacaagggtgattggtaataccttcagattatacaatagactggtgaaggaagatccttggtttaatttatttatcaggatcaagccacttttaacatcatccaatgacatgaccagaaccaaaaaattcaacgagcaaattaataaactgaagaacgaccttcaagaaatggaatctaagaagaagtttttggaagaaaagaaccaaaaaactgtcaatgagttggaaaatacgcaggacttgctaaatcaggagaaagagaatttaagaaaaaatgagagcttattaaatagagttaaaaccagctcagaaacattacaaaaacaattcgatgaccttgtttctgaaaaggatgaaattagcagggaaaaactagaagttgcgcaaaatcttgaagaagctcatcaaaaaatccaaggccttcaagaaactattagagaacgggaggcgaccttagagaaattacactcaaaaaataacgaactaataaagcaaatatcagacttgaactgtgacatttctaaggaacagagctcccagtctttaatcaaagaatctaaattgaagctagaaaacgaaataaagagattaaaagatgtcataaactcgaaggaggaagaaataaaatcgttcaacgataagttaagttcctcagaagaagatcttgacataaaattggtcactttagagaaaaattgtaacattgcgatgtcaagactacaatcccttgtaacagaaaattcagatttgcgttcgaaaaatgagaatttcaagaaagaaaaggcagcactgaataaccagttgaaaaataaggaaagtgaactgttaaagatgaaagaaaaaatagataatcacaaaaaagagcttgctactttttccaagcaaagagatgacgcagttagcgaacatggtaaaattactgctgaactaaaagagacaagaatccaacttaccgagtataaatctaactatcaaaagattaaagaagaatattccaacttccaaagagaaacgaaggaacaggagcaaaagaaaagaaatagcctggttgagtctctgaacgatagtaaaattaaagaattggaagctcggttgtcacaggaaatatccttaaatcaatacttaaacaaaagaatatcaggaaattctgtagaaacgaatatttcgtctactagacgttccacatcgtattcagatgatccacttgacaaagaagatataataaaaaaatactatgaccttcaattagcgtttactgaaataactaggaatctagagaatgaaattgaagagaagaagaacttaatttctagattgagattcactgaaacaagactagcatcttcgtcttttgaggaccaaaagattaaggcacaaatgaagaaattaaaaaaattgatccaggatatggaccctagtattcctttggacagtattctaaatgagccgctagataactgccctgacaaagagtctgatattaacaaattaatgcttgaggtcgattatttaaaaagacaattggatatcgaaacaagagctcactacgatgcagaaaatgccatatctgctttacacagtaaatttagaaagatccaaggggaaagctccctgtcatcttctgatatttacaaactgaagttcgaagccagtgaagaaagagtcaaatccttggaagacaagctaaaaaccatgcctttacgtgatcgaacaaatttacctgtcggagatattataaagaaccgtgatagcatttcaaaatatgaagaagaaattcgctattataaacttgaaaactacaagctccaagaaatattaaatgaatcaaatggaaaattgagccaactcactcttgacttgaggcaatcaaaatccaaagaagccctacttagtgaacaattagacagattacagaaagaccttgaatctacggaacgccaaaaagaactactatcatccacaataaaacagcagaaacagcaatttgaaaactgcatggacgatctgcaagggaatgaactgcggctaagagaacatattcatgcactaaaacaagctgaagaggacgtaaagaatatggcgtctatcattgaaaaattgaaaactcaaaataagcaaaaggaaaagttaatctgggagcgcgaaatggaaagaaatgactcagatatgcaattacaggaaactctgctggagttgaagagagtccaagatgtaaagaaaatcctgagtgatgatttggcccatttaaaggagcgattgagcgctgtagaagatagatcccaatatacggatgagattaatagattaaaggaagaattgaactgctctttaaaagctgaaacaaacttaaaaaaagaatttgcaacccttaagtacaaactggaaacttcgactaatgattctgaagcaaaaatctccgatctgctgaagcagctcgatcattatacaaaagtggtggaaatgttgaacaacgaaaaagatgctatttctcttgcagaaaaagaactttatcagaaatacgaggcactcaatactgaatgcgagtctcttaaaggaaagatagtgtctttgactaaaatcaagcaggaactggaatctgacttaaatcaaaagactgatgcgctacagatatcaaacgcagcactctcaagttccacacaaaagaataaagagattactgaaaaaatcaaatatctggaggaaacactacaactgcaaatggaacaaaattcaaggaatggggagttggttaagacattacaggccagctgcaatggatataaagataagtttgatgatgagaagcagaagaatattgatttatatgaagaaaatcaaactttacaaaagctcaacaccgacttacagcttcaactaaaaaatttgcatgaaagattatcagacactactgaaaaaaacgcatggttatcaaagattcatgaattggaaaatatggtaagcctagaaacggacttgaaatatgaagaaatgaaaaagaacaagagtttggagagagcagtggaagagttacaaactaagaactcccaacaaacagatgtaatagaactagcgaataaaaatagaagcgaatttgaggaagctactttgaaatatgaggctcaaatctctgacttagaaaagtacatttctcaacaagagcttgagatgaaaaaatccattagagataattcttcttaccgcgacaaagtgcaggaaatggcccaagaaattgaattctggaaaagccgttatgaatctaccatgataggctcgaaaaatattgatagtaacaatgcacagagtaaaattttcagttaa

SEQ ID NO: 4872 - DNA, 5787 bp, Artificial Sequence
  Description of Artificial Sequence: Synthetic polynucleotide
atgaccggcgggcagtcttgcagttctaatatgatcgtctggataccagatgagaaagaagttttcgtaaaaggggagttgatgagtaccgatatcaacaagaataaatttacaggccaagaagaacaaataggaattgtccacccgttggattccacagaggtttctaatttggtgcaggtaagaatatccgatgtatttccagttaacccatctacttttgacaaagtagagaatatgtctgagttaacccatttgaatgagccgtctgtgctttataacttggaaaagaggtacgattgtgatttgatatacacctattccggcttatttttagtggcgattaacccttatcacaatttgaatttatattctgaagaccatataaacttgtaccacaacaagcataacaggttatccaagagcagattggatgaaaactcccatgaaaaattaccgccgcatatatttgcaattgcagaagaagcctatgagaatcttttatctgaaggaaaagatcaatctattttagtcactggtgaatccggtgcgggcaagacagaaaatacgaaaaagattttacaatatttggcatctataacttctggctctccttccaatatagctcctgttagtggtagttctattgtagaaagcttcgaaatgaaaattttacaaagtaaccctatcttagagtcttttggtaatgcacagactgtaagaaataacaactcttctagattcggtaaattcataaagatagaatttaatgaacatggtatgatcaatggtgcgcatatcgagtggtaccttttagagaaatctagaattgttcatcaaaattctaaagaaagaaattatcatatattttaccaattattatccggtttagacgattctgagttgaaaaatttacgccttaaatctaggaacgtaaaagattacaaaattttatccaattctaaccaggatattataccaggaatcaacgacgtagagaattttaaagaattactctctgcattgaatattattgggttttccaaagatcaaataagatggatatttcaagtagtggcaattattttattaatcggtaacattgagttcgtaagtgacagagcagaacaagcatctttcaaaaatgatgttagcgcaatttgtagcaatttaggcgtggacgaaaaagatttccaaactgccatattaaggcctagaagtaaagccggaaaagagtgggtttctcagtccaaaaactctcaacaagctaagttcatcttgaatgccttatctagaaatctttatgagagattgttcggatatattgtggatatgattaataaaaacttggaccatgggagtgcaactttgaattacattggattgttggatattgctggttttgaaatattcgaaaataattcctttgaacaattatgcatcaactatacaaatgaaaaattacagcagttctttaataaccatatgtttgttttagaacagagcgaatatttaaaggaaaacattcaatgggattatatagattacggaaaagatttgcaattaacgattgatttgatcgaaagcaaggggccaccgaccggtgtattaccgttgttggatgaggaagccgttttgcccaaatccactgatgagagtttctactctaaattaatctctacttgggaccaaaactcttccaagtttaaacgttccagattaaaaaatgggttcattttgaaacactatgctggggatgtggaatacactgtggaaggctggttatccaaaaacaaagatcctttaaacgataatctcttgtctttgttgtcttcttctcaaaacgatatcatttccaaattattccagccagagggcgaaaaatcttctagtgctggtgtggaagccaacatctccaaccaagaagttaagaaatctgctaggacaagtaccttcaagactacatcttctcgccatagagaacagcagataacattattgaatcaattggcttctacccacccacattttgttcgttgtataattccaaacaacgtgaaaaaagtgaaaacatttaacagaaggttaatcttagatcaattacgttgtaatggtgtgttggagggtattagacttgccagagaaggttacccaaataggatagcattccaagaatttttccagagatataggatcttgtatcctgaaaattctaccaccacgactttcagttctaaattaaaagccagtaccaaacaaaactgtgagtttcttttgacgtctttgcaattggatacaaaagtttataaaattggtaatactaaattatttttcaaagctggagtattggcagatttggaaaaacaaaaagatgttaagttgaataatattatgattaaattaacagcaactataagaggttacacagtaagaaaagaaataacgtaccatttacaaaaattaaagaaaacaagggtgattggtaataccttcagattatacaatagattagtgaaggaagatccttggtttaatttatttatcaggatcaagccacttttaacatcttccaatgacatgaccagaaccaaaaaattcaacgagcaaattaataaattgaagaacgaccttcaagaaatggaatctaagaagaagtttttggaagaaaagaaccaaaaaactgtcaatgagttggaaaatacgcaggacttgttgaatcaggagaaagagaatttaagaaaaaatgagagcttattaaatagagttaaaaccagctctgaaacattacaaaaacaattcgatgaccttgtttctgaaaaggatgaaattagcagggaaaaattagaagttgcgcaaaatcttgaagaagctcatcaaaaaatccaaggccttcaagaaactattagagaaagagaggcgaccttagagaaattacactctaaaaataacgaattgataaagcaaatatctgacttgaactgtgacatttctaaggaacagagctcccagtctttaatcaaagaatctaaattgaagttggaaaacgaaataaagagattaaaagatgtcataaactccaaggaggaagaaataaaatctttcaacgataagttaagttccagtgaagaagatcttgacataaaattggtcactttagagaaaaattgtaacattgcgatgagtagattacaatcccttgtaacagaaaattctgatttgcgttctaaaaatgagaatttcaagaaagaaaaggcagcattgaataaccagttgaaaaataaggaaagtgaattattaaagatgaaagaaaaaatagataatcacaaaaaagagcttgctactttttccaagcaaagagatgacgcagttagcgaacatggtaaaattactgctgaattgaaagagacaagaatccaacttaccgagtataaatctaactatcaaaagattaaagaagaatattccaacttccaaagagaaacgaaggaacaggagcaaaagaaaagaaatagcttagttgagtctttgaacgatagtaaaattaaagaattggaagctagattgtctcaggaaatatccttaaatcaatacttaaacaaaagaatatctggaaattctgtagaaacgaatatttcttctactagacgttccacatcttattctgatgatccacttgacaaagaagatataataaaaaaatactatgaccttcaattagcgtttactgaaataactaggaatttggagaatgaaattgaagagaagaagaacttaatttctagattgagattcactgaaacaagattagcatcttcttcttttgaggaccaaaagattaaggcacaaatgaagaaattaaaaaaattgatccaggatatggaccctagtattcctttggacagtattttgaatgagccgttagataactgccctgacaaagagtctgatattaacaaattaatgcttgaggtcgattatttaaaaagacaattggatatcgaaacaagagctcactacgatgcagaaaatgccatatctgctttacacagtaaatttagaaagatccaaggggaaagctccttatcttcttctgatatttacaaattgaagttcgaagccagtgaagaaagagtcaaatccttggaagacaagttgaaaaccatgcctttacgtgatagaacaaatttacctgtcggagatattataaagaaccgtgatagcatttccaaatatgaagaagaaattcgctattataaacttgaaaactacaagctccaagaaatattaaatgaaagtaatggaaaattgagccaactcactcttgacttgaggcaaagtaaatccaaagaagccttacttagtgaacaattagacagattacagaaagaccttgaatctacggaacgccaaaaagaattattatcttccacaataaaacagcagaaacagcaatttgaaaactgcatggacgatttgcaagggaatgaattaaggttaagagaacatattcatgcattgaaacaagctgaagaggacgtaaagaatatggcgtctatcattgaaaaattgaaaactcaaaataagcaaaaggaaaagttaatctgggagcgcgaaatggaaagaaatgacagtgatatgcaattacaggaaactttattggagttgaagagagtccaagatgtaaagaaaatcttaagtgatgatttggcccatttaaaggagagattgagcgctgtagaagatagatcccaatatacggatgagattaatagattaaaggaagaattgaactgctctttaaaagctgaaacaaacttaaaaaaagaatttgcaacccttaagtacaaattagaaacttctactaatgattctgaagcaaaaatctccgatttattgaagcagctcgatcattatacaaaagtggtggaaatgttgaacaacgaaaaagatgctatttctcttgcagaaaaagaactttatcagaaatacgaggcactcaatactgaatgcgagtctcttaaaggaaagatagtgtctttgactaaaatcaagcaggaattggaatctgacttaaatcaaaagactgatgcgttgcagataagcaacgcagcactctccagttccacacaaaagaataaagagattactgaaaaaatcaaatatttggaggaaacattacaattacaaatggaacaaaattctaggaatggggagttggttaagacattacaggccagctgcaatggatataaagataagtttgatgatgagaagcagaagaatattgatttatatgaagaaaatcaaactttacaaaagctcaacaccgacttacagcttcaattgaaaaatttgcatgaaagattaagtgacactactgaaaaaaacgcatggttatccaagattcatgaattggaaaatatggtaagcttggaaacggacttgaaatatgaagaaatgaaaaagaacaagagtttggagagagcagtggaagagttacaaactaagaactcccaacaaacagatgtaatagaattggcgaataaaaatagaagcgaatttgaggaagctactttgaaatatgaggctcaaatctctgacttagaaaagtacatttctcaacaagagcttgagatgaaaaaatccattagagataattcttcttaccgcgacaaagtgcaggaaatggcccaagaaattgaattctggaaaagccgttatgaatctaccatgataggctctaaaaatattgatagtaacaatgcacagagtaaaattttcagttga

SEQ ID NO: 4873 - DNA, 1449 bp, Saccharomyces cerevisiae
atgctaaggaacggcgttcagaggttgtactctaacatcgctagaaccgataattttaagctttcgtcactagcgaatggactgaaagtggcgacatcaaatactcctggacactttagtgccttaggcctatacatcgacgcaggatcacggtttgaaggtaggaatttgaagggttgtacacatatcttggatagactagcattcaaatcaaccgaacacgtcgagggccgagcaatggcagagacgttggagttactgggtgggaattaccagtgtacctcgtctagagaaaatttgatgtatcaggcttctgtgttcaaccaggatgtgggtaaaatgcttcaattaatgtcagaaactgtgaggttccctaagattactgagcaagaactgcaagaacagaagctgtcggcagagtatgaaatcgatgaagtttggatgaagccagaattggtattacctgagctgttgcacacagcagcatactccggagaaactttggggtcccctttaatctgccctagagagctcattccttctatttctaaatactacttattggactacagaaataaattctacaccccagaaaatactgttgcggcatttgttggtgttcctcacgaaaaggcattagagcttacagaaaagtatctcggtgactggcaatctacacaccctccgatcaccaaaaaagttgcccaatatacgggcggggaaagttgtattccaccagcaccagtgtttgggaatttaccagaattattccacatccagatcggatttgaaggtctccctatagatcatccagacatttatgctttagcaacattacaaactttacttggaggtggtggttctttcagtgctggtgggccaggaaaggggatgtattctcgtttgtatacccacgttttgaaccagtattactttgttgaaaattgtgttgcgttcaaccattcttattcggattctggtattttcggtatttcattatcttgtataccgcaggcagctcctcaagcggttgaggtaattgcacagcaaatgtataatacatttgctaataaggatttgaggttaactgaagacgaagtctccagggccaagaatcagttgaagtcttcactactaatgaacctagagtctaaactggtagaattggaagatatgggcagacaagttctcatgcatggtcgcaaaatcccagtcaacgaaatgataagtaagatcgaagatttgaagccagatgatatctcacgtgttgccgaaatgatatttacgggaaatgtaaataatgctggcaatggtaagggtagagctactgttgtaatgcaaggagacagaggatcctttggagatgtggaaaatgtactgaaggcatatggattgggtaacagctcctcctccaaaaacgatagtcccaagaagaagggttggttttga

SEQ ID NO: 4874 - DNA, 1449 bp, Artificial Sequence
  Description of Artificial Sequence: Synthetic polynucleotide
atgttaaggaacggcgttcagaggttgtactctaacatcgctagaaccgataattttaagctttcttctttagcgaatggattgaaagtggcgacaagtaatactcctggacactttagtgccttaggcctttacatcgacgcaggaagtagatttgaaggtaggaatttgaagggttgtacacatatcttggatagattagcattcaaatctaccgaacacgtcgagggcagagcaatggcagagacgttggagttattgggtgggaattaccagtgtacctcttctagagaaaatttgatgtatcaggcttctgtgttcaaccaggatgtgggtaaaatgcttcaattaatgtctgaaactgtgaggttccctaagattactgagcaagaattacaagaacagaagctttctgcagagtatgaaatcgatgaagtttggatgaagccagaattggtattacctgagttattgcacacagcagcatactccggagaaactttggggtcccctttaatctgccctagagagctcattccttctatttctaaatactacttattggactacagaaataaattctacaccccagaaaatactgttgcggcatttgttggtgttcctcacgaaaaggcattagagcttacagaaaagtatctcggtgactggcaatctacacaccctccgatcaccaaaaaagttgcccaatatacgggcggggaaagttgtattccaccagcaccagtgtttgggaatttaccagaattattccacatccagatcggatttgaaggtctccctatagatcatccagacatttatgctttagcaacattacaaactttacttggaggtggtggttctttcagtgctggtgggccaggaaaggggatgtattctcgtttgtatacccacgttttgaaccagtattactttgttgaaaattgtgttgcgttcaaccattcttattctgattctggtattttcggtatttctttatcttgtataccgcaggcagctcctcaagcggttgaggtaattgcacagcaaatgtataatacatttgctaataaggatttgaggttaactgaagacgaagtctccagggccaagaatcagttgaagtcttctttattgatgaacttggagtctaaattagtagaattggaagatatgggcagacaagttctcatgcatggtcgcaaaatcccagtcaacgaaatgataagtaagatcgaagatttgaagccagatgatatctctcgtgttgccgaaatgatatttacgggaaatgtaaataatgctggcaatggtaagggtagagctactgttgtaatgcaaggagacagaggatcctttggagatgtggaaaatgtattgaaggcatatggattgggtaacagctcctcctccaaaaacgatagtcccaagaagaagggttggttttga

SEQ ID NO: 4875 - DNA, 1074 bp, Saccharomyces cerevisiae
atggttcgtgccttcaaaattaaagttccagcttcttccgccaatatcggccctggttatgatgttcttggtgtcggtctttctctattcttggagttagatgtcaccatcgactccagccaagctcaggaaacaaacgacgatcccaacaactgcaagctgtcttacactaaagaaagtgaaggctattctacggtcccattgcgttctgatgctaacctgattaccaggactgcgttatatgtgttgcgttgcaacaatattagaaacttcccctccggaaccaaagttcacgtctccaacccaatcccacttggccgtggattgggttcctctggtgcagcagttgtggcaggtgttattttaggtaacgaagtggcccaattgggtttctctaagcaacgtatgttggactactgtttgatgattgaacgtcatccagacaacataaccgctgctatgatgggaggcttttgcggttcattcctaagggacttgaccccacaagaggtggaaagacgtgagattccattggctgaggtgcttccagaaccttctggtggtgaagataccggtctggttcccccattacctcccaccgatatcggtagacatgtcaaataccaatggaaccccgccattaaatgtattgcgatcatcccacagttcgagttgtccaccgccgactccagaggcgttcttccaaaagcctacccaacccaggacttggttttcaatctacaaagattggccgtcttgaccacagctttgaccatggacccacctaatgccgacttaatctaccctgctatgcaagatcgtgtccaccaaccttatagaaagacattgatcccaggtctcacggaaatcttatcatgtgtcaccccatccacataccctggcctattgggtatctgcttgtcaggtgcaggcccaactatcttggctttggccactgagaatttcgaagaaatctctcaagaaattatcaacaggttcgccaaaaacggcatcaagtgctcctggaaactactggagcctgcctacgatggtgctagcgtcgaacagcaatga

SEQ ID NO: 4876 - DNA, 1074 bp, Artificial Sequence
  Description of Artificial Sequence: Synthetic polynucleotide
atggttcgtgccttcaaaattaaagttccagcttcttccgccaatatcggccctggttatgatgttcttggtgtcggtctttctttattcttggagttagatgtcaccatcgactccagccaagctcaggaaacaaacgacgatcccaacaactgcaagttatcttacactaaagaaagtgaaggctattctacggtcccattgcgttctgatgctaacttgattaccaggactgcgttatatgtgttgcgttgcaacaatattagaaacttcccctccggaaccaaagttcacgtctccaacccaatcccacttggccgtggattgggttcctctggtgcagcagttgtggcaggtgttattttaggtaacgaagtggcccaattgggtttctctaagcaacgtatgttggactactgtttgatgattgaacgtcatccagacaacataaccgctgctatgatgggaggcttttgcggttctttcttgagggacttgaccccacaagaggtggaaagacgtgagattccattggctgaggtgcttccagaaccttctggtggtgaagataccggtttagttcccccattacctcccaccgatatcggtagacatgtcaaataccaatggaaccccgccattaaatgtattgcgatcatcccacagttcgagttgtccaccgccgactccagaggcgttcttccaaaagcctacccaacccaggacttggttttcaatttacaaagattggccgtcttgaccacagctttgaccatggacccacctaatgccgacttaatctaccctgctatgcaagatcgtgtccaccaaccttatagaaagacattgatcccaggtctcacggaaatcttaagttgtgtcaccccatccacataccctggccttttgggtatctgcttgtctggtgcaggcccaactatcttggctttggccactgagaatttcgaagaaatctctcaagaaattatcaacaggttcgccaaaaacggcatcaagtgctcctggaaattattggagcctgcctacgatggtgctagcgtcgaacagcaatga

SEQ ID NO: 4877 - DNA, 642 bp, Saccharomyces cerevisiae
atgaacaaggaatctaaagatgatgatatgtccttggggaagttttccttctcccacttcctatattacttggtgctaatagtagtaatagtgtacggtttgtacaagcttttcactggacatggatccgacattaatttcgggaagttcttgttaaggacatccccttatatgtgggccaatcttggtattgccctttgtgtaggcttaagtgtcgtgggggcagcatggggtattttcattactggttcatccatgattggtgccggtgtgcgtgctccaaggattaccaccaagaatttaatttccattattttctgtgaagtggttgccatttacggtctgattattgccattgtcttttcttcgaaattgactgtggctactgctgagaacatgtactcgaaatcaaacctgtacactggttattctcttttctgggcaggtatcactgtcggtgcttccaatttgatttgtggtatcgctgtcggtatcaccggtgcgactgctgccatttccgatgctgctgattccgcattgtttgttaaaattttggtcattgaaattttcgggtccattttaggtttattaggtttgattgttggtttattgatggccggtaaagcttctgaatttcagtaa

SEQ ID NO: 4878 - DNA, 642 bp, Artificial Sequence
  Description of Artificial Sequence: Synthetic polynucleotide
atgaacaaggaatctaaagatgatgatatgtccttggggaagttttccttctcccacttcctctattacttggtgttgatagtagtaatagtgtacggtttgtacaagcttttcactggacatggatccgacattaatttcgggaagttcttgttaaggacatccccttatatgtgggccaatcttggtattgccctttgtgtaggcttaagtgtcgtgggggcagcatggggtattttcattactggttcttccatgattggtgccggtgtgcgtgctccaaggattaccaccaagaatttaatttccattattttctgtgaagtggttgccatttacggtttgattattgccattgtcttttcttctaaattgactgtggctactgctgagaacatgtactctaaaagtaacctttacactggttattctcttttctgggcaggtatcactgtcggtgcttccaatttgatttgtggtatcgctgtcggtatcaccggtgcgactgctgccatttccgatgctgctgattccgcattgtttgttaaaattttggtcattgaaattttcgggtccattttaggtttattaggtttgattgttggtttattgatggccggtaaagcttctgaatttcagtga

SEQ ID NO: 4879 - DNA, 2982 bp, Saccharomyces cerevisiae
atggtagacgaaagtgataagaaacaacagactattgatgaacaatcgcagataagtcctgaaaagcagacaccaaataagaaggataaaaaaaaggaggaagaggagcagctatccgaagaagatgcaaagcttaaaacagatttagagctattggttgaaaggctgaaagaagacgattcatctttatatgaagcgtctttgaatgccttaaaggaatcgatcaaaaattctacgagttctatgaccgccgttcccaaacctttgaaattccttcgtccgacatatccagacctatgttctatctacgacaaatggacagatccaaacttgaaatcctctttagcggatgtcttgtccattttagccatgacatactctgaaaatggtaaacacgattcattgagatatagattactctccgacgtttctgattttgaagggtggggacatgagtacatccgtcatttagctttggagatcggtgaagtatataatgatcaagtggaaaaagatgctgaagatgaaacatcatctgatggatctaaaagcgatggatctgcggctacttccgggttcgaattttccaaggaagatactcttcgtctatgtttagacattgtcccatactttttgaaacacaacggtgaagaagacgcggtagatttgcttttggaaattgaatctattgacaagctacctcaatttgtcgatgagaataccttccaaagagtttgtcaatatatggttgcatgtgttccacttttgccacctcctgaagacgttgcctttttaaaaaccgcatattctatttatctatctcagaacgaacttacagatgcaattgctttggcagttagactaggggaagaggatatgatcagatccgttttcgatgctactagcgatccagtgatgcataaacaattagcatatattttagccgcacaaaagacatcgtttgagtatgaaggtgttcaggatataattggaaatggtaaattgtctgaacactttttatatcttgctaaagaattgaatctaactgggccaaaagtcccagaagacatttataagagccatttggataactctaaatctgtgttctcaagcgccggcctagattctgctcaacaaaatctagcttcgtcatttgtcaacgggttcttaaacttaggttattgtaacgataaattaattgtggataatgataattgggtatataaaaccaaaggtgacggtatgacttccgcggtagctagtattggatctatataccagtggaatctcgatggtttgcaacaactggataagtatctctacgttgatgagccagaagttaaagctggtgcattattaggtattggtatttccgcttccggtgtgcatgatggtgaagttgaaccagctttgttacttttgcaagattatgttactaacccagacactaaaattagttcagcagctattcttggcctgggtattgcatttgctggtagcaagaatgacgaagtgttgggtttgttattaccaattgccgcatccactgacttgcctattgaaactgcagctatggcttccttagctttggctcatgttttcgttggtacttgtaatggtgacattacaacttctatcatggacaactttttagagcgtacagccatcgagttgaagaccgactgggtaaggtttttggcacttgctttaggtattctatacatgggccaaggtgaacaggtggatgatgttttagaaactattagtgctattgaacatccaatgacatcagctattgaagtattagttggttcatgtgcttatactggtacgggtgatgttttgttaattcaagatttgttacatcgtttgacccctaaaaacgtaaaaggtgaagaagatgcagatgaagaagaaactgccgaaggacagactaatagcataagtgactttttgggtgagcaagtgaatgaacctaccaagaacgaggaagctgagatcgaagtggacgaaatggaggttgatgccgaaggagaggaagttgaagttaaagcagaaataacagagaagaagaatggtgagagtttagaaggtgaagagataaaatccgaagaaaagaagggaaaatcttccgataaggatgctactacggacgggaaaaatgatgatgaggaggaagaaaaagaagcaggcatagtcgatgaacttgcttatgcagttttgggtattgctttgattgcccttggtgaagatattggcaaggaaatgtctttacgtcattttggtcatttaatgcattatggtaatgaacacatccgtcgtatggttcctttagcgatgggtattgtttccgtttctgatccacaaatgaaggtgttcgataccttaactcgtttttcacatgacgccgatttagaagtttcaatgaattcaattttcgctatgggtctatgtggtgctggtactaacaatgcaaggttagctcaactattaagacagttggcaagttattattcacgtgaacaagacgctttgtttatcaccagattagcacaagggttattgcatcttggtaaaggtactatgacaatggatgtgttcaatgatgcacatgttttgaataaggtgacattagcatcaatattaactaccgcagttggtttagtatcgccaagtttcatgttgaagcatcatcaattgttctacatgttgaatgccggtataaggccaaagtttattctagcattaaacgatgagggagagccaataaaggttaatgtgcgcgttggtcaagcagtggaaactgtcggccaagcaggcagaccaaaaaagattactggctggattacgcaatccactcctgttttactaaatcatggcgaaagagcagaactagaaactgatgaatatattagttacacaagccatattgagggcgtagtaattttaaagaagaaccctgactatcgtgaagaggagtaa

SEQ ID NO: 4880 - DNA, 2982 bp, Artificial Sequence
  Description of Artificial Sequence: Synthetic polynucleotide
atggtagacgaaagtgataagaaacaacagactattgatgaacaatctcagataagtcctgaaaagcagacaccaaataagaaggataaaaaaaaggaggaagaggagcagttgtccgaagaagatgcaaagcttaaaacagatttagagttattggttgaaaggttgaaagaagacgattcttctttatatgaagcgtctttgaatgccttaaaggaaagtatcaaaaattctacgagttctatgaccgccgttcccaaacctttgaaattccttcgtccgacatatccagacttatgttctatctacgacaaatggacagatccaaacttgaaatcctctttagcggatgtcttgtccattttagccatgacatactctgaaaatggtaaacacgattctttgagatatagattactctccgacgtttctgattttgaagggtggggacatgagtacatccgtcatttagctttggagatcggtgaagtatataatgatcaagtggaaaaagatgctgaagatgaaacatcttctgatggatctaaaagcgatggatctgcggctacttccgggttcgaattttccaaggaagatactcttcgtctttgtttagacattgtcccatactttttgaaacacaacggtgaagaagacgcggtagatttgcttttggaaattgaatctattgacaagttacctcaatttgtcgatgagaataccttccaaagagtttgtcaatatatggttgcatgtgttccacttttgccacctcctgaagacgttgcctttttaaaaaccgcatattctatttatttatctcagaacgaacttacagatgcaattgctttggcagttagattaggggaagaggatatgatcagatccgttttcgatgctactagcgatccagtgatgcataaacaattagcatatattttagccgcacaaaagacatcttttgagtatgaaggtgttcaggatataattggaaatggtaaattgtctgaacactttttatatcttgctaaagaattgaatttaactgggccaaaagtcccagaagacatttataagagccatttggataactctaaatctgtgttcagtagcgccggcttggattctgctcaacaaaatttggcttcttcttttgtcaacgggttcttaaacttaggttattgtaacgataaattaattgtggataatgataattgggtatataaaaccaaaggtgacggtatgacttccgcggtagctagtattggatctatataccagtggaatctcgatggtttgcaacaattggataagtatctctacgttgatgagccagaagttaaagctggtgcattattaggtattggtatttccgcttccggtgtgcatgatggtgaagttgaaccagctttgttacttttgcaagattatgttactaacccagacactaaaattagttctgcagctattcttggcttgggtattgcatttgctggtagcaagaatgacgaagtgttgggtttgttattaccaattgccgcatccactgacttgcctattgaaactgcagctatggcttccttagctttggctcatgttttcgttggtacttgtaatggtgacattacaacttctatcatggacaactttttagagcgtacagccatcgagttgaagaccgactgggtaaggtttttggcacttgctttaggtattttatacatgggccaaggtgaacaggtggatgatgttttagaaactattagtgctattgaacatccaatgacatctgctattgaagtattagttggttcttgtgcttatactggtacgggtgatgttttgttaattcaagatttgttacatcgtttgacccctaaaaacgtaaaaggtgaagaagatgcagatgaagaagaaactgccgaaggacagactaatagcataagtgactttttgggtgagcaagtgaatgaacctaccaagaacgaggaagctgagatcgaagtggacgaaatggaggttgatgccgaaggagaggaagttgaagttaaagcagaaataacagagaagaagaatggtgagagtttagaaggtgaagagataaaatccgaagaaaagaagggaaaatcttccgataaggatgctactacggacgggaaaaatgatgatgaggaggaagaaaaagaagcaggcatagtcgatgaacttgcttatgcagttttgggtattgctttgattgcccttggtgaagatattggcaaggaaatgtctttacgtcattttggtcatttaatgcattatggtaatgaacacatccgtcgtatggttcctttagcgatgggtattgtttccgtttctgatccacaaatgaaggtgttcgataccttaactcgtttttctcatgacgccgatttagaagtttctatgaattctattttcgctatgggtttgtgtggtgctggtactaacaatgcaaggttagctcaattattaagacagttggcaagttattattctcgtgaacaagacgctttgtttatcaccagattagcacaagggttattgcatcttggtaaaggtactatgacaatggatgtgttcaatgatgcacatgttttgaataaggtgacattagcatctatattaactaccgcagttggtttagtatctccaagtttcatgttgaagcatcatcaattgttctacatgttgaatgccggtataaggccaaagtttattttggcattaaacgatgagggagagccaataaaggttaatgtgcgcgttggtcaagcagtggaaactgtcggccaagcaggcagaccaaaaaagattactggctggattacgcaatccactcctgttttattgaatcatggcgaaagagcagaattggaaactgatgaatatattagttacacaagccatattgagggcgtagtaattttaaagaagaaccctgactatcgtgaagaggagtga

SEQ ID NO: 4881 - DNA, 2457 bp, Saccharomyces cerevisiae
atggaaggtggcgaagaagaagttgagcgcattcctgatgaacttttcgatacaaaaaagaagcatttgttagataagctcataagggtcggaataatccttgtactcctgatatggggcactgttttgttgctaaaaagtatacctcaccattcaaacacaccagattatcaagaacccaactctaattacaccaatgatgggaaattaaaggtgtcgttttctgttgtaagaaacaatacatttcaacccaaatatcacgagctgcaatggattagtgacaataaaattgaaagcaacgatctaggtctttatgttacatttatgaacgatagttacgttgttaaatctgtctacgatgactcatataatagcgttttattagagggaaaaactttcattcataacggtcaaaacctcactgtggagtcaataactgcgtctcccgacctgaagcggttattaattagaacaaatagcgtacaaaattggagacactcaacgtttggttcttattttgtctacgataagagtagctcgtcctttgaggagattggaaacgaggtggctctagcaatatggtcccctaattctaatgatattgcatacgtccaagataacaatatatatatttattctgctatttccaaaaagaccatacgggctgtgaccaacgacggaagctcctttctttttaacggtaagccagattgggtttacgaggaagaagtttttgaagacgacaaggctgcgtggtggtcaccaactggtgattacctggcattcttgaaaattgatgaatcagaagttggtgagtttatcattccatattatgtccaagatgaaaaggatatataccccgaaatgcgcagtatcaagtatccaaaaagtggcacgccaaatcctcatgcagagctatgggtttacagtatgaaagatggaacatcgttccatccaagaataagtggaaataaaaaagatggaagtctgttaattactgaagttacatgggtaggaaatggaaacgttttagttaaaactaccgatcgatcctcggacatattgactgtgtttttgatagatacaattgcaaagacttcaaacgtggtaaggaacgaaagttctaacggaggatggtgggagattactcataatactctgtttattccggcaaatgaaacatttgataggcctcataatggttatgttgatattcttccgattggtggttacaatcatttggcttatttcgaaaatagtaatagttcacactataaaacattgacagaggggaaatgggaagtggtgaatggcccacttgcctttgattcaatggaaaatcgtctttacttcatttctacacgaaagagttcaaccgaacgccacgtttactacatagatttacggtcaccaaatgaaattattgaagttactgatacttctgaggatggtgtctatgatgtgtccttttcttctggtagaaggtttggtttactcacctataaaggaccaaaagttccatatcaaaaaattgtggacttccattctcgtaaagcagaaaaatgcgacaaaggtaatgttttaggcaaatcactataccatttggaaaagaacgaagtacttaccaaaattttagaagattatgcggtacccagaaaatcattcagggaattgaacctaggaaaggacgaatttggaaaggatatactagtgaactcgtatgaaatcctaccaaatgatttcgatgaaacgttaagtgaccactatcctgtatttttctttgcatatgggggaccgaattctcaacaagttgtcaaaacgttttccgtaggatttaatgaagtggtagcttcacaattaaacgcaattgtagttgttgttgacggtcgtggtactggcttcaaaggtcaagactttagatcccttgttcgcgataggctcggtgattacgaggcccgcgaccaaatatctgcggcttccttatatggttctttaacttttgttgatccgcaaaagatttccttatttggttggtcatacggggggtacctgacactaaaaactttggagaaagatggcggaagacatttcaaatacgggatgtcagttgcgccagtaaccgactggagattttacgattctgtttatactgagaggtacatgcatactcctcaagaaaactttgatggatacgtagaatcaagcgttcataatgtcactgctttggcacaagcaaatagatttttgttgatgcacggaacaggagatgataacgttcactttcaaaattccctaaagtttctggaccttttggatctaaatggtgtggaaaattatgacgtccacgtctttcctgactcagatcatagtataagataccataatgcgaatgtaatcgtttttgacaagctattggattgggcaaagcgtgctttcgatgggcaatttgtcaaatga

SEQ ID NO: 4882 - DNA, 2457 bp, Artificial Sequence
  Description of Artificial Sequence: Synthetic polynucleotide
atggaaggtggcgaagaagaagttgagcgcattcctgatgaacttttcgatacaaaaaagaagcatttgttagataagctcataagggtcggaataatccttgtactcttaatatggggcactgttttgttgttgaaaagtatacctcaccattccaacacaccagattatcaagaacccaactctaattacaccaatgatgggaaattaaaggtgtccttttctgttgtaagaaacaatacatttcaacccaaatatcacgagttacaatggattagtgacaataaaattgaaagcaacgatttaggtctttatgttacatttatgaacgatagttacgttgttaaatctgtctacgatgactcttataatagcgttttattagagggaaaaactttcattcataacggtcaaaacctcactgtggagagtataactgcgtctcccgacttgaagagattattaattagaacaaatagcgtacaaaattggagacactccacgtttggttcttattttgtctacgataagagtagctcttcctttgaggagattggaaacgaggtggctttggcaatatggtcccctaattctaatgatattgcatacgtccaagataacaatatatatatttattctgctatttccaaaaagaccataagagctgtgaccaacgacggaagctcctttctttttaacggtaagccagattgggtttacgaggaagaagtttttgaagacgacaaggctgcgtggtggtctccaactggtgattacttggcattcttgaaaattgatgaaagtgaagttggtgagtttatcattccatattatgtccaagatgaaaaggatatataccccgaaatgcgcagtatcaagtatccaaaaagtggcacgccaaatcctcatgcagagttatgggtttacagtatgaaagatggaacatctttccatccaagaataagtggaaataaaaaagatggaagtttgttaattactgaagttacatgggtaggaaatggaaacgttttagttaaaactaccgatagatccagtgacatattgactgtgtttttgatagatacaattgcaaagacttctaacgtggtaaggaacgaaagttctaacggaggatggtgggagattactcataatactttatttattccggcaaatgaaacatttgataggcctcataatggttatgttgatattcttccgattggtggttacaatcatttggcttatttcgaaaatagtaatagttctcactataaaacattgacagaggggaaatgggaagtggtgaatggcccacttgcctttgattctatggaaaatcgtctttacttcatttctacaagaaagagttctaccgaacgccacgtttactacatagatttaagatctccaaatgaaattattgaagttactgatacttctgaggatggtgtctatgatgtgtccttttcttctggtagaaggtttggtttactcacctataaaggaccaaaagttccatatcaaaaaattgtggacttccattctcgtaaagcagaaaaatgcgacaaaggtaatgttttaggcaaatctttgtaccatttggaaaagaacgaagtacttaccaaaattttagaagattatgcggtacccagaaaatctttcagggaattgaacttgggaaaggacgaatttggaaaggatatattggtgaacagttatgaaatcttgccaaatgatttcgatgaaacgttaagtgaccactatcctgtatttttctttgcatatgggggaccgaattctcaacaagttgtcaaaacgttttccgtaggatttaatgaagtggtagcttctcaattaaacgcaattgtagttgttgttgacggtcgtggtactggcttcaaaggtcaagactttagatcccttgttcgcgataggctcggtgattacgaggcccgcgaccaaatatctgcggcttccttatatggttctttaacttttgttgatccgcaaaagatttccttatttggttggagttacggggggtacttgacattaaaaactttggagaaagatggcggaagacatttcaaatacgggatgtctgttgcgccagtaaccgactggagattttacgattctgtttatactgagaggtacatgcatactcctcaagaaaactttgatggatacgtagaaagtagcgttcataatgtcactgctttggcacaagcaaatagatttttgttgatgcacggaacaggagatgataacgttcactttcaaaattccttgaagtttttggaccttttggatttgaatggtgtggaaaattatgacgtccacgtctttcctgacagtgatcatagtataagataccataatgcgaatgtaatcgtttttgacaagttgttggattgggcaaagcgtgctttcgatgggcaatttgtcaaatga

SEQ ID NO: 4883 - DNA, 885 bp, Saccharomyces cerevisiae
atgactttaatggtacctttcaaacaagttgatgtattcactgagaagccctttatgggaaatccagtagcagtaataaacttcttggaaattgatgaaaatgaagtcagtcaagaagaattgcaggcaattgccaactggacaaacttatcagaaacaacgtttttatttaaaccatctgataaaaagtatgattacaagttgaggatctttactccaagaagtgaattgccatttgctggtcacccaaccattggttcatgtaaggctttccttgagttcaccaaaaacaccactgcgacttctctcgtccaggaatgtaaaataggcgctgttccaataacaattaatgagggactaattagcttcaaagctccgatggctgattacgaaagtatatcgagtgagatgattgctgattatgaaaaagcgattggtttgaaattcataaagcctcctgctcttttacatactgggccagagtggatcgtggcgctagtagaagatgcagaaacttgcttcaatgcaaacccaaattttgctatgcttgcacaccagacaaaacagaatgaccatgtgggaattatcctagcgggccctaaaaaggaagccgccatcaaaaactcctacgaaatgagggcgtttgctccggtgataaacgtttatgaagatcctgtttgtggtagtggttctgtagcccttgcaagatatttgcaagaagtttataagtttgagaaaaccacggatattaccatttctgagggtggaaggttaaaaagaaatggcctaatgttagcttcaattaagaaagaagctgataatagcacttcctactatatagcaggtcatgccactaccgttattgatggtaagatcaaagtttag

SEQ ID NO: 4884 - DNA, 885 bp, Artificial Sequence
  Description of Artificial Sequence: Synthetic polynucleotide
atgactttaatggtacctttcaaacaagttgatgtattcactgagaagccctttatgggaaatccagtagcagtaataaacttcttggaaattgatgaaaatgaagtcagtcaagaagaattgcaggcaattgccaactggacaaacttatctgaaacaacgtttttatttaaaccatctgataaaaagtatgattacaagttgaggatctttactccaagaagtgaattgccatttgctggtcacccaaccattggttcttgtaaggctttccttgagttcaccaaaaacaccactgcgacttctctcgtccaggaatgtaaaataggcgctgttccaataacaattaatgagggattgattagcttcaaagctccgatggctgattacgaaagtatatctagtgagatgattgctgattatgaaaaagcgattggtttgaaattcataaagcctcctgctcttttacatactgggccagagtggatcgtggcgttggtagaagatgcagaaacttgcttcaatgcaaacccaaattttgctatgcttgcacaccagacaaaacagaatgaccatgtgggaattatcttagcgggccctaaaaaggaagccgccatcaaaaactcctacgaaatgagggcgtttgctccggtgataaacgtttatgaagatcctgtttgtggtagtggttctgtagcccttgcaagatatttgcaagaagtttataagtttgagaaaaccacggatattaccatttctgagggtggaaggttaaaaagaaatggcttaatgttagcttccattaagaaagaagctgataatagcacttcctactatatagcaggtcatgccactaccgttattgatggtaagatcaaagtttga

SEQ ID NO: 4885 - DNA, 1455 bp, Saccharomyces cerevisiae
atggctgataagatagagaggcatactttcaaggtcttcaatcaagatttcagtgtagataagaggtttcaacttatcaaagaaatagggcatggagcatacggcatagtgtgttcagcgcggtttgcagaagctgccgaagataccacagttgccatcaagaaagtgacaaacgttttttcgaagaccttactatgtaaaagatccctacgtgagctaaagcttttgagacatttcagaggccacaaaaatattacatgtctttatgatatggatattgttttttatccagacgggtctatcaatggactatatctttatgaggaacttatggaatgtgatatgcaccaaatcatcaaatccggtcaacctttgacggatgctcactatcaaagtttcacataccaaatattatgtggtttaaagtatattcattctgcagatgtcttgcatcgtgatttgaagcccggcaatttgcttgtcaatgcagattgtcaattgaaaatctgtgattttgggttagctagaggttattcggagaatcctgtcgaaaacagtcaatttttgacggagtacgtggccactagatggtatagagctccggaaataatgttgagttaccaaggatataccaaggcgattgacgtatggtcagctggctgtattttagcggagtttcttggtggaaagccaatcttcaaaggaaaggattacgttaatcaattgaatcaaatattacaagttttagggacacccccagacgaaactttaagaaggattggttctaaaaatgttcaggactacatacatcaattaggtttcattccaaaagtaccttttgtcaatttatacccaaatgccaattcacaagcattagacttattggagcaaatgctcgcgtttgaccctcaaaagagaattaccgtggatgaggccctggagcatccttacttgtctatatggcatgatccagctgacgaacctgtgtgtagtgaaaaattcgaatttagttttgaatcggttaatgatatggaggacttaaaacaaatggttatacaagaagtgcaagatttcaggctgtttgtgagacaaccgctattagaagagcaaaggcaattacaattacagcagcagcaacagcagcagcaacagcaacagcaacagcaacagcagccttcagatgtggataatggcaacgccgcagcgagtgaagaaaattatccaaaacagatggccacgtctaattctgttgcgccacaacaagaatcatttggtattcactcccaaaatttgccaaggcatgatgcagatttcccacctcgacctcaagagagtatgatggagatgagacctgccactggaaataccgcagatattccgcctcagaatgataacggcacgcttctagaccttgaaaaagagctggagtttggattagatagaaaatatttttag

SEQ ID NO: 4886 - DNA, 1455 bp, Artificial Sequence
  Description of Artificial Sequence: Synthetic polynucleotide
atggctgataagatagagaggcatactttcaaggtcttcaatcaagatttcagtgtagataagaggtttcaacttatcaaagaaatagggcatggagcatacggcatagtgtgttctgcgaggtttgcagaagctgccgaagataccacagttgccatcaagaaagtgacaaacgttttttccaagaccttattatgtaaaagatccttacgtgagttgaagcttttgagacatttcagaggccacaaaaatattacatgtctttatgatatggatattgttttttatccagacgggtctatcaatggattgtatctttatgaggaacttatggaatgtgatatgcaccaaatcatcaaatccggtcaacctttgacggatgctcactatcaaagtttcacataccaaatattatgtggtttaaagtatattcattctgcagatgtcttgcatcgtgatttgaagcccggcaatttgcttgtcaatgcagattgtcaattgaaaatctgtgattttgggttagctagaggttattctgagaatcctgtcgaaaacagtcaatttttgacggagtacgtggccactagatggtatagagctccggaaataatgttgagttaccaaggatataccaaggcgattgacgtatggagtgctggctgtattttagcggagtttcttggtggaaagccaatcttcaaaggaaaggattacgttaatcaattgaatcaaatattacaagttttagggacacccccagacgaaactttaagaaggattggttctaaaaatgttcaggactacatacatcaattaggtttcattccaaaagtaccttttgtcaatttatacccaaatgccaattctcaagcattagacttattggagcaaatgctcgcgtttgaccctcaaaagagaattaccgtggatgaggccttagagcatccttacttgtctatatggcatgatccagctgacgaacctgtgtgtagtgaaaaattcgaatttagttttgaatctgttaatgatatggaggacttaaaacaaatggttatacaagaagtgcaagatttcaggttatttgtgagacaaccgttgttagaagagcaaaggcaattacaattacagcagcagcaacagcagcagcaacagcaacagcaacagcaacagcagccttctgatgtggataatggcaacgccgcagcgagtgaagaaaattatccaaaacagatggccacgtctaattctgttgcgccacaacaagaaagttttggtattcactcccaaaatttgccaaggcatgatgcagatttcccacctagacctcaagagagtatgatggagatgagacctgccactggaaataccgcagatattccgcctcagaatgataacggcacgcttttggaccttgaaaaagagttagagtttggattagatagaaaatatttttga

SEQ ID NO: 4887 - DNA, 2172 bp, Saccharomyces cerevisiae
atgttcaggtcgcatgcctccggtaacaagaagcaatggtctaaaagatcctcaaatggtagcacacctgctgcttcggcatctggctctcacgcatacaggcaacaaacgttgtcttcgttctttatgggttgcggcaaaaaatctgctgctgcttcaaaaaacagcacgacaataattgatttggaaagcggtgacgaaggtaaccgtaatataacagcacctcctaggccaagattaatacggaataattcgtcttccttattctcgcagagtcaaggttcgtttggagatgatgatcccgacgcagaattcaaaaaattggtagatgtgccgagactcaatagctataaaaagtctagcagatcgctgtcgatgaccagctctcttcataagactgcctctgcgtccacgactcagaaaacataccattttgatgaggatgagactttgcgagaggttactagcgtgaaatccaattctagacaattatcgttcactagtacaattaatattgaagattctagcatgaaactttctactgattcagaaagaccagccaagaggtctaaaccttctatggagtttcaaggtttaaagctcacagtaccaaagaaaataaaaccactgctaagaaagacagtatcaaatatggactcaatgaaccaccgaagtgcgtcttcgccagtggtacttacaatggagcaagagagagtggttaatttaatcgtcaaaaaaagaacaaatgtcttttacaccggtagtgcgggtacaggtaagtcggtcattttgcaaacgatcataagacaattgagctctttgtatgggaaagaatcaattgcaattaccgcctcaactgggctagcggcagtgactattggtggttccacattgcataagtggtctggtataggaatcgggaacaaaactatcgaccaattggtgaaaaaaatacaatcacaaaaggacttattggccgcatggaggtatacaaaagttttgataattgatgaaatttctatggtcgatggtaatctgttggataaattagagcaaatcgcaaggagaattcggaagaacgacgatccctttggtggtattcaattggtcctgacaggcgatttttttcaactaccaccagttgctaagaaggacgagcataacgttgtgaaattttgttttgaaagtgaaatgtggaaacggtgcattcaaaaaacgattttactgacaaaggttttcagacaacaggataacaaactaattgatattctaaatgccataagatacggagagctgactgtcgacattgctaaaacaataaggaacctaaatagggatatagactatgccgatggaattgctcctacagaactgtatgccacaagaagagaagttgaactatccaacgtaaagaaattacagtctctacctggtgatttatatgagtttaaagctgtagataacgcgcccgagagataccaagcgatactagattcttcattaatggtggaaaaagttgtcgcattgaaggaagatgcacaggtaatgatgttgaaaaataagcctgatgtagaattagttaatggatcattgggaaaagttttgttttttgttacagaatcgctggtggtgaaaatgaaggaaatttacaagattgtggatgacgaagttgtcatggacatgagattagtgagtcgggtcattggtaatcccttgttaaaggaatcaaaggagtttcgtcaagatttgaatgccaggccattagctagattggaacgtttgaaaatcttgataaactatgcagttaagatctctccgcataaggaaaaattcccctatgtgaggtggacagtgggtaaaaacaagtacatacatgagctcatggtcccagagcgctttcccattgatattcccagagaaaatgtcgggttagaaagaactcagattccattaatgctatgctgggcactgtccattcataaggcacagggtcaaactattcaaagactaaaggtcgacttgaggagaattttcgaagccggccaagtttatgttgcactgtcaagagcggtaactatggacaccttacaggtcctaaactttgatccaggaaagattcgcaccaatgaaagagtaaaagatttctataaacgtttagaaactttgaaatga

SEQ ID NO: 4888 - DNA, 2172 bp, Artificial Sequence
  Description of Artificial Sequence: Synthetic polynucleotide
atgttcaggagccatgcctccggtaacaagaagcaatggtctaaaagatcctctaatggtagcacacctgctgcttctgcatctggctctcacgcatacaggcaacaaacgttgtcttctttctttatgggttgcggcaaaaaatctgctgctgcttccaaaaacagcacgacaataattgatttggaaagcggtgacgaaggtaaccgtaatataacagcacctcctaggccaagattaataagaaataattcttcttccttattctctcagagtcaaggttcttttggagatgatgatcccgacgcagaattcaaaaaattggtagatgtgccgagactcaatagctataaaaagtctagcagatctttatctatgaccagctctcttcataagactgcctctgcgtccacgactcagaaaacataccattttgatgaggatgagactttgagagaggttactagcgtgaaatccaattctagacaattatctttcactagtacaattaatattgaagattctagcatgaaactttctactgattctgaaagaccagccaagaggtctaaaccttctatggagtttcaaggtttaaagctcacagtaccaaagaaaataaaaccattgttaagaaagacagtatctaatatggactccatgaaccacagaagtgcgtcttctccagtggtacttacaatggagcaagagagagtggttaatttaatcgtcaaaaaaagaacaaatgtcttttacaccggtagtgcgggtacaggtaagtctgtcattttgcaaacgatcataagacaattgagctctttgtatgggaaagaaagtattgcaattaccgcctctactgggttggcggcagtgactattggtggttccacattgcataagtggtctggtataggaatcgggaacaaaactatcgaccaattggtgaaaaaaatacaatctcaaaaggacttattggccgcatggaggtatacaaaagttttgataattgatgaaatttctatggtcgatggtaatttattggataaattagagcaaatcgcaaggagaattagaaagaacgacgatccctttggtggtattcaattggtcttaacaggcgatttttttcaattaccaccagttgctaagaaggacgagcataacgttgtgaaattttgttttgaaagtgaaatgtggaaaagatgcattcaaaaaacgattttattaacaaaggttttcagacaacaggataacaaattgattgatattttgaatgccataagatacggagagttaactgtcgacattgctaaaacaataaggaacttgaatagggatatagactatgccgatggaattgctcctacagaattgtatgccacaagaagagaagttgaattatccaacgtaaagaaattacagtctttgcctggtgatttatatgagtttaaagctgtagataacgcgcccgagagataccaagcgatattggattcttctttaatggtggaaaaagttgtcgcattgaaggaagatgcacaggtaatgatgttgaaaaataagcctgatgtagaattagttaatggatctttgggaaaagttttgttttttgttacagaatctttggtggtgaaaatgaaggaaatttacaagattgtggatgacgaagttgtcatggacatgagattagtgagtagggtcattggtaatcccttgttaaaggaatccaaggagtttcgtcaagatttgaatgccaggccattagctagattggaacgtttgaaaatcttgataaactatgcagttaagatctctccgcataaggaaaaattcccctatgtgaggtggacagtgggtaaaaacaagtacatacatgagctcatggtcccagagcgctttcccattgatattcccagagaaaatgtcgggttagaaagaactcagattccattaatgttgtgctgggcattgtccattcataaggcacagggtcaaactattcaaagattaaaggtcgacttgaggagaattttcgaagccggccaagtttatgttgcattatctagagcggtaactatggacaccttacaggtcttgaactttgatccaggaaagattcgcaccaatgaaagagtaaaagatttctataaacgtttagaaactttgaaatga

SEQ ID NO: 4889 - DNA, 1746 bp, Saccharomyces cerevisiae
atgtctaaacaatttagtcataccaccaacgacagaagatcatcgattatctactccaccagtgtcgggaaggcagggcttttcacgcctgcagactacatcccacaggagtcagaagaaaacttaattgagggcgaagagcaagagggtagtgaagaagaaccttcctataccggcaatgacgatgagacggagagggaaggtgaataccattcgttgttagatgccaacaattcgcggacattgcaacaagaagcgtggcaacaaggttatgactctcacgaccgtaagcggttgcttgacgaagaacgggacctgctaatagacaacaaactgctctctcaacacggcaacggtgggggagatatagaaagtcacggacatggccaagcaattggaccggacgaggaagaaagaccagctgagattgcaaatacgtgggagagcgcgatcgagagtggtcagaaaatcagcacaacttttaagagagaaacgcaagtgatcacgatgaatgcgttgccgctaatcttcacctttatcttgcaaaattcgttgtcactagcatctattttctccgtctcacatttagggacgaaagagctaggtggtgttacactcggttctatgactgctaacatcacgggtcttgctgctattcaaggtctgtgtacatgtctggacacactgtgtgcgcaggcatacggtgccaaaaactaccacttggtgggtgtgctagtgcagagatgtgctgtgatcaccatcttggcgttcttgccaatgatgtatgtttggtttgtttggtcggaaaagatcctagcactaatgattccggagagagaactatgcgcgctagcggctaactatctacgtgtaaccgcattcggtgtgccaggattcatcctttttgaatgtggtaagaggttcctacaatgtcaaggtatattccatgcatccacaatcgtgctctttgtgtgcgcacccttgaacgcattgatgaactacttacttgtttggaatgacaagattgggattgggtaccttggtgcgccattatcggttgtgatcaactactggttgatgacgctcggattactaatatacgcaatgaccaccaagcacaaggagagaccactcaaatgctggaatggtatcatccctaaggaacaagcatttaagaactggcgtaagatgattaacctagctattcccggcgtggtgatggtggaggcagagttcctcggctttgaagtgttgacaattttcgcttcccatctgggcaccgatgccttgggcgctcagtcgattgtggctacgattgcgtctcttgcataccaagtgcctttctctatctccgtttctaccagtacacgtgtagccaattttatcggcgcgtcgctatacgacagctgcatgatcacgtgccgcgtgtccttattgttgtcctttgtgtgctcctcaatgaacatgttcgttatctgccgttataaggaacaaatcgcaagtctattttctactgagagcgctgtagtgaagatggtcgtggacacactacctcttcttgcgttcatgcaattattcgatgcctttaatgcgtccaccgccggatgcctacgtggtcaagggagacaaaaaaataggtgggtacatcaacctagtcgcattctactgcctaggtgtgcccatggcatatgtgttagcattcctgtatcatctgggtgtaggcggcttatggttgggtataactag

SEQ ID NO: 4890 - DNA, 1746 bp, Artificial Sequence
  Description of Artificial Sequence: Synthetic polynucleotide
atgtctaaacaatttagtcataccaccaacgacagaagatcttccattatctactccaccagtgtcgggaaggcagggcttttcacgcctgcagactacatcccacaggagagtgaagaaaacttaattgagggcgaagagcaagagggtagtgaagaagaaccttcctataccggcaatgacgatgagacggagagggaaggtgaataccattctttgttagatgccaacaattccaggacattgcaacaagaagcgtggcaacaaggttatgactctcacgaccgtaagagattgcttgacgaagaaagagacttattgatagacaacaaattactctctcaacacggcaacggtgggggagatatagaaagtcacggacatggccaagcaattggaccggacgaggaagaaagaccagctgagattgcaaatacgtgggagagcgcgatcgagagtggtcagaaaatcagcacaacttttaagagagaaacgcaagtgatcacgatgaatgcgttgccgttgatcttcacctttatcttgcaaaattctttgtccttggcatctattttctccgtctctcatttagggacgaaagagttaggtggtgttacactcggttctatgactgctaacatcacgggtcttgctgctattcaaggtttgtgtacatgtttggacacattatgtgcgcaggcatacggtgccaaaaactaccacttggtgggtgtgttagtgcagagatgtgctgtgatcaccatcttggcgttcttgccaatgatgtatgtttggtttgtttggtctgaaaagatcttggcattaatgattccggagagagaattgtgcgcgttagcggctaactatttacgtgtaaccgcattcggtgtgccaggattcatcctttttgaatgtggtaagaggttcttacaatgtcaaggtatattccatgcatccacaatcgtgctctttgtgtgcgcacccttgaacgcattgatgaactacttacttgtttggaatgacaagattgggattgggtaccttggtgcgccattaagtgttgtgatcaactactggttgatgacgctcggattattgatatacgcaatgaccaccaagcacaaggagagaccactcaaatgctggaatggtatcatccctaaggaacaagcatttaagaactggcgtaagatgattaacttggctattcccggcgtggtgatggtggaggcagagttcctcggctttgaagtgttgacaattttcgcttcccatttaggcaccgatgccttgggcgctcagagtattgtggctacgattgcgtctcttgcataccaagtgcctttctctatctccgtttctaccagtacacgtgtagccaattttatcggcgcgtctttgtacgacagctgcatgatcacgtgccgcgtgtccttattgttgtcctttgtgtgctcctctatgaacatgttcgttatctgccgttataaggaacaaatcgcaagtttattttctactgagagcgctgtagtgaagatggtcgtggacacattgcctcttcttgcgttcatgcaattattcgatgcctttaatgcgtccaccgccggatgccttcgtggtcaagggagacaaaaaaataggtgggtacatcaacctagtcgcattttattgcctaggtgtgcccatggcatatgtgttagcattcctgtatcttctgggtgtaggagacttatggttgggtataactga

SEQ ID NO: 4891 - DNA, 1272 bp, Saccharomyces cerevisiae
atgacaaaagcttatactatcgttatcaagctgggcagttcgtcgctcgtcgacgagagcacaaaagagccaaagttgtccatcatgacgttaatcgtcgagaccgtgacgaatcttaagcgcatgggccacaaagtgatcatcgtatccagcggcggcattgccgttggtttggacgctctcaacattccgcacaagcctaagcagttgtctgaagtgcaagcgattgccgctgtcggacaaggccgtctcatcgcgcgctggaacatgctgttttcccagtatggcgagcaaacagcgcagatcctgctcacgcgtaacgatatactgcgttggaaccagtacaataacgcacgcaatacaatcaacgaactgctggccatgggtgtcatccctatagtcaacgaaaacgatacgctatccattagcgagatcgagttcggcgataacgacacgctttctgccattaccgctgctcttgtaggggcggatttcctgttcttgctcacagatgtggactgcctatatacagacaatccgcgcactaatccggatgctcgtcctattgttctcgtgccagagctatcagagggccttccgggcgtcaacacttccagtggttcaggctccgaggttggcacgggcggaatgcgcaccaaactcatagccgccgacctcgcctctaatgccggtatcgagactattgtgatgaagagcgaccgtccagagtacgtcccgaagatcgttgactacattcagcatcacttccgccctccgcgccatatcggaaacggcacacagcagcagtttctcgatcttcaggatacggagctcgaacagttgcgtcgctacgatgttcccatgcacaccaagttcttagctaatgacaacaaacacaagcttaagaacagggaattttggattctgcacgggctcattaccaagggcgccattatcatcgacgagaacagctatgataaacttttgtcaaaggatatggctagtctgactccaaacgccgtgatcgaagtccgagacaacttccacgaacttgaatgcgttgatctcaaaataggccagcggttacccaatggcgaattggatatctcgaagccgattcagtctgttggatgcgtccgctccaattatacgagtctggagcttgcgaagatcaagggcttacccagtgagaagattcacgatgttttgggctacagtgtgagtgaatacgtagcacatagagaaaacatcgctttccctccgcaattttga

SEQ ID NO: 4892 - DNA, 1272 bp, Artificial Sequence
  Description of Artificial Sequence: Synthetic polynucleotide
atgacaaaagcttatactatcgttatcaagttgggcagttcttctctcgtcgacgagagcacaaaagagccaaagttgtccatcatgacgttaatcgtcgagaccgtgacgaatcttaagcgcatgggccacaaagtgatcatcgtatccagcggcggcattgccgttggtttggacgctctcaacattccgcacaagcctaagcagttgtctgaagtgcaagcgattgccgctgtcggacaaggccgtctcatcgcgcgctggaacatgttattttcccagtatggcgagcaaacagcgcagatcttactcacgcgtaacgatatattacgttggaaccagtacaataacgcacgcaatacaatcaacgaattattagccatgggtgtcatccctatagtcaacgaaaacgatacgttatccattagcgagatcgagttcggcgataacgacacgctttctgccattaccgctgctcttgtaggggcggatttccttttcttgctcacagatgtggactgcttatatacagacaatccgcgcactaatccggatgctcgtcctattgttctcgtgccagagttatctgagggccttccgggcgtcaacacttccagtggttctggctccgaggttggcacgggcggaatgcgcaccaaactcatagccgccgacctcgcctctaatgccggtatcgagactattgtgatgaagagcgaccgtccagagtacgtcccgaagatcgttgactacattcagcatcacttccgccctccgcgccatatcggaaacggcacacagcagcagtttctcgatcttcaggatacggagctcgaacagttgcgtcgctacgatgttcccatgcacaccaagttcttagctaatgacaacaaacacaagcttaagaacagggaattttggattttacacgggctcattaccaagggcgccattatcatcgacgagaacagctatgataaacttttgtccaaggatatggctagtttgactccaaacgccgtgatcgaagtcagagacaacttccacgaacttgaatgcgttgatctcaaaataggccagagattacccaatggcgaattggatatctccaagccgattcagtctgttggatgcgtccgctccaattatacgagtttggagcttgcgaagatcaagggcttacccagtgagaagattcacgatgttttgggctacagtgtgagtgaatacgtagcacatagagaaaacatcgctttccctccgcaattttga

SEQ ID NO: 4893 - DNA, 1035 bp, Saccharomyces cerevisiae
atggccgatttcttattgagaccaattaagcaacgtcatagaaacgaggacaagtacgtgtcggtggacgctgcagacggatcggtgtctaaaattgagcccatcgcagattttgtaattaagacaaaactattatccgctaatgggccggaaaaactgcaagatggcaggaaggtgttcatcaatgtttgtcactctccgttagtgcccaaacctgaggtcgattttaatgcaaggatagtgttcccgctcatcatccaaaacgaatgggagattcctattattacatcctgctaccgcatggaccatgacaagaaggggcaggagtgctatgtgtgggattgctgcataaatagcgattgctcgcgctggatatgcgatgatatccaactgcgagagatactggtcgaatggtgcttggagtcatgtgagatccgagattcggtggtattgtgcagagatcgcattgcattccccaagatgaagaagaagggcgctgagcttcctgcactagaggtattgaatgatgagttacatcaagattacaaggcaaaaatgcataaaatcatagaagaggaggccggagacccgatgagtatattgagaggaaggaatgacgatggcgatgataataatgatcccgacgatggaacactaccaccattgttccctatcgagaacaaaatctccggagccaagatagaggagattgataagaacgagattgctcacagaaacctgaaacaggcacctgcacctgcacctgcaccgcacgagcagcaggaggacgtgccggaatacgaggtaaagatgaagaggttcaaaggggccgcctacaagctgcgaattcttattgagaacaaagctccgaactcgaagccggaccggttctctccgagctacaacttcgcagagaatattttatacattaacggtaagctgagcatacctttgccgcgcgacatagtcgtgaatgcagcagatatcaagattttccatatccgcaaagaacgcacactatatatatatatataa

SEQ ID NO: 4894 - DNA, 1035 bp, Artificial Sequence
  Description of Artificial Sequence: Synthetic polynucleotide
atggccgatttcttattgagaccaattaagcaacgtcatagaaacgaggacaagtacgtgtctgtggacgctgcagacggatctgtgtctaaaattgagcccatcgcagattttgtaattaagacaaaattattatccgctaatgggccggaaaaattacaagatggcaggaaggtgttcatcaatgtttgtcactctccgttagtgcccaaacctgaggtcgattttaatgcaaggatagtgttcccgctcatcatccaaaacgaatgggagattcctattattacatcctgctaccgcatggaccatgacaagaaggggcaggagtgctatgtgtgggattgctgcataaatagcgattgctctcgctggatatgcgatgatatccaattaagagagatattggtcgaatggtgcttggagagttgtgagatcagagattctgtggtattgtgcagagatcgcattgcattccccaagatgaagaagaagggcgctgagcttcctgcattagaggtattgaatgatgagttacatcaagattacaaggcaaaaatgcataaaatcatagaagaggaggccggagacccgatgagtatattgagaggaaggaatgacgatggcgatgataataatgatcccgacgatggaacattaccaccattgttccctatcgagaacaaaatctccggagccaagatagaggagattgataagaacgagattgctcacagaaacttgaaacaggcacctgcacctgcacctgcaccgcacgagcagcaggaggacgtgccggaatacgaggtaaagatgaagaggttcaaaggggccgcctacaagttaagaattcttattgagaacaaagctccgaactccaagccggacagattctctccgagctacaacttcgcagagaatattttatacattaacggtaagttgagcatacctttgccgcgcgacatagtcgtgaatgcagcagatatcaagattttccatatccgcaaagaacgcacattatatatatatatatga

SEQ ID NO: 4895 - DNA, 1893 bp, Saccharomyces cerevisiae
atgtgttctccaactaatttcttatatgagcccttttccagcgatgctgtgacgcagaactatgaccaaaatctaaaatgcaccaaatgtggcgcctattattcgatggcttgttccctacgagaacagaatgtttggacttgtctattctgcaaccaatcaaactcaaatgctgaattgccactggtaccttccaacacctatacattgacttctgcaaagaaagaaatactttcaagacggaccattatgattatagacgctatttgcgatcctcatgagctaaattatttagtttccattctatgtaataattacatcacaagacaacaagagccactatcaataattactattcagcaatcaggtcatgtgattttacacaatgctgtgaatcacagacgtgatgctgtattttcaataaatgaatttatgaccaaatataatcttgataaattaaatgccagttacttcgagaaaaaaatttcagaaatcaatcaagaatcatactggtttgataaatctactcagggttctttaagaaaattgctacgggaaatatgcaagattgcaaacaaagtgaatatcagttctaaaagggacaagcgttgcaccggattagcgctgttcgtttcatccgtactggcgtctcagtgcagtttgtcagcctactgtcatatagtttcattcctgaatggtccatgtactaagggtggcggcaaagttatgtcaagagaacgtggtgaaagcatgagacaaaaccaccattttgaatccaaaagttcacaattgcaactatcaaaaagtccgacaaaattttacaagaaaatgcttgaaaaatttgcaaaccaatcgttaatctatgaattctttatagcttcattggatcaaatcggtatactcgaaatgagtccattaataacttcgtcaatggcagtttctcagtttgattcattcaatgatgagagattcgcaatgtcttttcaaaagtacctgaacttgcgtgaccataatgccatttacaattgtcattcaaagataatgaccgcaaagaacgctattgtcgttaaggacttcccaaaatatagcttaaaccctaaaaacctttctctaccattagaaatctcactaggtcacaattcagctgaagctcctatacagtttcaaaccacttttgaaaatcaaacggaaaaatacataagaattgaaaccctcttattgccaaaagccaatagatcatttggggcacaaaatgaaattgtgttttcaatgaaaaagatagcctcacgaattatcgatagctttgcttactcatccaagcacactaaagaattgatgaagcaattgtttctattaccaaatcaaatccggggaaaagacgtagatatggtcaatctgatacagtggtgttatcatatatataggtctccaattctatcggttcggaatacttcacctgatgaaaggtacctttttcttcaccgaataataaacgcttctaaagacacatgcctttcattatgcaaacccttcatctggagttacagtgatttgaaacacgactggatcgtgttggatgtcccattaacaagagcccagatacttcaagatgataaaaccaccatttgtgtagatggtggctcgtacttagttttaagaaggggaaaacttttggaaaaagaaggtcgcgagctctgttgcaagcttttaaatgacttgcaaaggtttccgcagccattatatgttgaaactaaaaccggtggcagtcaggaccgtttcttgaaaagcaaaattattcccttggacatcactgacaaggaaactcttggtacagaggatatgacattcaatgaatatttcaacttgttcaccgatctaagtggaagcaaataa

SEQ ID NO: 4896 - DNA, 1893 bp, Artificial Sequence
  Description of Artificial Sequence: Synthetic polynucleotide
atgtgttctccaactaatttcttatatgagcccttttccagcgatgctgtgacgcagaactatgaccaaaatttgaaatgcaccaaatgtggcgcctattattccatggcttgttccttgagagaacagaatgtttggacttgtttgttctgcaaccaaagtaacagtaatgctgaattgccattagtaccttccaacacctatacattgacttctgcaaagaaagaaatactttctagaagaaccattatgattatagacgctatttgcgatcctcatgagttgaattatttagtttccattctttgtaataattacatcacaagacaacaagagccattatctataattactattcagcaatctggtcatgtgattttacacaatgctgtgaatcacagacgtgatgctgtattttccataaatgaatttatgaccaaatataatcttgataaattaaatgccagttacttcgagaaaaaaatttctgaaatcaatcaagaatcttactggtttgataaatctactcagggttctttaagaaaattgttgagagaaatatgcaagattgcaaacaaagtgaatatcagttctaaaagggacaagcgttgcaccggattagcgttattcgtttcttccgtattggcgtctcagtgcagtttgagtgcctactgtcatatagtttctttcttgaatggtccatgtactaagggtggcggcaaagttatgagtagagaacgtggtgaaagcatgagacaaaaccaccattttgaatccaaaagttctcaattgcaattatccaaaagtccgacaaaattttacaagaaaatgcttgaaaaatttgcaaaccaatctttaatctatgaattctttatagcttctttggatcaaatcggtatactcgaaatgagtccattaataacttcttctatggcagtttctcagtttgattctttcaatgatgagagattcgcaatgtcttttcaaaagtacttgaacttgcgtgaccataatgccatttacaattgtcattctaagataatgaccgcaaagaacgctattgtcgttaaggacttcccaaaatatagcttaaaccctaaaaacctttctttaccattagaaatctctttgggtcacaattctgctgaagctcctatacagtttcaaaccacttttgaaaatcaaacggaaaaatacataagaattgaaaccctcttattgccaaaagccaatagatcttttggggcacaaaatgaaattgtgttttccatgaaaaagatagccagtagaattatcgatagctttgcttactcttccaagcacactaaagaattgatgaagcaattgtttttattaccaaatcaaatcagaggaaaagacgtagatatggtcaatttgatacagtggtgttatcatatatataggtctccaattttaagtgttagaaatacttctcctgatgaaaggtacctttttcttcacagaataataaacgcttctaaagacacatgcctttctttatgcaaacccttcatctggagttacagtgatttgaaacacgactggatcgtgttggatgtcccattaacaagagcccagatacttcaagatgataaaaccaccatttgtgtagatggtggctcttacttagttttaagaaggggaaaacttttggaaaaagaaggtcgcgagctctgttgcaagcttttaaatgacttgcaaaggtttccgcagccattatatgttgaaactaaaaccggtggcagtcaggaccgtttcttgaaaagcaaaattattcccttggacatcactgacaaggaaactcttggtacagaggatatgacattcaatgaatatttcaacttgttcaccgatttgagtggaagcaaatga

SEQ ID NO: 4897 - DNA, 1416 bp, Saccharomyces cerevisiae
atggaaagttttgaaaatttgagcataagagacagtttcactagcggaatggaacacgttgacgaggagttaggaggcctctccgacctaagtatatctaagcaggggccaactttgtcaccacagcttatcaaccgatttatgccccattttccctcgagcccatcacctctgcgaaatacattggattttagtgctgctaaagctgatgaggaagaagatgaccgaatggaaatagatgaggttgatgatacaagttttgaagaagaatataataacgagccaatcgaaactcatactgaagcgactgagaatgccgtggtggaagaaatcgaggctaccccagaagaaagacaaaagcaagagaagaatgaaagccaagaccaaagtgtagaagaggtcgagaacattgtttcaccgcatcgttcaactgtcataaaggcattattatcaccgaccgatttaggtgtggccgcagctactaaagttgaaggtgttgtgccattaccaccatcggccaatcaagatgacaatgaaagttcgaataacaacgcagagggtgaagacataatcagaaatgaagaagtcgaagatgagatcaaatcatcacttggcaaccacaagtcaagccagtacgcaaatgcgttcgattcggaaataatcaagagggaattaagatcaagatcaaaatatcaaccaattcaggtttcattcaatacacacaactacttctattcagataaggacggcattaaaacttattctcttactaaaccaaatcacaataaaatagatgaattttacgaccaaaatgaagctttcaagttgcctaaaccatggtcacccaattcacatccggcatcaagagcgtcatatgccctaatgtcatatttacagttatttctcaatgcgatcactacagtagtgatttttagttttatactctcatttatcatagcgcttcaaaaggacttgaaatccacatgggaacaaagaaaacatgaactgcagtacgaatccagaatttgtcaagagcagtacctcacaaatcgttgtaaccagacgcctggcttgccggctctgggcgaacaatgtgctatatggaaacagtgtatggacagaaataacgatatctttttccgtgcaagatcaacgttgagcgcaaaattgttcggagacattatcaactcattcatagatccattaaactggaaaacactatttgttattttttgtggtgtgataacttggtgtttcagttcgaatttcttactgggttttgtaagagccaagagctactatggcaatggcatcaaaacatatcccttgccatcttcaccgaaatcgccgacatcagaagaaacacactcatctatgacagcatctggagaggactcacacctacttaagcaatag

SEQ ID NO: 4898 - DNA, 1416 bp, Artificial Sequence
  Description of Artificial Sequence: Synthetic polynucleotide
atggaaagttttgaaaatttgagcataagagacagtttcactagcggaatggaacacgttgacgaggagttaggaggcctctccgacttgagtatatctaagcaggggccaactttgtctccacagcttatcaacagatttatgccccattttccctctagcccatctcctttgagaaatacattggattttagtgctgctaaagctgatgaggaagaagatgacagaatggaaatagatgaggttgatgatacaagttttgaagaagaatataataacgagccaatcgaaactcatactgaagcgactgagaatgccgtggtggaagaaatcgaggctaccccagaagaaagacaaaagcaagagaagaatgaaagccaagaccaaagtgtagaagaggtcgagaacattgtttctccgcatcgttccactgtcataaaggcattattatctccgaccgatttaggtgtggccgcagctactaaagttgaaggtgttgtgccattaccaccatctgccaatcaagatgacaatgaaagtagtaataacaacgcagagggtgaagacataatcagaaatgaagaagtcgaagatgagatcaaatcttctcttggcaaccacaagagcagccagtacgcaaatgcgttcgattctgaaataatcaagagggaattaagatctagaagtaaatatcaaccaattcaggtttctttcaatacacacaactacttctattctgataaggacggcattaaaacttattctcttactaaaccaaatcacaataaaatagatgaattttacgaccaaaatgaagctttcaagttgcctaaaccatggtcccccaattctcatccggcatctagagcgtcttatgccttgatgtcttatttacagttatttctcaatgcgatcactacagtagtgatttttagttttatactcagttttatcatagcgcttcaaaaggacttgaaatccacatgggaacaaagaaaacatgaattacagtacgaatccagaatttgtcaagagcagtacctcacaaatcgttgtaaccagacgcctggcttgccggctttgggcgaacaatgtgctatatggaaacagtgtatggacagaaataacgatatctttttccgtgcaagatctacgttgagcgcaaaattgttcggagacattatcaactctttcatagatccattaaactggaaaacattatttgttattttttgtggtgtgataacttggtgtttcagtagtaatttcttattgggttttgtaagagccaagagctactatggcaatggcatcaaaacatatcccttgccatcttctccgaaatctccgacaagtgaagaaacacactcttctatgacagcatctggagaggactctcacttacttaagcaatga

SEQ ID NO: 4899 - DNA, 1728 bp, Saccharomyces cerevisiae
atgctatcagcaaggtgcctcaaatctatatacttcaagagatctttctcacaactgggacacatcaagccccccaagcacataagaaatgaacctgttaagccatttagaaacatagacttaaaagactgggacttactgagggcttccttgatgaaattcaaaagttcttctttagaagtgccactggtcatcaatggggaaaggatatatgacaataatgaaagagcgcttttcccgcagactaaccctgcgaaccatcaacaagtactggcaaacgtcacacaagccacggaaaaagatgtcatgaatgctgtaaaagccgccaaggatgccaaaaaggattggtacaatctaccgttttatgacagatctgcaatttttttgaaagccgctgacttaatttccaccaagtatcgttatgacatgttagctgctacaatgctgggccagggaaaaaatgtgtatcaggcagaaatcgactgtatcacggaattatctgacttttttagatactatgtcaagtatgcatcagacttgtatgctcaacaacccgtagagtcagcggatggtacttggaataaagctgaatacagacctttagagggatttgtgtatgctgtttcaccattcaactttactgctattgctgcaaacttgattggggctccagctttgatgggtaatacagttgtctggaaaccttcacaaaccgctgccctttcaaattacttattgatgactgttttggaagaagcgggattgccaaagggtgtcataaatttcattccaggtgatccagttcaagttactgaccaggtattagctgataaagattttggtgccttgcattttaccggttctacaaatgtctttaagagtttgtatggcaaaatacaaagtggcgttgttgaagggaagtacagagattacccccgtattattggtgagacaggtggtaaaaatttccatctagttcacccaagtgcaaatatatcacatgcagtactctctactattagaggcactttcgagttccaaggccaaaagtgctctgccgcttccaggttatatcttccagagtcaaaaagtgaagaattcttatccgatatgtttggcatattgcagtcacagaatgttgtcccaatgaacacatccgcaagtccaatttctggtgggaatttgcggggatttatgggtcctgtcatccatgaacaaagtttcgacaaattagttaaagtaattgaagatgcaaagaaagaccccgagttggaaattctttacggtggacaatacgataaaagccaaggttggtttgtcggacccacagtcataaaagccaagagaccagatcatccatatatgtcaacagaattttttggccctatattaactgtttacgagtatccagatactgaatttaatgaaatctgtgatattatcgataatacgagtcaatacgccttaactggtgctatttttgccaaagatcgtaaagcaattgaatacgcagatgagaagttgaagtttagcgcaggaaatttctacataaatgataagtgtactggtgccgttgtttctcagcaatggtttggtggcgcaagaatgagtggtaccgacgataaggctggtggtccaaacattttaagcagatttgtcagtattagaaacacaaaggagaacttctacgagttgactgatttcaaatatccatcgaattatgaataa

SEQ ID NO: 4900 - DNA, 1728 bp, Artificial Sequence
  Description of Artificial Sequence: Synthetic polynucleotide
atgctttctgcaaggtgcctcaaatctatatacttcaagagatctttctctcaattaggacacatcaagccccccaagcacataagaaatgaacctgttaagccatttagaaacatagacttaaaagactgggacttattgagggcttccttgatgaaattcaaaagttcttctttagaagtgccattagtcatcaatggggaaaggatatatgacaataatgaaagagcgcttttcccgcagactaaccctgcgaaccatcaacaagtattggcaaacgtcacacaagccacggaaaaagatgtcatgaatgctgtaaaagccgccaaggatgccaaaaaggattggtacaatttaccgttttatgacagatctgcaatttttttgaaagccgctgacttaatttccaccaagtatcgttatgacatgttagctgctacaatgcttggccagggaaaaaatgtgtatcaggcagaaatcgactgtatcacggaattatctgacttttttagatactatgtcaagtatgcaagtgacttgtatgctcaacaacccgtagagtctgcggatggtacttggaataaagctgaatacagacctttagagggatttgtgtatgctgtttctccattcaactttactgctattgctgcaaacttgattggggctccagctttgatgggtaatacagttgtctggaaaccttctcaaaccgctgccctttctaattacttattgatgactgttttggaagaagcgggattgccaaagggtgtcataaatttcattccaggtgatccagttcaagttactgaccaggtattagctgataaagattttggtgccttgcattttaccggttctacaaatgtctttaagagtttgtatggcaaaatacaaagtggcgttgttgaagggaagtacagagattacccccgtattattggtgagacaggtggtaaaaatttccatttggttcacccaagtgcaaatatatctcatgcagtactctctactattagaggcactttcgagttccaaggccaaaagtgctctgccgcttccaggttatatcttccagagagtaaaagtgaagaattcttatccgatatgtttggcatattgcagtctcagaatgttgtcccaatgaacacatccgcaagtccaatttctggtgggaatttgagaggatttatgggtcctgtcatccatgaacaaagtttcgacaaattagttaaagtaattgaagatgcaaagaaagaccccgagttggaaattctttacggtggacaatacgataaaagccaaggttggtttgtcggacccacagtcataaaagccaagagaccagatcatccatatatgtctacagaattttttggccctatattaactgtttacgagtatccagatactgaatttaatgaaatctgtgatattatcgataatacgagtcaatacgccttaactggtgctatttttgccaaagatcgtaaagcaattgaatacgcagatgagaagttgaagtttagcgcaggaaatttctacataaatgataagtgtactggtgccgttgtttctcagcaatggtttggtggcgcaagaatgagtggtaccgacgataaggctggtggtccaaacattttaagcagatttgtcagtattagaaacacaaaggagaacttctacgagttgactgatttcaaatatccatccaattatgaatga

SEQ ID NO: 4901 - DNA, 693 bp, Saccharomyces cerevisiae
atgattttaaccacagctagattaaattgtagaccagtcaccgttcctcgtctatttaatcgttcttttagtcaatctttcataattttgaagaaaaaaagttctacccctactgagaaagtcgaagaagatgaaattgacgtgaatgaactgctgaaaaaggcagaaactcaattcaaaaaaactttagaaattcaaaaacagaaaatgaatgagataaaacagggaaattttaatcctaaggtattcaatagtttagtgttcaaaaataacagaaagtttacagatattgctaccacatccttgaaaggtaaaaatgcacttttaataacagttttcgaccccaaagatgtgaaaactgtgatcagtggggtgcttgctgcgaacctgaatttaactcctgaaagggtcccaaataacgatttgcaattgaaagtttcgttaccaccaccaactacagaatcccggttaaaagtagctaaagacttaaagagagtatttgaagaatataagcagtcatcgctaaaagactcattaggaactatcagaggcagtattctaaaggaattcaaaagtttcaaaaaggatgatgccgttcgaaaagctgagagggatttggaaaaactgcataaggattacgtgaacaagcttcatgaccaattccagaaagttgaaaaaagcattgtaaaatga

SEQ ID NO: 4902 - DNA, 693 bp, Artificial Sequence
  Description of Artificial Sequence: Synthetic polynucleotide
atgattttaaccacagctagattaaattgtagaccagtcaccgttcctcgtttgtttaatcgttcttttagtcaatctttcataattttgaagaaaaaaagttctacccctactgagaaagtcgaagaagatgaaattgacgtgaatgaattattgaaaaaggcagaaactcaattcaaaaaaactttagaaattcaaaaacagaaaatgaatgagataaaacagggaaattttaatcctaaggtattcaatagtttagtgttcaaaaataacagaaagtttacagatattgctaccacatccttgaaaggtaaaaatgcacttttaataacagttttcgaccccaaagatgtgaaaactgtgatcagtggggtgcttgctgcgaacttgaatttaactcctgaaagggtcccaaataacgatttgcaattgaaagtttctttaccaccaccaactacagaatccagattaaaagtagctaaagacttaaagagagtatttgaagaatataagcagtcttctttgaaagactctttaggaactatcagaggcagtattttgaaggaattcaaaagtttcaaaaaggatgatgccgttagaaaagctgagagggatttggaaaaattgcataaggattacgtgaacaagcttcatgaccaattccagaaagttgaaaaaagcattgtaaaatga

SEQ ID NO: 4903 - DNA, 1935 bp, Saccharomyces cerevisiae
atgtccaaggtctatctgaattcagacatgattaaccatttgaactccacagttcaagcttactttaacttatggttggagaagcaaaacgcaataatgcgttctcaaccccaaattattcaagataaccaaaaactgataggcattacaacgctagttgcctcaattttcactctgtatgttttggtcaagataatctccaccccagcaaagtgttcctcgtcctataagccagtcaaattctcccttcctgcaccagaggccgctcaaaataattggaagggcaagaggtctgtttccactaacatatggaatcctgaagaaccaaactttattcaatgtcattgtcccgccacaggtcaatatctaggttcttttccatcgaaaacggaagctgacatagatgaaatggtttctaaggcaggcaaagctcaatctacttggggcaattctgatttctcaagaagattgagagttttggcttctttgcatgattatattctaaataatcaagatcttattgcgagagtagcgtgcagggattcaggaaagacaatgttagacgcatcgatgggtgaaatcttggttactttagaaaaaattcaatggactataaagcacggccaaagagcgttgcaaccttcgagacgtccgggccccactaattttttcatgaagtggtataaaggtgcagaaatccgttatgaaccactgggtgtgatcagttctatcgtttcctggaactatccattccataacttattgggtccaattattgcagcattgttcacagggaatgccattgtagtaaaatgttcagaacaagttgtctggtcttcggaatttttcgtcgagctgatccgcaaatgtttggaagcttgtgatgaagatccagatttggttcagttgtgctattgtttacctccaactgaaaatgatgattccgcaaattatttcacctctcatcctggtttcaaacatatcacttttattggcagtcagcccgtagcgcactatattctaaaatgcgctgccaaatcattgacacccgtagttgtggagcttggtggtaaggatgcgtttattgtcctagactcagctaagaatttagatgctttatcttctatcatcatgaggggtactttccaatcatccggtcaaaattgtattggtattgagagggttattgtcagtaaggaaaattatgatgatttagtcaagattttgaatgaccgtatgactgcaaatccactacgccaagggtctgatattgatcatttagaaaatgttgatatgggggcaatgatatctgacaacagattcgatgaactagaagctttggttaaagatgctgttgcaaagggagctcgtttacttcaaggtggttcccgcttcaaacatccaaagtatccacaaggtcattatttccaaccaactcttttggtggatgtcactccagaaatgaaaatagcacaaaacgaagtgtttggcccaattttagtcatgatgaaagctaagaatactgaccattgtgtacaactagccaactctgcgccatttggtctaggtggttctgtgtttggtgcggatatcaaggaatgcaattacgtcgcaaatagcctacaaactggtaatgtagccattaatgattttgctacattctatgtttgtcaattaccatttggtggtatcaatggttcaggttacggtaaatttggtggtgaagaaggtcttttgggtttgtgcaatgccaaaagtgtctgttttgatactttgccttttgtctccactcaaattccaaaaccattagactaccctattcgtaacaatgctaaggcttggaattttgtaaagagtttcatcgtaggagcttatacaaattccacatggcaaagaataaagtcactgttctctttagctaaagaagccagctag

SEQ ID NO: 4904 - DNA, 1935 bp, Artificial Sequence
  Description of Artificial Sequence: Synthetic polynucleotide
atgtccaaggtctatttgaatagtgacatgattaaccatttgaactccacagttcaagcttactttaacttatggttggagaagcaaaacgcaataatgcgttctcaaccccaaattattcaagataaccaaaaattgataggcattacaacgttagttgcctctattttcactttatatgttttggtcaagataatctccaccccagcaaagtgttcctcctcctataagccagtcaaattctcccttcctgcaccagaggccgctcaaaataattggaagggcaagaggtctgtttccactaacatatggaatcctgaagaaccaaactttattcaatgtcattgtcccgccacaggtcaatatttgggttcttttccatctaaaacggaagctgacatagatgaaatggtttctaaggcaggcaaagctcaatctacttggggcaattctgatttcagtagaagattgagagttttggcttctttgcatgattatattttgaataatcaagatcttattgcgagagtagcgtgcagggattctggaaagacaatgttagacgcatctatgggtgaaatcttggttactttagaaaaaattcaatggactataaagcacggccaaagagcgttgcaaccttccagacgtccgggccccactaattttttcatgaagtggtataaaggtgcagaaatccgttatgaaccattgggtgtgatcagttctatcgtttcctggaactatccattccataacttattgggtccaattattgcagcattgttcacagggaatgccattgtagtaaaatgttctgaacaagttgtctggtcttctgaatttttcgtcgagttgatccgcaaatgtttggaagcttgtgatgaagatccagatttggttcagttgtgctattgtttacctccaactgaaaatgatgattccgcaaattatttcacctctcatcctggtttcaaacatatcacttttattggcagtcagcccgtagcgcactatattttgaaatgcgctgccaaatctttgacacccgtagttgtggagcttggtggtaaggatgcgtttattgtcttggactctgctaagaatttagatgctttatcttctatcatcatgaggggtactttccaatcttccggtcaaaattgtattggtattgagagggttattgtcagtaaggaaaattatgatgatttagtcaagattttgaatgaccgtatgactgcaaatccattgcgccaagggtctgatattgatcatttagaaaatgttgatatgggggcaatgatatctgacaacagattcgatgaattggaagctttggttaaagatgctgttgcaaagggagctcgtttacttcaaggtggttcccgcttcaaacatccaaagtatccacaaggtcattatttccaaccaactcttttggtggatgtcactccagaaatgaaaatagcacaaaacgaagtgtttggcccaattttagtcatgatgaaagctaagaatactgaccattgtgtacaattggccaactctgcgccatttggtttaggtggttctgtgtttggtgcggatatcaaggaatgcaattacgtcgcaaatagcttacaaactggtaatgtagccattaatgattttgctacattctatgtttgtcaattaccatttggtggtatcaatggttctggttacggtaaatttggtggtgaagaaggtcttttgggtttgtgcaatgccaaaagtgtctgttttgatactttgccttttgtctccactcaaattccaaaaccattagactaccctattcgtaacaatgctaaggcttggaattttgtaaagagtttcatcgtaggagcttatacaaattccacatggcaaagaataaagtctttattctctttagctaaagaagccagctga

SEQ ID NO: 4905 - DNA, 345 bp, Saccharomyces cerevisiae
atgtcccaaaaaaacggaattgccaccctactacaagctgaaaaggaagcccacgaaatagtatcaaaggctagaaagtacagacaagataagttgaagcaagccaagactgatgcagccaaggaaatcgactcatacaaaattcaaaaagacaaggaattgaaggagtttgaacaaaagaatgccggtggtgttggtgaattggaaaagaaagcagaggctggtgtgcaaggtgaattagctgagattaagaaaattgcagagaagaaaaaggatgacgttgtcaaaattttgatcgagactgtcatcaagccttctgctgaagtccatatcaatgccttgtaa

SEQ ID NO: 4906 - DNA, 345 bp, Artificial Sequence
  Description of Artificial Sequence: Synthetic polynucleotide
atgtcccaaaaaaacggaattgccaccttattacaagctgaaaaggaagcccacgaaatagtatccaaggctagaaagtacagacaagataagttgaagcaagccaagactgatgcagccaaggaaatcgactcttacaaaattcaaaaagacaaggaattgaaggagtttgaacaaaagaatgccggtggtgttggtgaattggaaaagaaagcagaggctggtgtgcaaggtgaattagctgagattaagaaaattgcagagaagaaaaaggatgacgttgtcaaaattttgatcgagactgtcatcaagccttctgctgaagtccatatcaatgccttgtga

SEQ ID NO: 4907 - DNA, 1101 bp, Saccharomyces cerevisiae
atggcggtgttgtgtggtgtatgcggaataaaagagttcaaatacaagtgtccaagatgtttggtgcaaacttgctctttggagtgttccaagaagcacaagacaagggacaattgctcaggtcaaacacatgatcctaaggagtatatatcgagtgaggcgttgaaacaggcggacgacgacaagcacgaacgaaatgcttatgtccagagggactacaactatctgacgcagttgaagcgaatggtgcatgtacaaaagatggatgctagaatgaagaacaagcgggttctggggcctgtgggcggccacaactctaatttcaagaagagaagatacgatatagatgaggatgatcgtgatagcacggagtgtcagaggataattaggaggggggtgaactgtttgatgctacccaaggggatgcagcgatcatcgcaaaacaggagcaagtgggacaaaacgatggacctatttgtatggagcgtggagtggattctatgtcctatgcaggaaaagggtgagaaaaaggagcttttcaaacatgtcagccaccgtatcaaagagacagactttttggtgcaagggatgggcaagaacgttttccaaaaatgctgtgaattctatcgcttggctggaacaagctcttgcatagagggcgaagacggttcggagaccaaagaggaaagaacacagatcctacagaagagtgggctcaaattctacacgaaaacgttcccttacaacaccacgcatataatggattcaaaaaaactggtggagttggctatacatgagaaatgcatcggagaattgttgaagaacaccacagtgatcgagtttcccacgatattcgttgccatgacagaggctgacctaccagagggctacgaggtgctacaccaggaaccccgcccacttgagcatacgagtacactgaacaagtttattgacaatgcaagggaggaggaagacgctgaagaggactctcaaccgacagaagaacctgtacagaaggaaacacaggacgccagcgacagcgacagcgacagcgacgatgactacaatccgggcttatccatggatttcctcactgcatga

SEQ ID NO: 4908 - DNA, 1101 bp, Artificial Sequence
  Description of Artificial Sequence: Synthetic polynucleotide
atggcggtgttgtgtggtgtatgcggaataaaagagttcaaatacaagtgtccaagatgtttggtgcaaacttgctctttggagtgttccaagaagcacaagacaagggacaattgctctggtcaaacacatgatcctaaggagtatatatctagtgaggcgttgaaacaggcggacgacgacaagcacgaaagaaatgcttatgtccagagggactacaactatttgacgcagttgaagagaatggtgcatgtacaaaagatggatgctagaatgaagaacaagagagttttggggcctgtgggcggccacaactctaatttcaagaagagaagatacgatatagatgaggatgatcgtgatagcacggagtgtcagaggataattaggaggggggtgaactgtttgatgttgcccaaggggatgcagagatcttctcaaaacaggagcaagtgggacaaaacgatggacttatttgtatggagcgtggagtggattctttgtcctatgcaggaaaagggtgagaaaaaggagcttttcaaacatgtcagccaccgtatcaaagagacagactttttggtgcaagggatgggcaagaacgttttccaaaaatgctgtgaattctatcgcttggctggaacaagctcttgcatagagggcgaagacggttctgagaccaaagaggaaagaacacagatcttacagaagagtgggctcaaattctacacgaaaacgttcccttacaacaccacgcatataatggattctaaaaaattagtggagttggctatacatgagaaatgcatcggagaattgttgaagaacaccacagtgatcgagtttcccacgatattcgttgccatgacagaggctgacttaccagagggctacgaggtgttacaccaggaaccccgcccacttgagcatacgagtacattgaacaagtttattgacaatgcaagggaggaggaagacgctgaagaggactctcaaccgacagaagaacctgtacagaaggaaacacaggacgccagcgacagcgacagcgacagcgacgatgactacaatccgggcttatccatggatttcctcactgcatga

SEQ ID NO: 4909 - DNA, 633 bp, Saccharomyces cerevisiae
atgggaaaatcagccgttatattcgtggaaagagccactcccgctacactaacggaactgaaggatgctctctcgaatagtatcctgtccgtgcgagacccttggtcgatagactttcggacgtaccggtgctctatcaagaacctacccgcggatgtctccaagctcatgtactcgataacgttccaccaccatggccggcagaccgtgctaatcaaggacaactcagcgatggtgacgactgccgcagcggcggatatccctccggcgctggtgttcaatggctcatctacgggcgttcctgagtccatagacactattttgtcgtccaagctgtccaacatctggatgcagaggcagctcatcaagggtgatgccggtgagacgttgatcttggacgggctcaccgtgcgactcgtcaacctcttctcctccactgggttcaagggtctcctgatagaactgcaggcggacgaagcgggcgagtttgagaccaagattgcaggcatcgaaggacacctagctgaaatccgggccaaggagtacaaaacctcatccgactcgttggggccggacaccagcaacgaaatatgtgatttggcgtaccagtatgttcgtgctctggagctgtga

SEQ ID NO: 4910 - DNA, 633 bp, Artificial Sequence
  Description of Artificial Sequence: Synthetic polynucleotide
atgggaaaaagtgccgttatattcgtggaaagagccactcccgctacattaacggaattgaaggatgctctctctaatagtatcttgtccgtgagagacccttggtccatagactttagaacgtacagatgctctatcaagaacttgcccgcggatgtctccaagctcatgtactctataacgttccaccaccatggcaggcagaccgtgttaatcaaggacaactctgcgatggtgacgactgccgcagcggcggatatccctccggcgttagtgttcaatggctcttctacgggcgttcctgagtccatagacactattttgtcttccaagttatccaacatctggatgcagaggcagctcatcaagggtgatgccggtgagacgttgatcttggacgggctcaccgtgaggctcgtcaacctcttctcctccactgggttcaagggtctcttaatagaattacaggcggacgaagcgggcgagtttgagaccaagattgcaggcatcgaaggacacttggctgaaatcagagccaaggagtacaaaacctcttccgactctttggggccggacaccagcaacgaaatatgtgatttggcgtaccagtatgttcgtgctttggagttgtga

SEQ ID NO: 4911 - DNA, 2076 bp, Saccharomyces cerevisiae
atgccgtttggaatagacaacaccgacttcactgtcctggcggggctagtgcttgccgtgctactgtacgtaaagagaaactccatcaaggaactgctgatgtccgatgacggagatatcacagctgtcagctcgggcaacagagacattgctcaggtggtgaccgaaaacaacaagaactacttggtgttgtatgcgtcgcagactgggactgccgaggattacgccaaaaagttttccaaggagctggtggccaagttcaacctaaacgtgatgtgcgcagatgttgagaactacgactttgagtcgctaaacgatgtgcccgtcatagtctcgatttttatctctacatatggtgaaggagacttccccgacggggcggtcaactttgaagactttatttgtaatgcggaagcgggtgcactatcgaacctgaggtataatatgtttggtctgggaaattctacttatgaattctttaatggtgccgccaagaaggccgagaagcatctctccgccgcgggcgctatcagactaggcaagctcggtgaagctgatgatggtgcaggaactacagacgaagattacatggcctggaaggactccatcctggaggttttgaaagacgaactgcatttggacgaacaggaagccaagttcacctctcaattccagtacactgtgttgaacgaaatcactgactccatgtcgcttggtgaaccctctgctcactatttgccctcgcatcagttgaaccgcaacgcagacggcatccaattgggtcccttcgatttgtctcaaccgtatattgcacccatcgtgaaatctcgcgaactgttctcttccaatgaccgtaattgcatccactctgaatttgacttgtccggctctaacatcaagtactccactggtgaccatcttgctgtttggccttccaacccattggaaaaggtcgaacagttcttatccatattcaacctggaccctgaaaccatttttgacttgaagcccctggatcccaccgtcaaagtgcccttcccaacgccaactactattggcgctgctattaaacactatttggaaattacaggacctgtctccagacaattgttttcatctttgattcagttcgcccccaacgctgacgtcaaggaaaaattgactctgctttcgaaagacaaggaccaattcgccgtcgagataacctccaaatatttcaacatcgcagatgctctgaaatatttgtctgatggcgccaaatgggacaccgtacccatgcaattcttggtcgaatcagttccccaaatgactcctcgttactactctatctcttcctcttctctgtctgaaaagcaaaccgtccatgtcacctccattgtggaaaactttcctaacccagaattgcctgatgctcctccagttgttggtgttacgactaacttgttaagaaacattcaattggctcaaaacaatgttaacattgccgaaactaacctacctgttcactacgatttaaatggcccacgtaaacttttcgccaattacaaattgcccgtccacgttcgtcgttctaacttcagattgccttccaacccttccaccccagttatcatgatcggtccaggtaccggtgttgccccattccgtgggtttatcagagagcgtgtcgcgttcctcgaatcacaaaagaagggcggtaacaacgtttcgctaggtaagcatatactgttttatggatcccgtaacactgatgatttcttgtaccaggacgaatggccagaatacgccaaaaaattggatggttcgttcgaaatggtcgtggcccattccaggttgccaaacaccaaaaaagtttatgttcaagataaattaaaggattacgaagaccaagtatttgaaatgattaacaacggtgcatttatctacgtctgtggtgatgcaaagggtatggccaagggtgtgtcaaccgcattggttggcatcttatcccgtggtaaatccattaccactgatgaagcaacagagctaatcaagatgctcaagacttcaggtagataccaagaagatgtctggtaa

SEQ ID NO: 4912 - DNA, 2076 bp, Artificial Sequence
  Description of Artificial Sequence: Synthetic polynucleotide
atgccgtttggaatagacaacaccgacttcactgtcttggcggggttagtgcttgccgtgttgttgtacgtaaagagaaactccatcaaggaattattgatgtccgatgacggagatatcacagctgtcagcagtggcaacagagacattgctcaggtggtgaccgaaaacaacaagaactacttggtgttgtatgcgtctcagactgggactgccgaggattacgccaaaaagttttccaaggagttggtggccaagttcaacttgaacgtgatgtgcgcagatgttgagaactacgactttgagtctttgaacgatgtgcccgtcatagtctctatttttatctctacatatggtgaaggagacttccccgacggggcggtcaactttgaagactttatttgtaatgcggaagcgggtgcattatctaacttgaggtataatatgtttggtttgggaaattctacttatgaattctttaatggtgccgccaagaaggccgagaagcatctctccgccgcgggcgctatcagattgggcaagctcggtgaagctgatgatggtgcaggaactacagacgaagattacatggcctggaaggactccatcttggaggttttgaaagacgaattacatttggacgaacaggaagccaagttcacctctcaattccagtacactgtgttgaacgaaatcactgactccatgtctcttggtgaaccctctgctcactatttgccctctcatcagttgaaccgcaacgcagacggcatccaattgggtcccttcgatttgtctcaaccgtatattgcacccatcgtgaaatctcgcgaattattctcttccaatgaccgtaattgcatccactctgaatttgacttgtccggctctaacatcaagtactccactggtgaccatcttgctgtttggccttccaacccattggaaaaggtcgaacagttcttatccatattcaacttggaccctgaaaccatttttgacttgaagcccttagatcccaccgtcaaagtgcccttcccaacgccaactactattggcgctgctattaaacactatttggaaattacaggacctgtctccagacaattgttttcttctttgattcagttcgcccccaacgctgacgtcaaggaaaaattgactttactttctaaagacaaggaccaattcgccgtcgagataacctccaaatatttcaacatcgcagatgctttgaaatatttgtctgatggcgccaaatgggacaccgtacccatgcaattcttggtcgaatctgttccccaaatgactcctcgttactactctatctcttcctcttctttatctgaaaagcaaaccgtccatgtcacctccattgtggaaaactttcctaacccagaattgcctgatgctcctccagttgttggtgttacgactaacttgttaagaaacattcaattggctcaaaacaatgttaacattgccgaaactaacttgcctgttcactacgatttaaatggcccacgtaaacttttcgccaattacaaattgcccgtccacgttcgtcgttctaacttcagattgccttccaacccttccaccccagttatcatgatcggtccaggtaccggtgttgccccattccgtgggtttatcagagagcgtgtcgcgttcctcgaatctcaaaagaagggcggtaacaacgtttctttgggtaagcatatattgttttatggatcccgtaacactgatgatttcttgtaccaggacgaatggccagaatacgccaaaaaattggatggttctttcgaaatggtcgtggcccattccaggttgccaaacaccaaaaaagtttatgttcaagataaattaaaggattacgaagaccaagtatttgaaatgattaacaacggtgcatttatctacgtctgtggtgatgcaaagggtatggccaagggtgtgtctaccgcattggttggcatcttatcccgtggtaaatccattaccactgatgaagcaacagagttgatcaagatgctcaagacttctggtagataccaagaagatgtctggtga

SEQ ID NO: 4913 - DNA, 741 bp, Saccharomyces cerevisiae
atgccacaattttcagtagatctttgtctttttgacctagatgggactattgtcagcacaacaactgcagcggaaagtgcctggaaaaaattatgccgtcagcatggggttgatcctgttgagttattcaagcattcccatggtgcaagatcacaagaaatgatgaagaaattttttccaaaattggacaataccgataataaaggtgttcttgcgttagaaaaggatatggcagataattatttggacacagtaagccttatccctggtgcagagaatttattgttatcgttagatgtagatactgagactcaaaaaaagttacctgaaaggaaatgggctatcgttacctctggttctccatatttggcattttcatggttcgagacaatattgaaaaatgttggaaagcccaaagttttcattactggatttgacgtgaagaacggtaagcctgatcccgagggttactcaagagctcgtgatttattgcgtcaagatttgcaattaactggtaaacaggatctgaagtatgttgtctttgaagatgcacccgtgggcataaaggccggcaaagcaatgggcgcaattactgtgggtataacatcctcgtatgataagagcgttttatttgacgcaggtgcagattatgtggtctgtgatttgacacaggtttccgtggttaagaacaatgagaacggtatcgttatccaggtaaacaaccctttgacgagagattaa

SEQ ID NO: 4914 - DNA, 741 bp, Artificial Sequence
  Description of Artificial Sequence: Synthetic polynucleotide
atgccacaatttagcgtagatctttgtctttttgacttggatgggactattgtcagcacaacaactgcagcggaaagtgcctggaaaaaattatgccgtcagcatggggttgatcctgttgagttattcaagcattcccatggtgcaagatctcaagaaatgatgaagaaattttttccaaaattggacaataccgataataaaggtgttcttgcgttagaaaaggatatggcagataattatttggacacagtaagccttatccctggtgcagagaatttattgttatctttagatgtagatactgagactcaaaaaaagttacctgaaaggaaatgggctatcgttacctctggttctccatatttggcattttcttggttcgagacaatattgaaaaatgttggaaagcccaaagttttcattactggatttgacgtgaagaacggtaagcctgatcccgagggttactctagagctcgtgatttattgcgtcaagatttgcaattaactggtaaacaggatttgaagtatgttgtctttgaagatgcacccgtgggcataaaggccggcaaagcaatgggcgcaattactgtgggtataacatccagctatgataagagcgttttatttgacgcaggtgcagattatgtggtctgtgatttgacacaggtttccgtggttaagaacaatgagaacggtatcgttatccaggtaaacaaccctttgacgagagattga

SEQ ID NO: 4915 - DNA, 741 bp, Saccharomyces cerevisiae
atggcagaattttcagctgatctatgtctttttgacctagatggtaccatagtgagtacaacagtggccgcagagaaagcatggaccaagttgtgttacgaatacggtgttgatccttccgagttatttaagcattctcatggtgcaagaacacaagaggttttgagaaggtttttccctaaattggatgatacagacaataaaggtgttcttgctctagaaaaagatattgcccatagttacttggacacagtaagccttattcctggtgcagagaacttactgttatcgttagatgtagatactgagactcaaaaaaagttacctgaaaggaaatgggctatcgttacctctggttctccatatttggcattttcatggttcgagacaatattgaaaaatgttggaaagcccaaagttttcattactgggtttgacgtgaagaacggtaagcctgatcccgagggttattcaagagctcgtgatttattgcgtcaagatttgcaattaactggtaaacaggatctgaagtatgttgtcttcgaagatgcacccgtgggcataaaggccggcaaagcaatgggcgccattactgtgggtataacatcctcgtatgacaagagcgttttatttgacgcaggagcagattatgtagtctgtgatttgacacaggtttccgtggttaagaacaatgaaaacggtattgtcatccaggtaaacaaccctttgacaagggcctga

SEQ ID NO: 4916 - DNA, 741 bp, Artificial Sequence
  Description of Artificial Sequence: Synthetic polynucleotide
atggcagaattttctgctgatttatgtctttttgacttggatggtaccatagtgagtacaacagtggccgcagagaaagcatggaccaagttgtgttacgaatacggtgttgatccttccgagttatttaagcattctcatggtgcaagaacacaagaggttttgagaaggtttttccctaaattggatgatacagacaataaaggtgttcttgctttggaaaaagatattgcccatagttacttggacacagtaagccttattcctggtgcagagaacttattattatctttagatgtagatactgagactcaaaaaaagttacctgaaaggaaatgggctatcgttacctctggttctccatatttggcattttcttggttcgagacaatattgaaaaatgttggaaagcccaaagttttcattactgggtttgacgtgaagaacggtaagcctgatcccgagggttattctagagctcgtgatttattgcgtcaagatttgcaattaactggtaaacaggatttgaagtatgttgtcttcgaagatgcacccgtgggcataaaggccggcaaagcaatgggcgccattactgtgggtataacatccagctatgacaagagcgttttatttgacgcaggagcagattatgtagtctgtgatttgacacaggtttccgtggttaagaacaatgaaaacggtattgtcatccaggtaaacaaccctttgacaagggcctga

SEQ ID NO: 4917 - DNA, 1683 bp, Saccharomyces cerevisiae
atgaattggtcttttctactacagctggtaataacaatattgttaattgtgctgggcgccaactggttgctaagctcttttctacttgattttaagagagatttaacaggggtggctttgtcacagcaatctagcatatccagtgttcgtaaagaaaatgaaacagcatattatcgaagcattttagtgcccacaggattcccattgacgacaggattagggctatctttaaaatacaaaataagaaatggcaatttcggtgatgtttggaatgccataatggaagtttccaagggaaaaaacataattaaatttacaggaagagaaaaaagttattcgttgagtgaacttaatggtatggccaagcgcatatttccgaaactttccaataagaatttcaaaaatatcggtatagctaattctattgctaccgtagagggttttactctctccttggcttccatgatgacctctataagaacaggttcaatacctcatttcttgccagctgttcctagacaacgactagaagatgttgatgtcctgatcatcgactcatggaagtcttttaagatgctaaacggcagcgaggattggtacaagcttattgttgtttgcgatgatcctatcgaatcactacaatttgatgcgaactgtgatgttatcacttggaaagaacttatcgacggttttaccaaggatacagagtaccaatacaccccgccagatgacaactctgatgataagaaactttttgcatacgtaacttcaccatggaatggaactaatagttttaatcaaatctgtctggtgagtaatatagcggaattcatcaaagggttccccttgggaaatgaattgaatagtaatgaatacctaaccatttcgacaaaattggcaaattctagtgcaagcctacaaatttggggaaagctttttgcagttttgctgcatggtgggtctgcatctttcatcaatcctacaacgatagattgcgagtcgttgcaagaaactacgttactgtttaccgaaacaaaggatgttgtcaaattaattgattctaattctagaagtgggctgctgaataaaatctacttatcctgggccacgaacttactgagcgagggtatttttacgaaaattgccagaatcgagccacattctcttgaaaaattaagatgtgtttatttggcagataatgtgaaagatgctgaggttatttcgacatttcctgaaaaaattcctcagctaaaaaagactaaccgaagaatcaccccaagcactgaacaattgaataaaataagagctcaattaggatcccgtgtagtcctcgagttatattgtccctacgctatcatgggacctgtggcacataccaatttttatgactatagggtttttggaaaatctgtggacgataacgttgtatgttatggaacactaagtacaacattagaaggaaaaatggtagaaacggaaacaaaccctcatttgaacatagagaagaagcagggtatgttatgtattcgtggttttagcataggtaaaccagtagagtccgatcgtttagagaaagctttgcatttagctgaaaggtttggaggaggtgaaggatggatgcctctagttggcgtttttggactatttggccaagacggttgcttatacatctataatcaatga

SEQ ID NO: 4918 - DNA, 1683 bp, Artificial Sequence
  Description of Artificial Sequence: Synthetic polynucleotide
atgaattggtcttttttattgcagttggtaataacaatattgttaattgtgttaggcgccaactggttgttgagctcttttttacttgattttaagagagatttaacaggggtggctttgtctcagcaatctagcatatccagtgttcgtaaagaaaatgaaacagcatattatagaagcattttagtgcccacaggattcccattgacgacaggattagggttatctttaaaatacaaaataagaaatggcaatttcggtgatgtttggaatgccataatggaagtttccaagggaaaaaacataattaaatttacaggaagagaaaaaagttattctttgagtgaacttaatggtatggccaagcgcatatttccgaaactttccaataagaatttcaaaaatatcggtatagctaattctattgctaccgtagagggttttactctctccttggcttccatgatgacctctataagaacaggttccatacctcatttcttgccagctgttcctagacaaagattagaagatgttgatgtcttgatcatcgactcttggaagtcttttaagatgttgaacggcagcgaggattggtacaagcttattgttgtttgcgatgatcctatcgaatctttacaatttgatgcgaactgtgatgttatcacttggaaagaacttatcgacggttttaccaaggatacagagtaccaatacaccccgccagatgacaactctgatgataagaaactttttgcatacgtaacttctccatggaatggaactaatagttttaatcaaatctgtttggtgagtaatatagcggaattcatcaaagggttccccttgggaaatgaattgaatagtaatgaatacttgaccatttctacaaaattggcaaattctagtgcaagcttacaaatttggggaaagctttttgcagttttgttgcatggtgggtctgcatctttcatcaatcctacaacgatagattgcgagtctttgcaagaaactacgttactttttaccgaaacaaaggatgttgtcaaattaattgattctaattctagaagtgggttgttgaataaaatctacttatcctgggccacgaacttattaagcgagggtatttttacgaaaattgccagaatcgagccacattctcttgaaaaattaagatgtgtttatttggcagataatgtgaaagatgctgaggttatttctacatttcctgaaaaaattcctcagttgaaaaagactaacagaagaatcaccccaagcactgaacaattgaataaaataagagctcaattaggatcccgtgtagtcctcgagttatattgtccctacgctatcatgggacctgtggcacataccaatttttatgactatagggtttttggaaaatctgtggacgataacgttgtatgttatggaacattgagtacaacattagaaggaaaaatggtagaaacggaaacaaaccctcatttgaacatagagaagaagcagggtatgttatgtattcgtggttttagcataggtaaaccagtagagtccgatcgtttagagaaagctttgcatttagctgaaaggtttggaggaggtgaaggatggatgcctttggttggcgtttttggattatttggccaagacggttgcttatacatctataatcaatga

SEQ ID NO: 4919 - DNA, 888 bp, Saccharomyces cerevisiae
atgaccattgatctagcttctatcgagaaattcctctgtgaactggctactgaaaaagtaggaccaatcatcaaatccaagtccggcactcaaaaggattatgacttgaagactggctccaggagcgttgatattgtaactgctatcgataaacaggtcgaaaagttaatttgggaatcggtaaaaacccaatatccaactttcaagtttattggagaggaaagttatgtgaaaggggagaccgtgattactgatgatcctacctttattattgatccaattgatgggactacaaactttgttcatgatttcccatttagctgtacctctcttgggctcacagtaaacaaagagcccgtagtaggcgttatatataatcctcacattaatcttctggtatccgcttctaaaggaaatgggatgagagttaacaacaaggactatgactataaatcaaaattggaatctatgggttctctaatactaaataaatccgtagtggcattacagccaggttccgctagagagggaaagaattttcagacaaaaatggccacatatgaaaaattactatcatgtgattacggttttgttcatggattcagaaatttaggatcatctgcaatgacaatggcatatattgctatggggtaccttgatagttattgggatggtggttgctattcgtgggacgtgtgtgctggatggtgtattttgaaagaagtgggcggtcgtgtagtaggtgccaatccaggtgaatggagtattgatgtcgacaataggacatatttggctgtgaggggaacaattaataacgaaagtgacgaacaaacaaaatatatcacagacttttggaactgtgttgatggccatttgaaatatgactga

SEQ ID NO: 4920 - DNA, 888 bp, Artificial Sequence
  Description of Artificial Sequence: Synthetic polynucleotide
atgaccattgatttggcttctatcgagaaattcctctgtgaattggctactgaaaaagtaggaccaatcatcaaatccaagtccggcactcaaaaggattatgacttgaagactggctccaggagcgttgatattgtaactgctatcgataaacaggtcgaaaagttaatttgggaaagtgtaaaaacccaatatccaactttcaagtttattggagaggaaagttatgtgaaaggggagaccgtgattactgatgatcctacctttattattgatccaattgatgggactacaaactttgttcatgatttcccatttagctgtacctctcttgggctcacagtaaacaaagagcccgtagtaggcgttatatataatcctcacattaatcttttggtatccgcttctaaaggaaatgggatgagagttaacaacaaggactatgactataaatctaaattggaatctatgggttctttgatattgaataaatccgtagtggcattacagccaggttccgctagagagggaaagaattttcagacaaaaatggccacatatgaaaaattattaagttgtgattacggttttgttcatggattcagaaatttaggatcttctgcaatgacaatggcatatattgctatggggtaccttgatagttattgggatggtggttgctattcttgggacgtgtgtgctggatggtgtattttgaaagaagtgggcggtcgtgtagtaggtgccaatccaggtgaatggagtattgatgtcgacaataggacatatttggctgtgaggggaacaattaataacgaaagtgacgaacaaacaaaatatatcacagacttttggaactgtgttgatggccatttgaaatatgactga

SEQ ID NO: 4921 - DNA, 2571 bp, Saccharomyces cerevisiae
atgtcccgtgaagtactgccaaacaacgttaccccattgcattatgacattacactagaacctaatttccgtgcttttacgtttgaagggtcattaaaaattgacctgcagattaatgatcattcgataaactctgtgcaaataaattacttagaaatagatttccattctgcacgtattgagggtgtcaatgccattgaagttaacaaaaacgaaaaccaacaaaaagctactcttgtctttcctaatggaacttttgaaaacctaggaccttctgcgaagttagaaattatcttttccggtattctaaatgatcagatggcgggattttacagggctaagtatacggataaagtcacaggggagacgaagtacatggctactactcagatggaagccacagatgctagaagagcctttccttgttttgacgaaccaaatttgaaggcgacttttgcagtaactttggtctctgaatcgtttctgactcatttgtccaacatggatgtcaggaatgaaacaatcaaagagggtaagaaatatacaacttttaacacgactccaaagatgtctacgtacttagtagcatttattgtagctgacctgagatacgtggaaagcaataatttccgtattccagtaagagtttattctaccccaggggacgaaaaatttggtcagtttgcagccaatttagctgctaggaccttgagattctttgaggacaccttcaacatagaatatccattgccaaagatggatatggtggcagttcatgagttttctgctggtgctatggaaaactgggggctagtgacttatagagttattgatttgttattagacatagaaaattcgagtttagatcgcattcaaagagttgctgaggttattcagcatgaactagcccaccaatggttcggcaacttggtcaccatggattggtgggaaggcttatggttgaatgaaggttttgccacttggatgtcttggtactcttgcaacaagtttcaaccagaatggaaagtttgggagcaatatgttactgacaatttacaacgtgctctaaatttagattcattaagatcttcccatccaattgaagttcccgttaataatgcggacgaaatcaatcaaatttttgatgctatttcttattctaaaggatcttctttattgaggatgatttccaaatggttgggtgaagagacttttattaaaggtgtgtcccaatacctgaataaattcaaatacggtaatgcaaagaccggagatttgtgggacgccttagcagatgcctctggcaaggacgtttgttcggtgatgaacatctggacaaaacgtgttggttttccagtgttatctgtcaaggaacacaagaacaaaatcacattaactcaacaccgttatttaagtaccggtgatgttaaagaagaggaagatacaaccatataccccattttgttagctttgaaagacagtacaggtatcgataacacattggtattgaacgaaaaatctgctactttcgaattaaagaatgaagagttcttcaagattaatggtgaccaatctggtattttcattacctcttattctgacgaaagatgggctaagctatccaaacaggcaaatttattatccgtagaggatcgtgttggcttagtcgcagatgcaaaagccctttctgcatctggctatacctctactactaacttcttgaatttaatttctaattggaaaaacgaggattcatttgttgtttgggaacaaatcattaatagtttatccgctctgaaatctacttgggtcttcgaaccagaggatatattgaatgctctagataaatttactttggatctagtacttaacaaactttctgaattggggtggaatattggcgaagacgactcctttgctatccaacgtttaaaagtgacccttttcagtgccgcatgcacttctggcaatgaaaaaatgcaatcgattgcggtagaaatgtttgaggaatacgccaatgggaacaaacaggccatacctgcactgttcaaggcagttgttttcaacaccgttgccagacttggcggagaaaacaattacgaaaagattttcaacatctatcaaaaccctgtttcgtcagaagaaaagattatcgctttgagagctttgggcagatttgaagacaaagaacttttagaaaggacattgtcttatctgctagatggtacagttttgaatcaagatttttacatcccaatgcaaggcattagagttcataagaagggtattgaaaggttatgggcttggatgcaagaacactgggacgaaattgctaagagattacagccaggctcgcctgtgttgggtggcgtgttgacattgggtttaactaattttacctcttttgaagcccttgaaaaaattagtgcgttctatagtagaaaggtcactaaaggttttgatcaaaccctggctcaagccttagacactattagatccaaggcgcaatgggtgagcagagatcgtgaaatcgttgctacctacttgcgtgagcatgagtatgatcaatag

SEQ ID NO: 4922 - DNA, 2571 bp, Artificial Sequence
  Description of Artificial Sequence: Synthetic polynucleotide
atgtcccgtgaagtattgccaaacaacgttaccccattgcattatgacattacattagaacctaatttccgtgcttttacgtttgaagggtctttaaaaattgacttacagattaatgatcattccataaactctgtgcaaataaattacttagaaatagatttccattctgcacgtattgagggtgtcaatgccattgaagttaacaaaaacgaaaaccaacaaaaagctactcttgtctttcctaatggaacttttgaaaacttgggaccttctgcgaagttagaaattatcttttccggtattttgaatgatcagatggcgggattttacagggctaagtatacggataaagtcacaggggagacgaagtacatggctactactcagatggaagccacagatgctagaagagcctttccttgttttgacgaaccaaatttgaaggcgacttttgcagtaactttggtctctgaaagttttttaactcatttgtccaacatggatgtcaggaatgaaacaatcaaagagggtaagaaatatacaacttttaacacgactccaaagatgtctacgtacttagtagcatttattgtagctgacttgagatacgtggaaagcaataatttccgtattccagtaagagtttattctaccccaggggacgaaaaatttggtcagtttgcagccaatttagctgctaggaccttgagattctttgaggacaccttcaacatagaatatccattgccaaagatggatatggtggcagttcatgagttttctgctggtgctatggaaaactgggggttagtgacttatagagttattgatttgttattagacatagaaaatagtagtttagatcgcattcaaagagttgctgaggttattcagcatgaattggcccaccaatggttcggcaacttggtcaccatggattggtgggaaggcttatggttgaatgaaggttttgccacttggatgtcttggtactcttgcaacaagtttcaaccagaatggaaagtttgggagcaatatgttactgacaatttacaacgtgctttgaatttagattctttaagatcttcccatccaattgaagttcccgttaataatgcggacgaaatcaatcaaatttttgatgctatttcttattctaaaggatcttctttattgaggatgatttccaaatggttgggtgaagagacttttattaaaggtgtgtcccaatacttgaataaattcaaatacggtaatgcaaagaccggagatttgtgggacgccttagcagatgcctctggcaaggacgtttgttctgtgatgaacatctggacaaaacgtgttggttttccagtgttatctgtcaaggaacacaagaacaaaatcacattaactcaacaccgttatttaagtaccggtgatgttaaagaagaggaagatacaaccatataccccattttgttagctttgaaagacagtacaggtatcgataacacattggtattgaacgaaaaatctgctactttcgaattaaagaatgaagagttcttcaagattaatggtgaccaatctggtattttcattacctcttattctgacgaaagatgggctaagttatccaaacaggcaaatttattatccgtagaggatcgtgttggcttagtcgcagatgcaaaagccctttctgcatctggctatacctctactactaacttcttgaatttaatttctaattggaaaaacgaggattcttttgttgtttgggaacaaatcattaatagtttatccgctttgaaatctacttgggtcttcgaaccagaggatatattgaatgctttagataaatttactttggatttagtacttaacaaactttctgaattggggtggaatattggcgaagacgactcctttgctatccaacgtttaaaagtgacccttttcagtgccgcatgcacttctggcaatgaaaaaatgcaatctattgcggtagaaatgtttgaggaatacgccaatgggaacaaacaggccatacctgcattattcaaggcagttgttttcaacaccgttgccagacttggcggagaaaacaattacgaaaagattttcaacatctatcaaaaccctgtttcttctgaagaaaagattatcgctttgagagctttgggcagatttgaagacaaagaacttttagaaaggacattgtcttatttattagatggtacagttttgaatcaagatttttacatcccaatgcaaggcattagagttcataagaagggtattgaaaggttatgggcttggatgcaagaacactgggacgaaattgctaagagattacagccaggctctcctgtgttgggtggcgtgttgacattgggtttaactaattttacctcttttgaagcccttgaaaaaattagtgcgttctatagtagaaaggtcactaaaggttttgatcaaaccttggctcaagccttagacactattagatccaaggcgcaatgggtgagcagagatcgtgaaatcgttgctacctacttgcgtgagcatgagtatgatcaatga

SEQ ID NO: 4923 - DNA, 1545 bp, Saccharomyces cerevisiae
atggttgcagaatttcaaatagcgagtgcacagtcatcggcattgacatctactgaagaagagcattgttcaataaactcagacaaagccgcaaaactggatctggaattgaccagtgaacgaaaaaatgacggcaaacaatcgcatgaagtgaccttcaacgaggacatcgcggacccagaagatatagcacggcatatgagcaccgcccgccggtattatatttcctcgttaattacattcacatcgatggtaattacgatgatctcgtccagctggacgcttccttcaacgcacataatcgaacactttcatatttcgcacgaagtcagcactctgggaattacgctttatgtgtttgggctcggtataggacctttatttctgtctccactaagtgaactatatggacgaaggatcacatttttatacgcccttacgctcagtatcatatggcagtgtttgaccatttggtccaagaccattacgggtgtcatgtttggcagatttctatccgggttttttggttcagcctttctaagtgtggctggcggcgccattgccgatatattcgacaaagaccaaattggtattcctatggcaatatacactacatcggcctttttggggccctctttaggaccaatcattggtggagccttataccatcaaagttataaatggacatttatcacacttctcatcacttctggatgttgtctcgttatgatcatctttaccatacctgaaacctacaaaccaatgctgttaatacgtaaagctaagagattgaggaaagagaaaaatgatcaacggtattatgctgtcctggaagtcacccgcgaacagacttccttactttccgcaatctttctctcaaccaaaagaccctttggcctgttacttcgagaccgaatgatgggtgtgctttgcttctatactggattggaacttgccataatatatttatatttcgtagcgtttccttatgtgttcaagaaactttacaactttgggcccatggagattgcatgctcctatatcggtattatggtcggcatgatactctcggctcctacttgcttgttattccaaaaaacgtttgagtggagagtcaaaagaaataatggcgtcaagactcccgaaatgagattcgagcctctgttctacggcgcctttttgaccccagttgggctcttcatttttgcattcacctgctacaagcatgtccattggattgcaccaattataggcagtgcaattttcggttcaggtgtttatttcgtctttaccggtgtttttgcgtatacagtggatgcctatagaagatatgcagcttctggaatggcttgtaacacatttgtgagatgcataatggccggtgtcttccctcttttcggactccagatgtacaagtcaatgggagtgaattgggccggctttctcttggcaatggtgaccgtagcgatgattcctgtcccatttctgtttaccaaatacggtgcccgactgagagccaagtcgccgtatgcatgggatgattga

SEQ ID NO: 4924 - DNA, 1545 bp, Artificial Sequence
  Description of Artificial Sequence: Synthetic polynucleotide
atggttgcagaatttcaaatagcgagtgcacagtcttctgcattgacatctactgaagaagagcattgttctataaacagcgacaaagccgcaaaattggatttggaattgaccagtgaaagaaaaaatgacggcaaacaatctcatgaagtgaccttcaacgaggacatcgcggacccagaagatatagcaagacatatgagcaccgcccgcagatattatatttcctctttaattacattcacatctatggtaattacgatgatctcttccagctggacgcttccttctacgcacataatcgaacactttcatatttctcacgaagtcagcactttgggaattacgctttatgtgtttgggctcggtataggacctttatttttatctccattaagtgaattgtatggaagaaggatcacatttttatacgcccttacgctcagtatcatatggcagtgtttgaccatttggtccaagaccattacgggtgtcatgtttggcagatttctttccgggttttttggttctgcctttttgagtgtggctggcggcgccattgccgatatattcgacaaagaccaaattggtattcctatggcaatatacactacatctgcctttttggggccctctttaggaccaatcattggtggagccttataccatcaaagttataaatggacatttatcacacttctcatcacttctggatgttgtctcgttatgatcatctttaccatacctgaaacctacaaaccaatgcttttaatacgtaaagctaagagattgaggaaagagaaaaatgatcaaagatattatgctgtcttggaagtcacccgcgaacagacttccttactttccgcaatctttctctctaccaaaagaccctttggcttattacttcgtgacagaatgatgggtgtgctttgcttctatactggattggaacttgccataatatatttatatttcgtagcgtttccttatgtgttcaagaaactttacaactttgggcccatggagattgcatgctcctatatcggtattatggtcggcatgatactctctgctcctacttgcttgttattccaaaaaacgtttgagtggagagtcaaaagaaataatggcgtcaagactcccgaaatgagattcgagcctcttttctacggcgcctttttgaccccagttgggctcttcatttttgcattcacctgctacaagcatgtccattggattgcaccaattataggcagtgcaattttcggttctggtgtttatttcgtctttaccggtgtttttgcgtatacagtggatgcctatagaagatatgcagcttctggaatggcttgtaacacatttgtgagatgcataatggccggtgtcttccctcttttcggactccagatgtacaagtctatgggagtgaattgggccggctttctcttggcaatggtgaccgtagcgatgattcctgtcccatttttgtttaccaaatacggtgccaggttaagagccaagagcccgtatgcatgggatgattga

SEQ ID NO: 4925 - DNA, 732 bp, Saccharomyces cerevisiae
atgactgtacaaattccaaaattattatttttacacggcttcttgcaaaacggtaaagttttctccgaaaaatcatctggtattagaaaattattgaagaaggctaatgtccaatgtgactatattgatgcaccagtccttttagaaaagaaggacttgccatttgaaatggatgatgaaaaatggcaagccaccctagatgcggatgttaacagagcctggttctatcacagcgaaatctctcacgaattggatatctcagaaggtttgaagtctgttgttgatcacatcaaggccaatggcccatacgacggcattgtcggtttctctcaaggtgccgcattgtcctctatcatcaccaacaagatctcagagttagttccagaccatccacaattcaaggtaagtgtagtcatttccggctattccttcaccgagccagacccagaacatcctggagaattgagaataaccgaaaaattcagagactcatttgcggtaaaaccagacatgaagaccaagatgatcttcatctatggtgcttctgaccaagccgtcccatccgtcagatccaagtacctgtacgatatttatttgaaggcgcaaaatggtaataaggaaaaggtgttggcttacgaacaccctggtggacatatggttccaaacaagaaggacattatcagaccaattgttgaacaaataacctcttccttacaagaagcttctgaataa

SEQ ID NO: 4926 - DNA, 732 bp, Artificial Sequence
  Description of Artificial Sequence: Synthetic polynucleotide
atgactgtacaaattccaaaattattatttttacacggcttcttgcaaaacggtaaagttttctccgaaaaatcttctggtattagaaaattattgaagaaggctaatgtccaatgtgactatattgatgcaccagtccttttagaaaagaaggacttgccatttgaaatggatgatgaaaaatggcaagccaccttggatgcggatgttaacagagcctggttctatcacagcgaaatctctcacgaattggatatcagtgaaggtttgaagtctgttgttgatcacatcaaggccaatggcccatacgacggcattgtcggtttctctcaaggtgccgcattgtcctctatcatcaccaacaagatctctgagttagttccagaccatccacaattcaaggtaagtgtagtcatttccggctattccttcaccgagccagacccagaacatcctggagaattgagaataaccgaaaaattcagagactcttttgcggtaaaaccagacatgaagaccaagatgatcttcatctatggtgcttctgaccaagccgtcccatccgtcagatccaagtacttgtacgatatttatttgaaggcgcaaaatggtaataaggaaaaggtgttggcttacgaacaccctggtggacatatggttccaaacaagaaggacattatcagaccaattgttgaacaaataacctcttccttacaagaagcttctgaatga

SEQ ID NO: 4927 - DNA, 1650 bp, Saccharomyces cerevisiae
atgacgtcccaagaatatgaacctattcaatggagcgatgaatcccaaacaaataatgatagtgtcaacgatgcgtatgccgacgtgaataccactcatgagtcgcgtcgaagaacaactttgcagccaaactcaacatcccagagcatgatcggaacattgagaaaatatgctaggttcatcggtcctggtttgatggtatctgtatcgtacatggatcctggtaactatagtacagctgtagcagcgggttctgctcatcggtacaagcttttattttctgtcttagtttctaatttcatggctgctttttggcagtacctctgcgccagattgggtgctgtcactggcctagatctggcacaaaattgtaagaaacatttgccctttggacttaacattactctttatattctggcggagatggcaattattgccacagatctggcagaagtggtaggaaccgctatttctttgaatatccttttccatatacctctcgccctaggtgtgatacttactgtggtagacgttttaattgttctgctagcttacaaacctaacggttccatgaagggtatcagaatatttgaagcttttgtttctttattggtggttcttaccgtagtttgctttactgttgaactgttttatgccaaactgggacctgccaaagaaatattttctgggttcttacccagtaaagccgtttttgaaggtgatgggttatacttaagtctggcaattctgggcgccacggtaatgcctcattcattatatttggggtcaggtgtggttcaaccaagattaagagagtatgatatcaaaaacggacattacttgccagacgcgaatgatatggataacaatcacgataattacaggccatcctatgaggccatcagtgaaactctgcactttactataacggaattactgatctcgctgttcacggtggcattatttgtcaattgtgccattcttatcgtgtctggcgctacactatacgggtccactcaaaatgctgaggaagctgacttattttctatttacaacttactctgtagtactctttccaagggagcgggaacggtattcgtgctggcattgttgttttcaggacagagtgccggtatcgtgtgtacgttgagtggacaaatggttagtgaagggttcttaaattggactgtttctccggcattgagaagatccgccacaagagcggtagccatcacgccttgtttgattttagtgcttgtagctggacgtagcggcctctctggtgcactaaatgcttcccaagtggtactttctctcttgctgccttttgtttctgcacctttactttacttcacttcaagcaagaagattatgcgtgtacagcttaaccgtaccaaagaactttcaagaactacagacaaaaaacccgtggccgaccgaaccgaagatgatgagaccattgagctcgaagaaatgggcataggcagcagctcacaggagcgcagcttagtttctcctgctccagaatacaaagacatgagcaatggaatgatcgtcaccgtgctcgcaatcatagtatggttgattatctccggactgaacttttatatgttactgggctttactacgggcaaagaagtacacctctaa

SEQ ID NO: 4928 - DNA, 1650 bp, Artificial Sequence
  Description of Artificial Sequence: Synthetic polynucleotide
atgacgtcccaagaatatgaacctattcaatggagcgatgaatcccaaacaaataatgatagtgtcaacgatgcgtatgccgacgtgaataccactcatgagtctcgtagaagaacaactttgcagccaaactccacatcccagagcatgatcggaacattgagaaaatatgctaggttcatcggtcctggtttgatggtatctgtatcttacatggatcctggtaactatagtacagctgtagcagcgggttctgctcatcgttacaagcttttattttctgtcttagtttctaatttcatggctgctttttggcagtacctctgcgccagattgggtgctgtcactggcttggatttggcacaaaattgtaagaaacatttgccctttggacttaacattactctttatattttggcggagatggcaattattgccacagatttggcagaagtggtaggaaccgctatttctttgaatatccttttccatatacctctcgcccttggtgtgatacttactgtggtagacgttttaattgttttgttggcttacaaacctaacggttccatgaagggtatcagaatatttgaagcttttgtttctttattggtggttcttaccgtagtttgctttactgttgaattattttatgccaaattaggacctgccaaagaaatattttctgggttcttacccagtaaagccgtttttgaaggtgatgggttatacttaagtttagcaattttgggcgccacggtaatgcctcattctttatatttggggtctggtgtggttcaaccaagattaagagagtatgatatcaaaaacggacattacttgccagacgcgaatgatatggataacaatcacgataattacaggccatcctatgaggccatcagtgaaactttgcactttactataacggaattattgatctctttattcacggtggcattatttgtcaattgtgccattcttatcgtgtctggcgctacattgtacgggtccactcaaaatgctgaggaagctgacttattttctatttacaacttactctgtagtactctttccaagggagcgggaacggtattcgtgttggcattgttgttttctggacagagtgccggtatcgtgtgtacgttgagtggacaaatggttagtgaagggttcttaaattggactgtttctccggcattgagaagatccgccacaagagcggtagccatcacgccttgtttgattttagtgcttgtagctggacgtagcggcctctctggtgcattgaatgcttcccaagtggtactttctctcttgttaccttttgtttctgcacctttactttacttcacttccagcaagaagattatgcgtgtacagcttaaccgtaccaaagaactttctagaactacagacaaaaaacccgtggccgacagaaccgaagatgatgagaccattgagctcgaagaaatgggcataggcagcagctctcaggagcgcagcttagtttctcctgctccagaatacaaagacatgagcaatggaatgatcgtcaccgtgctcgcaatcatagtatggttgattatctccggattgaacttttatatgttattaggctttactacgggcaaagaagtacacctctga

SEQ ID NO: 4929 - DNA, 171 bp, Saccharomyces cerevisiae
atgaaaagggacctaattggtccggtcaaagcattaataaagatcaacaattgctcttgcttatcaaggtgccagatctcaaggttacctcatttctttacatttcatccacattttagcacacttatttattattacaatttgaaaaattgtatcacttctgagacttag

SEQ ID NO: 4930 - DNA, 171 bp, Artificial Sequence
  Description of Artificial Sequence: Synthetic polynucleotide
atgaaaagggacttgattggtccggtcaaagcattaataaagatcaacaattgctcttgcttatctaggtgccagatctccaggttacctcatttctttacatttcatccacattttagcacacttatttattattacaatttgaaaaattgtatcacttctgagacttga

SEQ ID NO: 4931 - DNA, 447 bp, Saccharomyces cerevisiae
atgttatcaagggccatattcagaaatccagttataaatagaactttattgagagccagacctggtgcttatcatgcaactagattgactaaaaatacgtttattcaaagtaggaagtattctgacgcacatgatgaagaaacctttgaggaattcaccgcaagatacgaaaaggagtttgatgaagcctatgatttgtttgaagtgcaaagagtgctcaacaactgtttttcctatgatttagttcctgctcctgctgttattgaaaaagctttgagggctgccagaagagtcaatgacttacctaccgcaattagagtatttgaggctttgaaatacaaggtggagaatgaagaccaatacaaggcctacttggatgaattgaaggatgtcagacaagaattgggcgttcccttaaaggaagagctatttccaagctcttcttaa

SEQ ID NO: 4932 - DNA, 447 bp, Artificial Sequence
  Description of Artificial Sequence: Synthetic polynucleotide
atgttatctagggccatattcagaaatccagttataaatagaactttattgagagccagacctggtgcttatcatgcaactagattgactaaaaatacgtttattcaaagtaggaagtattctgacgcacatgatgaagaaacctttgaggaattcaccgcaagatacgaaaaggagtttgatgaagcctatgatttgtttgaagtgcaaagagtgctcaacaactgtttttcctatgatttagttcctgctcctgctgttattgaaaaagctttgagggctgccagaagagtcaatgacttacctaccgcaattagagtatttgaggctttgaaatacaaggtggagaatgaagaccaatacaaggcctacttggatgaattgaaggatgtcagacaagaattgggcgttcccttaaaggaagagttatttccaagctcttcttga

SEQ ID NO: 4933 - DNA, 1131 bp, Saccharomyces cerevisiae
atggctaaaaagagtaactcaaagaaatctacgcctgtaagtacaccaagcaaagaaaagaagaaggttattgaaaagaaatcttccacagccattcctagggaaagagttattaaagctgtcaacgagcttataaaattcacttccaagccacaagatgaaaataatgaagaaggaaataacggtaagaaaaacctattggaagatgatgaagaagaattgaagaaagatctgcaattaatcgtagtaaataataaatcattcaccggtacttccaaatcattcaaattgaaattactaaatgtcaaacattcgttttacaagccttggaaagaagccagtgcaacagcggttaaggatttcaaagttttattaattttgaaggattctgatattaagaaagtttcagaagatgatttatttgatcaattagattcagaaggaatcaaggttgatgaaatcatttgcgggaaagacttaaagaccgtttacaaggcatatgaggctagaaacgcttttatatctcagttttctttgattttggctgacgacagtatagttacatctttgccaaaacttatgggaggcaaagcctacaacaaagtagaaactactcctatatcaattagaacacatgcaaataaggaattttccttgaccactttgacgaacaatatcaaaaaggtttacatgaatcagttgcccgttaaacttccaagaggtaccacgttgaatgtccatttgggtaatttagaatggttaaggccagaagagtttgtagataacgttgaattaatttctgaacagttaatcaaagcataccaaatcagatccatttttatcaagaccaataggtcgcccgtattgccattatactataaccaggacgttcttgatgaacttgaagctaaaaaggacaaaatcgaagaaacccacgaagatgacatggtcaccattgatggtgtacaagttcatttgtctaccttcaacaagggtttgatggaaatcgccaatccttccgaattgggttcaattttctctaaacaaattaacaatgcaaaaaagagatcttctagcgagcttgaaaaagaatctagcgagtcagaagctgtcaagaaggctaaaagttaa

SEQ ID NO: 4934 - DNA, 1131 bp, Artificial Sequence
  Description of Artificial Sequence: Synthetic polynucleotide
atggctaaaaagagtaactccaagaaatctacgcctgtaagtacaccaagcaaagaaaagaagaaggttattgaaaagaaatcttccacagccattcctagggaaagagttattaaagctgtcaacgagcttataaaattcacttccaagccacaagatgaaaataatgaagaaggaaataacggtaagaaaaaccttttggaagatgatgaagaagaattgaagaaagatttgcaattaatcgtagtaaataataaatctttcaccggtacttccaaatctttcaaattgaaattattgaatgtcaaacattctttttacaagccttggaaagaagccagtgcaacagcggttaaggatttcaaagttttattaattttgaaggattctgatattaagaaagtttctgaagatgatttatttgatcaattagattctgaaggaatcaaggttgatgaaatcatttgcgggaaagacttaaagaccgtttacaaggcatatgaggctagaaacgcttttatatctcagttttctttgattttggctgacgacagtatagttacatctttgccaaaacttatgggaggcaaagcctacaacaaagtagaaactactcctatatctattagaacacatgcaaataaggaattttccttgaccactttgacgaacaatatcaaaaaggtttacatgaatcagttgcccgttaaacttccaagaggtaccacgttgaatgtccatttgggtaatttagaatggttaaggccagaagagtttgtagataacgttgaattaatttctgaacagttaatcaaagcataccaaatcagatccatttttatcaagaccaataggtctcccgtattgccattatactataaccaggacgttcttgatgaacttgaagctaaaaaggacaaaatcgaagaaacccacgaagatgacatggtcaccattgatggtgtacaagttcatttgtctaccttcaacaagggtttgatggaaatcgccaatccttccgaattgggttccattttctctaaacaaattaacaatgcaaaaaagagatcttctagcgagcttgaaaaagaatctagcgagagtgaagctgtcaagaaggctaaaagttga

SEQ ID NO: 4935 - DNA, 174 bp, Saccharomyces cerevisiae
atgaaggtcatgagtgccaatgccaatgtggtagctgcaaaaataatgaacaatgccaaaaatcatgtagctgcccaacggggtgtaacagcgacgacaaatgcccctgcggtaacaagtctgaagaaaccaagaagtcatgctgctctgggaaatgaaacgaatagtctttaa

SEQ ID NO: 4936 - DNA, 174 bp, Artificial Sequence
  Description of Artificial Sequence: Synthetic polynucleotide
atgaaggtcatgagtgccaatgccaatgtggtagctgcaaaaataatgaacaatgccaaaaatcatgtagctgcccaaagaggtgtaacagcgacgacaaatgcccctgcggtaacaagtttgaagaaaccaagaagtcatgctgctttaggaaatgaaacgaatagtctttga

SEQ ID NO: 4937 - DNA, 186 bp, Saccharomyces cerevisiae
atgttcagcgaattaattaacttccaaaatgaaggtcatgagtgccaatgccaatgtggtagctgcaaaaataatgaacaatgccaaaaatcatgtagctgcccaacggggtgtaacagcgacgacaaatgcccctgcggtaacaagtctgaagaaaccaagaagtcatgctgctctgggaaatga

SEQ ID NO: 4938 - DNA, 186 bp, Artificial Sequence
  Description of Artificial Sequence: Synthetic polynucleotide
atgttcagcgaattaattaacttccaaaatgaaggtcatgagtgccaatgccaatgtggtagctgcaaaaataatgaacaatgccaaaaaagttgtagctgcccaacggggtgtaacagcgacgacaaatgcccctgcggtaacaagtctgaagaaaccaagaagtcttgctgctctgggaaatga

SEQ ID NO: 4939 - DNA, 1065 bp, Saccharomyces cerevisiae
atggtacccgctgctgaaaacctatctccgatacctgcctctattgatacgaacgacattcctttaattgctaacgatttaaaattactggaaacgcaagcaaaattgataaatattctgcaaggtgttcctttctacttgccagtaaatttaaccaaaattgaaagtctgttagaaaccttgactatgggcgtgagtaatacagtagacttatattttcatgacaacgaagtcagaaaagaatggaaagacactttaaattttatcaataccattgtttatacaaattttttcctttttgttcaaaacgaatcctctttgtccatggcagttcaacattcttctaacaacaataagacctcgaactctgaaagatgtgcaaaggatctgatgaaaattatttctaatatgcacattttttactcaataacatttaattttatcttccccataaagtcgataaagtcattttcaagcggcaataatcgctttcattctaatggtaaagaatttttattcgcaaatcattttattgaaatcttacagaattttatagcaatcacatttgctattttccaacgttgtgaagtaatattatatgacgaattttacaaaaatctttcaaatgaggagattaatgttcaattgctattgattcatgacaagattttggaaattttaaaaaaaatagaaattatcgtatcctttttacgagatgaaatgaatagcaacggaagtttcaaatctattaaaggtttcaacaaggttttgaatctgattaaatatatgctgagatttagcaagaaaaaacaaaattttgcgagaaactctgataacaataatgttacagattatagtcagtcggcgaagaacaaaaatgttctcttgaaattccccgttagtgaactgaacagaatctatttaaaatttaaggagatttcagattttttaatggaaagagaagttgtccaaaggagtataattattgacaaggatttggaatctgataatctgggtattactacggcaaacttcaacgatttctatgatgcattttataattag

SEQ ID NO: 4940 - DNA, 1065 bp, Artificial Sequence
  Description of Artificial Sequence: Synthetic polynucleotide
atggtacccgctgctgaaaacttatctccgatacctgcctctattgatacgaacgacattcctttaattgctaacgatttaaaattattggaaacgcaagcaaaattgataaatattttacaaggtgttcctttctacttgccagtaaatttaaccaaaattgaaagtttgttagaaaccttgactatgggcgtgagtaatacagtagacttatattttcatgacaacgaagtcagaaaagaatggaaagacactttaaattttatcaataccattgtttatacaaattttttcctttttgttcaaaacgaatcctctttgtccatggcagttcaacattcttctaacaacaataagaccagtaactctgaaagatgtgcaaaggatttgatgaaaattatttctaatatgcacattttttactctataacatttaattttatcttccccataaagagtataaagagcttttctagcggcaataatcgctttcattctaatggtaaagaatttttattcgcaaatcattttattgaaatcttacagaattttatagcaatcacatttgctattttccaacgttgtgaagtaatattatatgacgaattttacaaaaatctttctaatgaggagattaatgttcaattgttgttgattcatgacaagattttggaaattttaaaaaaaatagaaattatcgtatcctttttaagagatgaaatgaatagcaacggaagtttcaaatctattaaaggtttcaacaaggttttgaatttaattaaatatatgttgagatttagcaagaaaaaacaaaattttgcgagaaactctgataacaataatgttacagattatagtcagtctgcgaagaacaaaaatgttctcttgaaattccccgttagtgaattgaacagaatctatttaaaatttaaggagatttctgattttttaatggaaagagaagttgtccaaaggagtataattattgacaaggatttggaatctgataatttgggtattactacggcaaacttcaacgatttctatgatgcattttataattga

SEQ ID NO: 4941 - DNA, 174 bp, Saccharomyces cerevisiae; identical to SEQ ID NO: 4935

SEQ ID NO: 4942 - DNA, 174 bp, Artificial Sequence; identical to SEQ ID NO: 4936
  Description of Artificial Sequence: Synthetic polynucleotide

SEQ ID NO: 4943 - DNA, 186 bp, Saccharomyces cerevisiae; identical to SEQ ID NO: 4937

SEQ ID NO: 4944 - DNA, 186 bp, Artificial Sequence; identical to SEQ ID NO: 4938
  Description of Artificial Sequence: Synthetic polynucleotide

SEQ ID NO: 4945 - DNA, 2652 bp, Saccharomyces cerevisiae
atgatggacatgcaagtgagaaaagtgaggaagccgcctgcttgcacccaatgcaggaagagaaagatcgggtgcgacagggcaaaaccgatatgtgggaattgcgtcaagtataacaagccggactgtttttatccagatggacctggtaagatggtcgctgtgccctctgcgtccgggatgtccacgcacggcaatggccaaggttccaaccattttagtcagggaaacggtgtaaatcagaaaaacgtaatgattcaaacgcagtatccgattatgcaaacgtcgatagaggcattcaacttctcgttcaacccctctgtggatactgcgatgcagtggaccaaggccgctagctaccagaataataacaccaataataatactgctcctcgtcagaatagtagtaccgttagtagtaatgttcatggaaacactattgtgagaagcgatagtccagatgtgccctccatggatcagattagagaatataacacacgattacaactggttaacgctcaaagttttgactatacagataacccatactcttttaatgttggtatcaatcaagactcggccgttttcgatctaatgacttctccgtttactcaagaggaagtattaatcaaggagatagactttttaaaaaacaaattgcttgatttacaaagcttgcaactgaaaagtttgaaagaaaaatcgaatttaaatgccgacaataccacggcaaacaaaattaacaaaacaggtgagaattctaagaaaggcaaggttgacggtaaaagagccggatttgatcatcagacttcaaggacttctcagtcctcacaaaaatactttacagcgctcacaataacagatgtgcaaagtttagtccaagtgaaaccgttgaaggatacccccaactaccttttcactaaaaacttcatcatttttagagatcattatcttttcaagttctataatattttgcacgatatctgccatattaatcagttcaaagtaagtcctcctaacaataaaaatcaccaacaatatatggaagtttgcaaagttaacttcccaccaaaagcaataattattgagacactaaactctgaatcccttaacaatctgaatattgaagaatttttgccaatctttgacaaaaccctcttactagaatttgttcataactcttttccaaatggtgatacctgtccttcattctcaacggtcgatcttcctttatctcaactgaccaaactaggcgaattaactgtgcttctactgttgttaaacgattcaatgaccctattcaataagcaggctattaataaccatgtttcggcattaatgaataatttgaggttgattcgaagccaaatcacattgataaacctggaatattatgaccaagagacaatcaaatttattgccatcacaaaattttatgaatctctgtacatgcatgatgatcataaatcaagtttagacgaagatttgagctgtctgttaagcttccagataaaagatttcaagttattccattttttgaaaaaaatgtattactcaagacattcgcttctaggtcagtcttcattcatggtacccgctgctgaaaacctatctccgatacctgcctctattgatacgaacgacattcctttaattgctaacgatttaaaattactggaaacgcaagcaaaattgataaatattctgcaaggtgttcctttctacttgccagtaaatttaaccaaaattgaaagtctgttagaaaccttgactatgggcgtgagtaatacagtagacttatattttcatgacaacgaagtcagaaaagaatggaaagacactttaaattttatcaataccattgtttatacaaattttttcctttttgttcaaaacgaatcctctttgtccatggcagttcaacattcttctaacaacaataagacctcgaactctgaaagatgtgcaaaggatctgatgaaaattatttctaatatgcacattttttactcaataacatttaattttatcttccccataaagtcgataaagtcattttcaagcggcaataatcgctttcattctaatggtaaagaatttttattcgcaaatcattttattgaaatcttacagaattttatagcaatcacatttgctattttccaacgttgtgaagtaatattatatgacgaattttacaaaaatctttcaaatgaggagattaatgttcaattgctattgattcatgacaagattttggaaattttaaaaaaaatagaaattatcgtatcctttttacgagatgaaatgaatagcaacggaagtttcaaatctattaaaggtttcaacaaggttttgaatctgattaaatatatgctgagatttagcaagaaaaaacaaaattttgcgagaaactctgataacaataatgttacagattatagtcagtcggcgaagaacaaaaatgttctcttgaaattccccgttagtgaactgaacagaatctatttaaaatttaaggagatttcagattttttaatggaaagagaagttgtccaaaggagtataattattgacaaggatttggaatctgataatctgggtattactacggcaaacttcaacgatttctatgatgcattttataattag

SEQ ID NO: 4946 - DNA, 2652 bp, Artificial Sequence
  Description of Artificial Sequence: Synthetic polynucleotide
atgatggacatgcaagtgagaaaagtgaggaagccgcctgcttgcacccaatgcaggaagagaaagatcgggtgcgacagggcaaaaccgatatgtgggaattgcgtcaagtataacaagccggactgtttttatccagatggacctggtaagatggtcgctgtgccctctgcgtccgggatgtccacgcacggcaatggccaaggttccaaccattttagtcagggaaacggtgtaaatcagaaaaacgtaatgattcaaacgcagtatccgattatgcaaacgtctatagaggcattcaacttcagtttcaacccctctgtggatactgcgatgcagtggaccaaggccgctagctaccagaataataacaccaataataatactgctcctcgtcagaatagtagtaccgttagtagtaatgttcatggaaacactattgtgagaagcgatagtccagatgtgccctccatggatcagattagagaatataacacaagattacaattggttaacgctcaaagttttgactatacagataacccatactcttttaatgttggtatcaatcaagactctgccgttttcgatttgatgacttctccgtttactcaagaggaagtattaatcaaggagatagactttttaaaaaacaaattgcttgatttacaaagcttgcaattgaaaagtttgaaagaaaaatctaatttaaatgccgacaataccacggcaaacaaaattaacaaaacaggtgagaattctaagaaaggcaaggttgacggtaaaagagccggatttgatcatcagacttctaggacttctcagtcctctcaaaaatactttacagcgctcacaataacagatgtgcaaagtttagtccaagtgaaaccgttgaaggatacccccaactaccttttcactaaaaacttcatcatttttagagatcattatcttttcaagttctataatattttgcacgatatctgccatattaatcagttcaaagtaagtcctcctaacaataaaaatcaccaacaatatatggaagtttgcaaagttaacttcccaccaaaagcaataattattgagacattgaactctgaatcccttaacaatttgaatattgaagaatttttgccaatctttgacaaaaccctcttattggaatttgttcataactcttttccaaatggtgatacctgtccttctttcagtacggtcgatcttcctttatctcaattgaccaaattgggcgaattaactgtgcttttgttgttgttaaacgattctatgacccttttcaataagcaggctattaataaccatgtttctgcattaatgaataatttgaggttgattagaagccaaatcacattgataaacttggaatattatgaccaagagacaatcaaatttattgccatcacaaaattttatgaatctttgtacatgcatgatgatcataaatctagtttagacgaagatttgagctgtcttttaagcttccagataaaagatttcaagttattccattttttgaaaaaaatgtattactctagacattctcttttgggtcagtcttctttcatggtacccgctgctgaaaacttatctccgatacctgcctctattgatacgaacgacattcctttaattgctaacgatttaaaattattggaaacgcaagcaaaattgataaatattttacaaggtgttcctttctacttgccagtaaatttaaccaaaattgaaagtttgttagaaaccttgactatgggcgtgagtaatacagtagacttatattttcatgacaacgaagtcagaaaagaatggaaagacactttaaattttatcaataccattgtttatacaaattttttcctttttgttcaaaacgaatcctctttgtccatggcagttcaacattcttctaacaacaataagaccagtaactctgaaagatgtgcaaaggatttgatgaaaattatttctaatatgcacattttttactctataacatttaattttatcttccccataaagagtataaagagcttttctagcggcaataatcgctttcattctaatggtaaagaatttttattcgcaaatcattttattgaaatcttacagaattttatagcaatcacatttgctattttccaacgttgtgaagtaatattatatgacgaattttacaaaaatctttctaatgaggagattaatgttcaattgttgttgattcatgacaagattttggaaattttaaaaaaaatagaaattatcgtatcctttttaagagatgaaatgaatagcaacggaagtttcaaatctattaaaggtttcaacaaggttttgaatttaattaaatatatgttgagatttagcaagaaaaaacaaaattttgcgagaaactctgataacaataatgttacagattatagtcagtctgcgaagaacaaaaatgttctcttgaaattccccgttagtgaattgaacagaatctatttaaaatttaaggagatttctgattttttaatggaaagagaagttgtccaaaggagtataattattgacaaggatttggaatctgataatttgggtattactacggcaaacttcaacgatttctatgatgcattttataattga

SEQ ID NO: 4947 - DNA, 618 bp, Saccharomyces cerevisiae
atgaaattcagtggcttgtggtgttggttgttattattccttagcgttaatgttattgcatctgatgtgggtgagttgattgatcaggacgacgaagtaattacacaaaaggtgtttttcgatattgaacatggtgaagagaaagttggcagaatcgttattgggttgtacggaaaggtatgtcctaagacggcgaagaacttctacaagttaagcaccaccactaattccaaaaaggggttcatcgggtccactttccatagggtgattcccaacttcatggtacagggaggggacttcacagacggcactggcgttggtggcaaatccatctatggagatactttccctgacgaaaactttactttgaagcatgatcgcaagggcagactatcgatggctaatcgtggtaaagataccaatggatctcagttcttcatcaccactacggaagaagcgtcgtggctcgatggaaagcatgtggtatttggacaggttgtggacggcatggatgtggtgaactacatacagcacgtgtccagagatgcgaatgacaaacctctcgaggcggtcaagatcgcaaaatgcggtgagtggacgcctgagctctcttcttga

SEQ ID NO: 4948 - DNA, 618 bp, Artificial Sequence
  Description of Artificial Sequence: Synthetic polynucleotide
atgaaattcagtggcttgtggtgttggttgttattattccttagcgttaatgttattgcatctgatgtgggtgagttgattgatcaggacgacgaagtaattacacaaaaggtgtttttcgatattgaacatggtgaagagaaagttggcagaatcgttattgggttgtacggaaaggtatgtcctaagacggcgaagaacttctacaagttaagcaccaccactaattccaaaaaggggttcatcgggtccactttccatagggtgattcccaacttcatggtacagggaggggacttcacagacggcactggcgttggtggcaaatccatctatggagatactttccctgacgaaaactttactttgaagcatgatcgcaagggcagattatctatggctaatcgtggtaaagataccaatggatctcagttcttcatcaccactacggaagaagcgtcttggctcgatggaaagcatgtggtatttggacaggttgtggacggcatggatgtggtgaactacatacagcacgtgtccagagatgcgaatgacaaacctctcgaggcggtcaagatcgcaaaatgcggtgagtggacgcctgagctctcttcttga

SEQ ID NO: 4949 - DNA, 888 bp, Saccharomyces cerevisiae
atgaacgtgacaccgttggatgaattgcaatggaaatctccagaatggattcaagtttttggtttgagaactgagaatgttcttgattactttgcagaatcaccatttttcgataagacgtcgaataatcaggtaattaaaatgcaaaggcagttttcccagttaaatgatcctaatgctgccgtgaatatgacacaaaacataatgaccttaccagatgggaagaatggaaacttggaagaggagtttgcctatgtggatccggcaagaagacaaatccttttcaagtatcctatgtatatgcaactggaggaggaattaatgaagttagatggtactgaatacgtattgagcagcgtaagagagcctgacttctgggttatcaggaagcaaagacgaacaaacaattctggtgtgggaagcgctaagggaccagagattattccattgcaagactactacataattggtgcaaacatttaccaatcgccaacaatttttaaaattgtgcaaagtaggctgatgtccacgagctaccatctaaatagcacattggagagcttgtatgacttgattgagtttcaaccttcccaaggagtacactataaagtacctacggacactagcacgactgcaacggctgccaccaacgggaacaacgctggagggggcagtaacaagagcagtgtacgacctaccggcggtgccaatatggcgactgttccctcaaccacaaatgtcaacatgacagtcaacactatgggtacaggaggacaaactatagacaacggtaccggtcgtactggcaacggtaacatgggtataactacagagatgttggacaaattaatggtcacaagcattcgatccaccccaaactacatatga

SEQ ID NO: 4950 - DNA, 888 bp, Artificial Sequence
  Description of Artificial Sequence: Synthetic polynucleotide
atgaacgtgacaccgttggatgaattgcaatggaaatctccagaatggattcaagtttttggtttgagaactgagaatgttcttgattactttgcagaatctccatttttcgataagacgtccaataatcaggtaattaaaatgcaaaggcagttttcccagttaaatgatcctaatgctgccgtgaatatgacacaaaacataatgaccttaccagatgggaagaatggaaacttggaagaggagtttgcctatgtggatccggcaagaagacaaatccttttcaagtatcctatgtatatgcaattggaggaggaattaatgaagttagatggtactgaatacgtattgagcagcgtaagagagcctgacttctgggttatcaggaagcaaagaagaacaaacaattctggtgtgggaagcgctaagggaccagagattattccattgcaagactactacataattggtgcaaacatttaccaatctccaacaatttttaaaattgtgcaaagtaggttgatgtccacgagctaccatttgaatagcacattggagagcttgtatgacttgattgagtttcaaccttcccaaggagtacactataaagtacctacggacactagcacgactgcaacggctgccaccaacgggaacaacgctggagggggcagtaacaagagcagtgtaagacctaccggcggtgccaatatggcgactgttccctctaccacaaatgtcaacatgacagtcaacactatgggtacaggaggacaaactatagacaacggtaccggtcgtactggcaacggtaacatgggtataactacagagatgttggacaaattaatggtcacaagcattagatccaccccaaactacatatga

SEQ ID NO: 4951 - DNA, 393 bp, Saccharomyces cerevisiae
atgataccttcccggattagccacaaatttcctctattcttaaggagttcgctggccgctcctaaagctgcctatcgtttcagttcgaccatccccaaaccaagcgatcaggtacctgacgtagatgcatttctaaacaagatcggtcgaaattgcaacgaattgaaggatactttcgaaaataactggaacaaccttttccaatgggattctaagatattgaaggaaaaaggcgtgaatattcaacaaaggaaatatatactgaaacaagttcataactatcgtaacaataggccaattcatgaaattaaactgggcaagaagtcattttttggtggtgagaggaagagaaaggcatttactgctaaatggaaagctgaaaacaagcaatag

SEQ ID NO: 4952 - DNA, 393 bp, Artificial Sequence
  Description of Artificial Sequence: Synthetic polynucleotide
atgataccttccagaattagccacaaatttcctcttttcttaaggagttctttggccgctcctaaagctgcctatcgtttcagttctaccatccccaaaccaagcgatcaggtacctgacgtagatgcatttttgaacaagatcggtagaaattgcaacgaattgaaggatactttcgaaaataactggaacaaccttttccaatgggattctaagatattgaaggaaaaaggcgtgaatattcaacaaaggaaatatatattgaaacaagttcataactatcgtaacaataggccaattcatgaaattaaattgggcaagaagagcttttttggtggtgagaggaagagaaaggcatttactgctaaatggaaagctgaaaacaagcaatga

SEQ ID NO: 4953 - DNA, 546 bp, Saccharomyces cerevisiae
atgagtgaaacaaggatggcacagaacatggatactacagatgaacagtacctgagacttattgagctactctcaaactatgattccaccttagagcagttgcagaaggggttccaggatggctacatccaattgagcagatcgaactactataataaagactcattacgaggaaactatggtgaagattactgggatgaaacgtatataggtcaactaatggcaacagtggaagaaaaaaactccaaggtagttgtcgaaatcgtcaaaagaaaagctcaagataagcaagaaaagaaagaggaagaagataataaattgactcagagaaaaaaaggaacgaagccagaaaagcaaaaaactcagagtcacaaacttaaacaagactacgacccaattttgatgtttggtggagtactgtccgttccttcttcattgagacaatcgcagacaagtttcaaaggttgtattcccttaatagcccaattgattaattacaagaacgaaatattaacgttggttgaaacgttgtctgagcaggaataa

SEQ ID NO: 4954 - DNA, 546 bp, Artificial Sequence
  Description of Artificial Sequence: Synthetic polynucleotide
atgagtgaaacaaggatggcacagaacatggatactacagatgaacagtacttgagacttattgagttactctccaactatgattccaccttagagcagttgcagaaggggttccaggatggctacatccaattgagcagatctaactactataataaagactctttaagaggaaactatggtgaagattactgggatgaaacgtatataggtcaattgatggcaacagtggaagaaaaaaactccaaggtagttgtcgaaatcgtcaaaagaaaagctcaagataagcaagaaaagaaagaggaagaagataataaattgactcagagaaaaaaaggaacgaagccagaaaagcaaaaaactcagagtcacaaacttaaacaagactacgacccaattttgatgtttggtggagtattgtccgttccttcttctttgagacaatctcagacaagtttcaaaggttgtattcccttaatagcccaattgattaattacaagaacgaaatattaacgttggttgaaacgttgtctgagcaggaatga

SEQ ID NO: 4955 - DNA, 945 bp, Saccharomyces cerevisiae
atgactgaaggaaagaggctgcaacagatggagcttcctcaaatgaaatccatttggattgacgaggatcaggaaatggaaaaattgtatggattccaagtaaggcaacgattcatgaatggacctagtacggattccgatgaagacgccgacgaagatttaggaattgttctcgttgacagtaaaaagctggctttgccgaacaagaacaacatcaaattgccccctttgcccaattacatgacgatcaaccctaacataaattccaatcacaagtcattaactaataaaaagaagaatttcctgggcatgttcaaaaaaaaggacctgttgtcgaggagacatgggtctgccaaaaccgcaaaacagtcaagtatatctacaccatttgattttcaccatatttcgcatgctaatggtaaaagggaagacaaccctcttgagtcgcacgaagaaaaacatgatgtagaatcattagtcaaattcacgtctttggcaccgcaaccccgaccagattcaaacgtctcttctaaatattccaatgttgtgatgaacgattcgagcagaatagtgtcttcctccacaatagctacaacgatggattctcaccacgatggtaacgaaaccaacaataccccaaatggcaataagcaattagactcgcctacagatttggaaatgaccttggaagacttgagaaattatacatttccttctgttcttggagatagcgtcagcgaaaagaccaatccttcctctccctctgtttcatcattttctggcaaattcaagccaagagagttgagtgcgctacatacgcccgaattaggaaattgtttcaatgtagatcagtcgctaaattcccctggtaacagaatatctgtggatgacgtgctaaaattctactatcaatgtagtgaaactagtactcctcgaaatacctga

SEQ ID NO: 4956 - DNA, 945 bp, Artificial Sequence
  Description of Artificial Sequence: Synthetic polynucleotide
atgactgaaggaaagaggttacaacagatggagcttcctcaaatgaaatccatttggattgacgaggatcaggaaatggaaaaattgtatggattccaagtaaggcaaagattcatgaatggacctagtacggattccgatgaagacgccgacgaagatttaggaattgttctcgttgacagtaaaaagttggctttgccgaacaagaacaacatcaaattgccccctttgcccaattacatgacgatcaaccctaacataaattccaatcacaagtctttaactaataaaaagaagaatttcttgggcatgttcaaaaaaaaggacttgttgagtaggagacatgggtctgccaaaaccgcaaaacagagcagtatatctacaccatttgattttcaccatatttctcatgctaatggtaaaagggaagacaaccctcttgagtctcacgaagaaaaacatgatgtagaatctttagtcaaattcacgtctttggcaccgcaacccagaccagattccaacgtctcttctaaatattccaatgttgtgatgaacgattctagcagaatagtgtcttcctccacaatagctacaacgatggattctcaccacgatggtaacgaaaccaacaataccccaaatggcaataagcaattagactctcctacagatttggaaatgaccttggaagacttgagaaattatacatttccttctgttcttggagatagcgtcagcgaaaagaccaatccttcctctccctctgtttcttctttttctggcaaattcaagccaagagagttgagtgcgttgcatacgcccgaattaggaaattgtttcaatgtagatcagtccttgaattcccctggtaacagaatatctgtggatgacgtgttgaaattctactatcaatgtagtgaaactagtactcctagaaatacctga

SEQ ID NO: 4957 - DNA, 882 bp, Saccharomyces cerevisiae
atgctggtagatttgaatgtaccgtggccacagaacagctatgcagacaaagttacttctcaggcggtcaacaatttaataaaaacgttatccacattgcatatgttgggatatacacacatcgccataaattttacagtaaaccacagcgagaaattccccaacgatgttaagctgttaaatcctatcgatatcaagagaaggtttggagaattgatggatcgaacagggctaaaattatacagcaggatcacgctaattatcgacgatccatcgaagggacagtctctttccaagataagccaggcctttgatattgtagcagcattgccaatcagtgaaaagggccttactttatcaactaccaatctggatattgacttgttgacctttcagtacgggtcgcgcctgcctactttccttaagcataaaagcatatgcagctgtgtgaacagaggagtaaaacttgaaattgtttatggctatgctttgcgtgacgtacaagctcggaggcagttcgtatccaatgtaagaagcgtcatcaggagttcgaggtccagaggcattgttatcggcagtggtgccatgtcaccacttgagtgccgcaacatattaggagtaacaagtctaatcaagaatttaggtcttccgagcgataggtgttcgaaggccatgggagacctagcttcactcgtcctcctaaatggccgcttaaggaataagagccacaaacagaccattgttaccggtggtggtagcggaaacggcgatgacgtggtcaacgatgttcaaggcatcgacgacgtccagaccatcaaggtagtgaaaaggagtatggatgctgaacaattaggccatgcttccaaaagacacaagccttaa

SEQ ID NO: 4958 - DNA, 882 bp, Artificial Sequence
  Description of Artificial Sequence: Synthetic polynucleotide
atgttggtagatttgaatgtaccgtggccacagaacagctatgcagacaaagttacttctcaggcggtcaacaatttaataaaaacgttatccacattgcatatgttgggatatacacacatcgccataaattttacagtaaaccacagcgagaaattccccaacgatgttaagcttttaaatcctatcgatatcaagagaaggtttggagaattgatggatagaacagggttgaaattatacagcaggatcacgttgattatcgacgatccatctaagggacagtctctttccaagataagccaggcctttgatattgtagcagcattgccaatcagtgaaaagggccttactttatctactaccaatttggatattgacttgttgacctttcagtacgggtctcgcttacctactttccttaagcataaaagcatatgcagctgtgtgaacagaggagtaaaacttgaaattgtttatggctatgctttgcgtgacgtacaagctagaaggcagttcgtatccaatgtaagaagcgtcatcaggagttctaggtccagaggcattgttatcggcagtggtgccatgtctccacttgagtgccgcaacatattaggagtaacaagtttaatcaagaatttaggtcttccgagcgataggtgttccaaggccatgggagacttggcttctctcgtcctcttgaatggccgcttaaggaataagagccacaaacagaccattgttaccggtggtggtagcggaaacggcgatgacgtggtcaacgatgttcaaggcatcgacgacgtccagaccatcaaggtagtgaaaaggagtatggatgctgaacaattaggccatgcttccaaaagacacaagccttga

SEQ ID NO: 4959 - DNA, 1140 bp, Saccharomyces cerevisiae
atgactgcaccacacagaagtactattcatattcttgggttgggtgccatgggtaccgttttggcagttgaccttttaagatttaccaatgccctagttgtgcccttatttagatcacaagaaagacttgcacaatttcagaagacaaatgggaacaacatttcgattcgcaaactttatttggaaggctcgccaatattttcttatccagtggagaaatgcgaatgccctgaaactttctctaaaaaacctattgacaacttagtcgtcactacaaagacttaccaaaccaaagaagcactagctccttatttgccttatattaataaaaatacaaacttaattttgattcagaatggactgggcgttttagaactattgagagaagaaatctttacagattcaaaaaacagaccacatttatttcagggtgtcatttctcatggcgtttatcaggataaagcaggagttttcaatcatgctgggtgggctggtatgaaaattgccaaattgccttggactgaggaagaaatgattcaaaaaaaatccgtagtcgaggacgatgcagccaataactcattagtaaaattattaacagaaccaaaatttgccaaggaatttggaatagaacattccacttatcaagaaatgctctttggtcaattatttaaatttttggttaatgcatgcatgaatccagttacggctattctagattgtgtcaatggtgagatgaaggccagttgcggtccagttttcacatctattattgacgagtgtttacaaatattgagagttgcttataggccattgtttcaataccacgaaaaatacagcggtaatgaagaatacccagaaatggatgtcaatgcagtactgacaaccgataacatggtctccgaagtcactagaattggctgtgacatcaattctaggaacagtagttcaatgagacaagacactttgttcttaagagacattgaaattgagtatatcaatggctatgtcgtcaaattggctgataacttaaatctagacccaaactgctgcaaggttaataaaactatcggagaattggccactatgagattagcattgaacaggtcgagaagtatcaatggtgactggagaaaggactga

SEQ ID NO: 4960 - DNA, 1140 bp, Artificial Sequence
  Description of Artificial Sequence: Synthetic polynucleotide
atgactgcaccacacagaagtactattcatattcttgggttgggtgccatgggtaccgttttggcagttgaccttttaagatttaccaatgccttagttgtgcccttatttagatctcaagaaagacttgcacaatttcagaagacaaatgggaacaacatttccattcgcaaactttatttggaaggctctccaatattttcttatccagtggagaaatgcgaatgccctgaaactttctctaaaaaacctattgacaacttagtcgtcactacaaagacttaccaaaccaaagaagcattggctccttatttgccttatattaataaaaatacaaacttaattttgattcagaatggattgggcgttttagaattattgagagaagaaatctttacagattctaaaaacagaccacatttatttcagggtgtcatttctcatggcgtttatcaggataaagcaggagttttcaatcatgctgggtgggctggtatgaaaattgccaaattgccttggactgaggaagaaatgattcaaaaaaaatccgtagtcgaggacgatgcagccaataactctttagtaaaattattaacagaaccaaaatttgccaaggaatttggaatagaacattccacttatcaagaaatgctctttggtcaattatttaaatttttggttaatgcatgcatgaatccagttacggctattttagattgtgtcaatggtgagatgaaggccagttgcggtccagttttcacatctattattgacgagtgtttacaaatattgagagttgcttataggccattgtttcaataccacgaaaaatacagcggtaatgaagaatacccagaaatggatgtcaatgcagtattaacaaccgataacatggtctccgaagtcactagaattggctgtgacatcaattctaggaacagtagttctatgagacaagacactttgttcttaagagacattgaaattgagtatatcaatggctatgtcgtcaaattggctgataacttaaatttggacccaaactgctgcaaggttaataaaactatcggagaattggccactatgagattagcattgaacaggagcagaagtatcaatggtgactggagaaaggactga

SEQ ID NO: 4961 - DNA, 1617 bp, Saccharomyces cerevisiae
atgtcctctccagtgattggtatcacctttggtaacacctcttcttctattgcctacatcaacccaaagaacgatgttgatgtcattgccaacccagatggtgagcgtgccattccatccgctttatcctatgtcggtgaagatgaataccacggtggtcaagctttgcaacaattaatcagaaatcctaagaatactatcattaacttccgtgacttcattggtttgccatttgacaagtgtgatgtcagcaagtgcgctaacggtgccccagctgtcgaagttgatggcaaagttggatttgttatttcaagaggcgaaggtaaggaagaaaaacttactgtagatgaagtggtctccagacatttaaacagattaaagttagccgcggaagattacatcggttctgccgtaaaggaagctgtattgacagttccaacaaacttcagtgaagaacaaaagactgcactaaaggcttctgccgccaaaattggtctgcaaattgttcaattcatcaatgaaccttctgctgctttattagcccacgctgaacaattcccatttgaaaaagatgttaacgttgttgttgctgacttcggtggtattagatctgacgctgctgtcattgccgttcgtaacggtattttcactattttggccactgctcatgacctcagcttaggtggtgacaatttggatactgaattagtcgaatattttgctagtgagttccaaaagaagtatcaagccaatccaagaaagaacgctagatccttggccaagttaaaggctaactcttcaattaccaagaagactttgtccaacgcaacttctgccactatttccatcgattccttagctgatggtttcgactatcacgcttctatcaacagaatgaggtacgaattggtagctaacaaggtcttcgcccaattttcctctttcgttgattctgtcattgccaaggctgaattagacccattggacatcgatgctgttcttttgactggtggtgtatcatttactccaaaattaaccactaacttggaatacactttaccagaatcagtcgaaattcttggtccacagaacaagaacgcttctaacaatccaaacgaattagctgcatccggtgccgcattacaagcaagattgattagcgattacgatgctgacgaattggctgaagctttacaaccagttatcgtcaatactccacatttaaagaagcctattggtttgattggtgctaagggcgaattccacccagtattgttggctgaaacttcgttccctgtacaaaagaaattgactttgaaacaagccaagggtgatttcttgattggtgtttacgaaggtgaccatcacatcgaggaaaagactttggagccaattccaaaagaagaaaatgctgaagaggacgatgaaagtgaatggtccgacgatgaacctgaagtcgtcagagaaaaactatacactttgggtaccaagttgatggaattgggaattaaaaacgctaacggtgttgaaattatctttaacattaacaaagacggtgctttaagagtcaccgctagagatttgaaaactggtaatgctgtaaagggtgaattatag

SEQ ID NO: 4962 - DNA, 1617 bp, Artificial Sequence
  Description of Artificial Sequence: Synthetic polynucleotide
atgtcctctccagtgattggtatcacctttggtaacacctcttcttctattgcctacatcaacccaaagaacgatgttgatgtcattgccaacccagatggtgagcgtgccattccatccgctttatcctatgtcggtgaagatgaataccacggtggtcaagctttgcaacaattaatcagaaatcctaagaatactatcattaacttccgtgacttcattggtttgccatttgacaagtgtgatgtcagcaagtgcgctaacggtgccccagctgtcgaagttgatggcaaagttggatttgttatttctagaggcgaaggtaaggaagaaaaacttactgtagatgaagtggtctccagacatttaaacagattaaagttagccgcggaagattacatcggttctgccgtaaaggaagctgtattgacagttccaacaaacttcagtgaagaacaaaagactgcattgaaggcttctgccgccaaaattggtttacaaattgttcaattcatcaatgaaccttctgctgctttattagcccacgctgaacaattcccatttgaaaaagatgttaacgttgttgttgctgacttcggtggtattagatctgacgctgctgtcattgccgttcgtaacggtattttcactattttggccactgctcatgacctcagcttaggtggtgacaatttggatactgaattagtcgaatattttgctagtgagttccaaaagaagtatcaagccaatccaagaaagaacgctagatccttggccaagttaaaggctaactcttccattaccaagaagactttgtccaacgcaacttctgccactatttccatcgattccttagctgatggtttcgactatcacgcttctatcaacagaatgaggtacgaattggtagctaacaaggtcttcgcccaattttcctctttcgttgattctgtcattgccaaggctgaattagacccattggacatcgatgctgttcttttgactggtggtgtatcctttactccaaaattaaccactaacttggaatacactttaccagaatctgtcgaaattcttggtccacagaacaagaacgcttctaacaatccaaacgaattagctgcatccggtgccgcattacaagcaagattgattagcgattacgatgctgacgaattggctgaagctttacaaccagttatcgtcaatactccacatttaaagaagcctattggtttgattggtgctaagggcgaattccacccagtattgttggctgaaacttctttccctgtacaaaagaaattgactttgaaacaagccaagggtgatttcttgattggtgtttacgaaggtgaccatcacatcgaggaaaagactttggagccaattccaaaagaagaaaatgctgaagaggacgatgaaagtgaatggtccgacgatgaacctgaagtcgtcagagaaaaactttacactttgggtaccaagttgatggaattgggaattaaaaacgctaacggtgttgaaattatctttaacattaacaaagacggtgctttaagagtcaccgctagagatttgaaaactggtaatgctgtaaagggtgaattatga

SEQ ID NO: 4963 - DNA, 1506 bp, Saccharomyces cerevisiae
atgtccaaaattgttaagagaaaggaaaagaaggctaacgatgaattaacttctttagcagaaaagattagagcaaaagctttggaaaatcaaaagaagcttatagaagcagaaaaggaaggtggttcagagtccgattctgaagaagatgctactgctgaaaagaaaaaggttttgaaatcaaaaagcaaatccacagtatcaacccaaaatgaaaatactaatgaagatgaatcttttgaatcctttagcgaactgaatctggtccccgaattaattcaagcttgtaagaacttaaattattccaaacccactcccattcaatctaaggcaattcctcccgcgttagaaggtcacgatataattggacttgcgcaaacaggttctggtaaaactgctgcatttgctattcccattttgaatcggttatggcatgatcaggaaccatactatgcgtgcattctagctccaacaagagaattagcacaacagatcaaagaaacatttgactcattaggatccttaatgggcgtgagatcgacatgtattgtgggtggtatgaatatgatggaccaggccagagacctgatgagaaagccacatattatcattgctacacctggtagattaatggaccatttagagaataccaaagggttttcactgaggaaactgaaattcttggttatggatgaagctgatagattattagacatggaatttggacctgttcttgatagaattttaaagatcatcccaacccaagaaagaaccacttatcttttttccgctactatgacttccaaaattgataaattacaaagagcaagtttgacaaatcctgtgaaatgtgccgtgtcaaacaaataccaaaccgtagatacattagtgcaaacactgatggtcgttccaggtggtcttaagaacacatacctaatttatttattaaatgaatttattggaaagacgatgatcatttttacaagaaccaaggccaacgcggaaaggttgtcaggattatgtaatttgctcgagtttagtgccactgcgctacatggtgatttgaatcaaaaccagagaatgggatctttggatcttttcaaggcaggtaagaggtctattctcgtggctacagatgtcgctgcgagagggttggatattccatcagtggacatagttgtaaactacgatattcctgtggattccaagtcctacattcatcgtgtgggaagaaccgcaagagctggtagatcaggaaaatctatctcactagtatcacaatacgatctggaattgatcttaagaattgaagaagttttaggtaaaaaactaccgaaggaaagtgtggacaagaacattatattgaccctaagagattccgtcgataaggctaatggggaagttgtaatggaaatgaacagaagaaacaaggagaagattgccagaggtaagggaagaagaggaagaatgatgacaagagagaatatggacatgggagaaaggtag

SEQ ID NO: 4964 - DNA, 1506 bp, Artificial Sequence
  Description of Artificial Sequence: Synthetic polynucleotide
atgtccaaaattgttaagagaaaggaaaagaaggctaacgatgaattaacttctttagcagaaaagattagagcaaaagctttggaaaatcaaaagaagcttatagaagcagaaaaggaaggtggttctgagtccgattctgaagaagatgctactgctgaaaagaaaaaggttttgaaatctaaaagcaaatccacagtatctacccaaaatgaaaatactaatgaagatgaatcttttgaatcctttagcgaattgaatttggtccccgaattaattcaagcttgtaagaacttaaattattccaaacccactcccattcaatctaaggcaattcctcccgcgttagaaggtcacgatataattggacttgcgcaaacaggttctggtaaaactgctgcatttgctattcccattttgaatagattatggcatgatcaggaaccatactatgcgtgcattttggctccaacaagagaattagcacaacagatcaaagaaacatttgactctttaggatccttaatgggcgtgagatctacatgtattgtgggtggtatgaatatgatggaccaggccagagacttgatgagaaagccacatattatcattgctacacctggtagattaatggaccatttagagaataccaaagggttttctttgaggaaattgaaattcttggttatggatgaagctgatagattattagacatggaatttggacctgttcttgatagaattttaaagatcatcccaacccaagaaagaaccacttatcttttttccgctactatgacttccaaaattgataaattacaaagagcaagtttgacaaatcctgtgaaatgtgccgtgtctaacaaataccaaaccgtagatacattagtgcaaacattgatggtcgttccaggtggtcttaagaacacatacttgatttatttattaaatgaatttattggaaagacgatgatcatttttacaagaaccaaggccaacgcggaaaggttgagtggattatgtaatttgctcgagtttagtgccactgcgttgcatggtgatttgaatcaaaaccagagaatgggatctttggatcttttcaaggcaggtaagaggtctattctcgtggctacagatgtcgctgcgagagggttggatattccatctgtggacatagttgtaaactacgatattcctgtggattccaagtcctacattcatcgtgtgggaagaaccgcaagagctggtagatctggaaaatctatctctttagtatctcaatacgatttggaattgatcttaagaattgaagaagttttaggtaaaaaattaccgaaggaaagtgtggacaagaacattatattgaccttgagagattccgtcgataaggctaatggggaagttgtaatggaaatgaacagaagaaacaaggagaagattgccagaggtaagggaagaagaggaagaatgatgacaagagagaatatggacatgggagaaaggtga

SEQ ID NO: 4965 - DNA, 1362 bp, Saccharomyces cerevisiae
atggccaagagaagacaaaagaaaagaacacatgcacagcttacacctgagcaggaacaaggtatacctaagtcaatggtaatcagagtgggtcaaacttctttggccaaccattctctgaaccaattagtaaaggacttccgccaaatcatgcaaccacatacggctataaaattgaaagagcgcaagtccaataaactgaaggatttcgttgttatgtgtggcccattaggtgttacgcatctttttatgttcactcaatctgaaaaaacaggaaatgtctccctaaagatagctagaactccgcaaggtcctactgttacttttcaagtattggactattctctgggtagagatatcaaaaaatttttgaagagacctaaatcgttgaataatgatgatgtattaaatcctccattgctagtgctaaacgggttttccacatccaaaagatctggtgaagacgaccaggatgtaaacgtggagaaggtcattgtttctatgtttcagaatattttcccacctctgaatcctgcgagaacttctttgaattctatcaaacgtgtatttatgatcaataaagacagggaaacaggggaaatttctatgcgccactattttattgacattcgagaagtagagatctctagaaacctaaaaaggctttataaagccaaaaataatctaagtaaaacagtgccgaatttgcatcgaaaagaagatatttcttctttgatattagatcacgacttaggcgcctatacatcagaatctgaaattgaagatgacgctatcgtgagagtagttgataatcaggacgtgaaggcaaagcattctcaaagtttgaagtcccaaagaacaccggtcgaaaagaaggataataaagagcgtgaaaaagaaacagaagaagaagatgtggaaatggaggaacctaagccttcagaaaacttgcaaccaaccccacgtaagaaagctatcaaactaactgaattaggaccaagattaactttaaaactggtcaagatagaagaaggtatttgttcaggtaaagtgttacatcatgaatttgttcaaaaatcaagcgaagaaatcaaagctttagaaaagagacacgctgcaaaaatgaggctgaaggaacaaagaaagaaggaacaagaagaaaacattgctaaaaagaaggctgttaaagacgctaaaaagcaacgtaaattggaaagaagaaaagctagagcagcagaaggaggtgaaggtcaaggaaaagatgatgcgatgagcgatgatgagtcttcatcaagtgacagcgaacattatggtagcgtaccagaggatctagatagtgacttatttagtgaggtcgaataa

SEQ ID NO: 4966 - DNA, 1362 bp, Artificial Sequence
  Description of Artificial Sequence: Synthetic polynucleotide
atggccaagagaagacaaaagaaaagaacacatgcacagcttacacctgagcaggaacaaggtatacctaagtctatggtaatcagagtgggtcaaacttctttggccaaccattctttgaaccaattagtaaaggacttccgccaaatcatgcaaccacatacggctataaaattgaaagagcgcaagtccaataaattgaaggatttcgttgttatgtgtggcccattaggtgttacgcatctttttatgttcactcaatctgaaaaaacaggaaatgtctccttgaagatagctagaactccgcaaggtcctactgttacttttcaagtattggactattctttgggtagagatatcaaaaaatttttgaagagacctaaatctttgaataatgatgatgtattaaatcctccattgttggtgttgaacgggttttccacatccaaaagatctggtgaagacgaccaggatgtaaacgtggagaaggtcattgtttctatgtttcagaatattttcccacctttaaatcctgcgagaacttctttgaattctatcaaacgtgtatttatgatcaataaagacagggaaacaggggaaatttctatgcgccactattttattgacattagagaagtagagatctctagaaacttgaaaaggctttataaagccaaaaataatttgagtaaaacagtgccgaatttgcatagaaaagaagatatttcttctttgatattagatcacgacttaggcgcctatacaagtgaatctgaaattgaagatgacgctatcgtgagagtagttgataatcaggacgtgaaggcaaagcattctcaaagtttgaagtcccaaagaacaccggtcgaaaagaaggataataaagagcgtgaaaaagaaacagaagaagaagatgtggaaatggaggaacctaagccttctgaaaacttgcaaccaaccccacgtaagaaagctatcaaattaactgaattaggaccaagattaactttaaaattggtcaagatagaagaaggtatttgttctggtaaagtgttacatcatgaatttgttcaaaaaagtagcgaagaaatcaaagctttagaaaagagacacgctgcaaaaatgaggttaaaggaacaaagaaagaaggaacaagaagaaaacattgctaaaaagaaggctgttaaagacgctaaaaagcaacgtaaattggaaagaagaaaagctagagcagcagaaggaggtgaaggtcaaggaaaagatgatgcgatgagcgatgatgagtcttcttccagtgacagcgaacattatggtagcgtaccagaggatttggatagtgacttatttagtgaggtcgaatga

SEQ ID NO: 4967 - DNA, 843 bp, Saccharomyces cerevisiae
atgaaatccaaaacgtggattttcagggatgtcttatctagtcaccgaaccaaagcgtttgatagtttactttgtaggagactccctgtatcaaaggcaacgaagcatcttcaactgggagaacatttcctgttcttcccaccatcattcgaaaaattggatagagatggttattttaactatcaaaatcctgcaagtttgctaggaaaccctgatttacgctaccgtagaaggatttggggacaaggagagcttgttcagtatttaccagtcaccttagaccaggagtatacatgccacgaatcaatcaaatacgtaaaaaaaatacgagatgaacatgttgtctgtattgaaagaacccttttacaagaaaggcccgaaaatgtgtcgagtccaatggacatttgcttattcgagagaagggtattaatgtacaccaattcacccgcaaacaagactgcagtcaagatgcccgtaggagaggagaactataagatcttaaaaaattttactgttactgatatggatattgtagcttatggtcagatgtctttgaatccgcaccgaattcattgggacaaagagtacagtcgctatgttgaaggctacgacgatattatcatgcaaggacccttctcggtccaattactacagaaatgcatccaaccttttctcgaacaaccaatcagacagttgcgataccgcaatttgaattatatatatccaaacactactttgagcatatgtcagtctttaagctcttcgagcggaatgtacacatttcaaattagggacctccagaaagccaacttagtctacatgaaagctgatgttttctgttga

SEQ ID NO: 4968 - DNA, 843 bp, Artificial Sequence
  Description of Artificial Sequence: Synthetic polynucleotide
atgaaatccaaaacgtggattttcagggatgtcttatctagtcacagaaccaaagcgtttgatagtttactttgtaggagactccctgtatccaaggcaacgaagcatcttcaattaggagaacatttccttttcttcccaccatctttcgaaaaattggatagagatggttattttaactatcaaaatcctgcaagtttgttgggaaaccctgatttacgctaccgtagaaggatttggggacaaggagagcttgttcagtatttaccagtcaccttagaccaggagtatacatgccacgaaagtatcaaatacgtaaaaaaaataagagatgaacatgttgtctgtattgaaagaacccttttacaagaaaggcccgaaaatgtgtccagtccaatggacatttgcttattcgagagaagggtattaatgtacaccaattctcccgcaaacaagactgcagtcaagatgcccgtaggagaggagaactataagatcttaaaaaattttactgttactgatatggatattgtagcttatggtcagatgtctttgaatccgcacagaattcattgggacaaagagtacagtcgctatgttgaaggctacgacgatattatcatgcaaggacccttctctgtccaattattgcagaaatgcatccaaccttttctcgaacaaccaatcagacagttgagataccgcaatttgaattatatatatccaaacactactttgagcatatgtcagtctttaagctcttctagcggaatgtacacatttcaaattagggacctccagaaagccaacttagtctacatgaaagctgatgttttctgttga

SEQ ID NO: 4969 - DNA, 1164 bp, Saccharomyces cerevisiae
atgtccgatatcaacgaaaaactcccagagttactacaagacgctgtcttgaaagcatctgttcctattccagatgacttcgttaaggttcaaggtattgattactcaaagcctgaagccactaatatgagagcaactgatttaattgaagctatgaagaccatgggtttccaagctagttctgttggtactgcctgtgagattattgatagtatgagatcatggagaggtaagcatattgacgaattggatgaccatgaaaagaaaggttgcttcgatgaggaagggtaccaaaagactactatcttcatgggttatacttctaacttgatcagttccggtgtacgtgaaactttacgttatttggtgcaacacaaaatggttgatgctgtcgttacttctgctggtggtgtggaagaagatttgatcaaatgtcttgctccaacttacttgggtgaatttgctttgaaaggtaaatctttgcgtgaccaaggtatgaatcgtattggtaacttgcttgttccaaatgataactactgtaagtttgaagaatggattgtcccaattttggataagatgttggaagaacaagatgaatacgtaaagaaacatggcgctgactgtttagaggctaaccaagacgtggattcaccaatctggaccccatctaagatgatagatcgttttggtaaggaaatcaacgacgaatcctccgtattgtactgggcccacaagaataaaattccaatcttttgtccatctttgactgatggttcaatcggtgacatgttgtttttccatacttttaaagcatctccaaaacaactaagagttgacattgtaggagatatccgcaaaatcaattcaatgtccatggccgcttacagagccggtatgatcatcttgggtggtggtttgatcaagcaccacattgccaatgcttgtttgatgagaaatggtgctgattatgccgtttacattaacactggtcaagaatacgatggttctgatgcaggtgcaagacctgacgaagctgtgtcttggggtaagatcaaggctgaagccaaatccgtcaaactttttgctgatgtcaccactgttcttccattgattgttgctgctacctttgccagtggtaaaccaatcaaaaaagttaagaattga

SEQ ID NO: 4970 - DNA, 1164 bp, Artificial Sequence
  Description of Artificial Sequence: Synthetic polynucleotide
atgtccgatatcaacgaaaaactcccagagttattacaagacgctgtcttgaaagcatctgttcctattccagatgacttcgttaaggttcaaggtattgattactccaagcctgaagccactaatatgagagcaactgatttaattgaagctatgaagaccatgggtttccaagctagttctgttggtactgcctgtgagattattgatagtatgagaagttggagaggtaagcatattgacgaattggatgaccatgaaaagaaaggttgcttcgatgaggaagggtaccaaaagactactatcttcatgggttatacttctaacttgatcagttccggtgtacgtgaaactttacgttatttggtgcaacacaaaatggttgatgctgtcgttacttctgctggtggtgtggaagaagatttgatcaaatgtcttgctccaacttacttgggtgaatttgctttgaaaggtaaatctttgcgtgaccaaggtatgaatcgtattggtaacttgcttgttccaaatgataactactgtaagtttgaagaatggattgtcccaattttggataagatgttggaagaacaagatgaatacgtaaagaaacatggcgctgactgtttagaggctaaccaagacgtggattctccaatctggaccccatctaagatgatagatcgttttggtaaggaaatcaacgacgaatcctccgtattgtactgggcccacaagaataaaattccaatcttttgtccatctttgactgatggttctatcggtgacatgttgtttttccatacttttaaagcatctccaaaacaattgagagttgacattgtaggagatatccgcaaaatcaattctatgtccatggccgcttacagagccggtatgatcatcttgggtggtggtttgatcaagcaccacattgccaatgcttgtttgatgagaaatggtgctgattatgccgtttacattaacactggtcaagaatacgatggttctgatgcaggtgcaagacctgacgaagctgtgtcttggggtaagatcaaggctgaagccaaatccgtcaaactttttgctgatgtcaccactgttcttccattgattgttgctgctacctttgccagtggtaaaccaatcaaaaaagttaagaattga

SEQ ID NO: 4971 - DNA, 1080 bp, Saccharomyces cerevisiae
atgtccgaagttatcacaattaccaagcggaacggtgccttccaaaattcatctaacctgtcctataacaacacagggatatcagatgatgaaaatgatgaagaagatatctacatgcacgatgttaactcagcttctaaaagtgagtctgattctcaaattgtgacgccaggtgagctggtcactgatgaccctatctggatgagaggtcacggtacgtattttcttgataatatgacgtattcctctgttgctggtactgtatcccgtgtcaataggctgctatcggtaattccattgaaaggtcgttatgccccagaaactggtgatcacgtcgtagggagaattgctgaagtgggtaacaagagatggaaagtagacattggcggtaagcaacatgcagtacttatgttgggctctgtgaatttaccgggtggtattctaagaagaaaatctgaaagtgatgaactacaaatgagaagcttccttaaggaaggtgacctcctgaatgcagaagttcaatcattatttcaagatggtagtgcctctttacatacaaggtctctaaagtacgggaagttaagaaacgggatgttttgccaagtcccgagttcattaatagtgagagccaagaaccatactcataatttgcccggcaacataaccgtagttctcggagtcaatggttacatatggttaaggaaaacatctcagatggacttagcgagggatacgccgtctgcaaataacagttcctcaattaaatcaactggacccactggtgcggtatcattaaatccctccataacaagactggaagaagagtcttcatggcaaatatattcggatgaaaacgatccttccatatcgaacaacatacgacaagcaatttgccggtatgcgaacgtgatcaaagcgttagcgttctgtgaaataggcattactcaacaacgtatagtaagtgcttacgaagctagtatggtttattcaaacgtaggtgaactgattgagaaaaatgtaatggaatccataggcagtgacattcttaccgccgaaaaaatgagaggtaacggcaactaa

SEQ ID NO: 4972 - DNA, 1080 bp, Artificial Sequence
  Description of Artificial Sequence: Synthetic polynucleotide
atgtccgaagttatcacaattaccaagagaaacggtgccttccaaaattcttctaacctttcctataacaacacagggatatctgatgatgaaaatgatgaagaagatatctacatgcacgatgttaactctgcttctaaaagtgagtctgattctcaaattgtgacgccaggtgagttggtcactgatgaccctatctggatgagaggtcacggtacgtattttcttgataatatgacgtattcctctgttgctggtactgtatcccgtgtcaataggcttttaagtgtaattccattgaaaggtcgttatgccccagaaactggtgatcacgtcgtagggagaattgctgaagtgggtaacaagagatggaaagtagacattggcggtaagcaacatgcagtacttatgttgggctctgtgaatttaccgggtggtattttaagaagaaaatctgaaagtgatgaattacaaatgagaagcttccttaaggaaggtgacctcttgaatgcagaagttcaatctttatttcaagatggtagtgcctctttacatacaaggtctttgaagtacgggaagttaagaaacgggatgttttgccaagtcccgagttctttaatagtgagagccaagaaccatactcataatttgcccggcaacataaccgtagttctcggagtcaatggttacatatggttaaggaaaacatctcagatggacttagcgagggatacgccgtctgcaaataacagttccagtattaaatctactggacccactggtgcggtatctttaaatccctccataacaagattagaagaagagtcttcttggcaaatatattctgatgaaaacgatccttccataagcaacaacataagacaagcaatttgcagatatgcgaacgtgatcaaagcgttagcgttctgtgaaataggcattactcaacaacgtatagtaagtgcttacgaagctagtatggtttattccaacgtaggtgaattgattgagaaaaatgtaatggaatccataggcagtgacattcttaccgccgaaaaaatgagaggtaacggcaactga

SEQ ID NO: 4973 - DNA, 1500 bp, Saccharomyces cerevisiae
atgaaaatcgcactgccagtattccaaaaatttaatagattgatcagttcgtgcaagatgtcaggagtgttcccatacaacccacccgtgaatcgccaaatgcgagaattggataggtcatttttcatcaccaagataccaatgtgtgcagtcaagttccccgaacccaaaaatatcagtgtgttttctaaaaacttcaaaaattgcatcttgagggtgccccgtatcccgcacgttgttaagttaaactcatccaagccaaaggacgaactgacaagtgtacagaacaagaaactaaagactgcagatggcaataataccccagtcacgaaaggtgtgctgctacacgaatccatccacagcgtggaggatgcgtatggaaaattgcctgaggacgccttggcgtttcttaaggaaaacagtgcggaaattgtaccacacgaatacgtgctcgattatgatttctggaaagctgaggagattcttcgagccgtgctgcccgagcaattcctggaagaggttccaacgggttttacaatcacaggccacattgcccacttgaacttgcgcaccgagttcaaaccattcgactcgctcatcggacaagtcatccttgacaagaacaacaaaatcgaatgtgtcgtggacaaagtcagctccattgccacacagttcaggacttttcctatgaaagtcattgctgggaaaagcgatagtctagtggtagagcagaaggaatccaactgcactttcaaattcgactttagcaaggtgtactggaactcccgattgcacacagagcatgaaagactcgtcaaacagtacttccagcctggccaagtagtctgtgatgttttcgccggcgtggggccctttgctgtacctgcgggcaagaaggatgtcatcgttttggctaacgacttgaatcctgagagttacaaatacttgaaggagaacatcgcattgaacaaagtggccaagaccgtcaaatccttcaacatggatggcgctgacttcatccgccagtcgccacagttattacaacagtggattcaagatgaagagggcggcaagatcacgatccctctgcctttgaagaaacgacacagatcccagcaacacaatgaccaacaaccgccacaaccacgcaccaaagagctgatcattccgtcacatattagccactatgtcatgaatctaccagacagcgccatttctttcttaggaaacttccgtggcatctttgcagcacacactaaaggcgccactgataccatccaaatgccatgggtgcacgtgcactgttttgagaagtacccgcctggcgaccaagtcactgaggacgagttgcatgcacgcgttcatgcccgtattattgccgcgctcaaggtcactgcagacgatcttccgttgaatgccgtttcgttgcatttggtgcgcaaagttgcacccaccaaaccgatgtattgcgcgagtttccaacttccagctaacgtatga

SEQ ID NO: 4974 - DNA, 1500 bp, Artificial Sequence
  Description of Artificial Sequence: Synthetic polynucleotide
atgaaaatcgcattgccagtattccaaaaatttaatagattgatcagttcctgcaagatgtctggagtgttcccatacaacccacccgtgaatcgccaaatgagagaattggataggtcttttttcatcaccaagataccaatgtgtgcagtcaagttccccgaacccaaaaatatcagtgtgttttctaaaaacttcaaaaattgcatcttgagggtgccccgtatcccgcacgttgttaagttaaactcttccaagccaaaggacgaattaacaagtgtacagaacaagaaattgaagactgcagatggcaataataccccagtcacgaaaggtgtgcttttacacgaatccatccacagcgtggaggatgcgtatggaaaattgcctgaggacgccttggcgtttcttaaggaaaacagtgcggaaattgtaccacacgaatacgtgctcgattatgatttctggaaagctgaggagattcttcgtgccgtgttacccgagcaattcttggaagaggttccaacgggttttacaatcacaggccacattgcccacttgaacttgcgcaccgagttcaaaccattcgactctctcatcggacaagtcatccttgacaagaacaacaaaatcgaatgtgtcgtggacaaagtcagctccattgccacacagttcaggacttttcctatgaaagtcattgctgggaaaagcgatagtttagtggtagagcagaaggaatccaactgcactttcaaattcgactttagcaaggtgtactggaactccagattgcacacagagcatgaaagactcgtcaaacagtacttccagcctggccaagtagtctgtgatgttttcgccggcgtggggccctttgctgtacctgcgggcaagaaggatgtcatcgttttggctaacgacttgaatcctgagagttacaaatacttgaaggagaacatcgcattgaacaaagtggccaagaccgtcaaatccttcaacatggatggcgctgacttcatccgccagtctccacagttattacaacagtggattcaagatgaagagggcggcaagatcacgatccctttgcctttgaagaaaagacacagatcccagcaacacaatgaccaacaaccgccacaaccacgcaccaaagagttgatcattccgtctcatattagccactatgtcatgaatttaccagacagcgccatttctttcttaggaaacttccgtggcatctttgcagcacacactaaaggcgccactgataccatccaaatgccatgggtgcacgtgcactgttttgagaagtacccgcctggcgaccaagtcactgaggacgagttgcatgcacgcgttcatgcccgtattattgccgcgctcaaggtcactgcagacgatcttccgttgaatgccgtttctttgcatttggtgcgcaaagttgcacccaccaaaccgatgtattgcgcgagtttccaacttccagctaacgtatga

SEQ ID NO: 4975 - DNA, 690 bp, Saccharomyces cerevisiae
atggatggaaatcataggtttactccagattccaaagaatttaatactgttgtaaaaagtaaagagtcttccactggcagaaatccgtatcagactccgcccttagagcacaacggtactcatcatcagacaaattacagcagaaagaaaacaaatctagcaattatcatatcgaatttcttgtccgagatcagtcggcctctttcaaatggcaaaatcaataattctacccacaacattttaaaatttctaaatgaagtgcttaagagatcgaagtgcagtaaagaaaacgctgtgttagccactttctactttcaaaagattcaccaatccagaggtgtccgggatgagtcctcattgcctgaattctcgcactgttcccgcagaatttttctctgctgtcttattctatcgcacaaatttttgaacgacaacacttactcgatgaaaaattggcaaattataagtgggctccatgcaaaggatctatctctaatggaaagatggtgtctgggtaagctgaattatgagctggccattccatatgacgagtttttgctatgggaaacgaacactttaatgaaagcgaaattgcgcgtcggaactcccgccaacgctccggtgaagagacccagagaatcagacaatgattatgatgcaaattcttggaaacagattaaatcttgttaa

SEQ ID NO: 4976 - DNA, 690 bp, Artificial Sequence
  Description of Artificial Sequence: Synthetic polynucleotide
atggatggaaatcataggtttactccagattccaaagaatttaatactgttgtaaaaagtaaagagtcttccactggcagaaatccgtatcagactccgcccttagagcacaacggtactcatcatcagacaaattacagcagaaagaaaacaaatttggcaattatcatatccaatttcttgtccgagatcagtaggcctctttctaatggcaaaatcaataattctacccacaacattttaaaatttttgaatgaagtgcttaagagatccaagtgcagtaaagaaaacgctgtgttagccactttctactttcaaaagattcaccaatccagaggtgtcagagatgagtcctctttgcctgaattctctcactgttcccgcagaatttttctctgctgtcttattttatcccacaaatttttgaacgacaacacttactccatgaaaaattggcaaattataagtgggctccatgcaaaggatttatctttgatggaaagatggtgtttaggtaagttgaattatgagttggccattccatatgacgagtttttgttatgggaaacgaacactttaatgaaagcgaaattgcgcgtcggaactcccgccaacgctccggtgaagagacccagagaaagtgacaatgattatgatgcaaattcttggaaacagattaaatcttgttga

SEQ ID NO: 4977 - DNA, 2196 bp, Saccharomyces cerevisiae
atgacagaattttattctgacacaatcggtctaccaaagacagatccacgtctttggagactgagaactgatgagctaggccgagaaagctgggaatatttaacccctcagcaagccgcaaacgacccaccatccactttcacgcagtggcttcttcaagatcccaaatttcctcaacctcatccagaaagaaataagcattcaccagatttttcagccttcgatgcgtgtcataatggtgcatcttttttcaaactgcttcaagagcctgactcaggtatttttccgtgtcaatataaaggacccatgttcatgacaatcggttacgtagccgtaaactatatcgccggtattgaaattcctgagcatgagagaatagaattaattagatacatcgtcaatacagcacatccggttgatggtggctggggtctacattctgttgacaaatccaccgtgtttggtacagtattgaactatgtaatcttacgtttattgggtctacccaaggaccacccggtttgcgccaaggcaagaagcacattgttaaggttaggcggtgctattggatcccctcactggggaaaaatttggctaagtgcactaaacttgtataaatgggaaggtgtgaaccctgcccctcctgaaacttggttacttccatattcactgcccatgcatccggggagatggtgggttcatactagaggtgtttacattccggtcagttacctgtcattggtcaaattttcttgcccaatgactcctcttcttgaagaactgaggaatgaaatttacactaaaccgtttgacaagattaacttctccaagaacaggaataccgtatgtggagtagacctatattacccccattctactactttgaatattgcgaacagccttgtagtattttacgaaaaatacctaagaaaccggttcatttactctctatccaagaagaaggtttatgatctaatcaaaacggagttacagaatactgattccttgtgtatagcacctgttaaccaggcgttttgcgcacttgtcactcttattgaagaaggggtagactcggaagcgttccagcgtctccaatataggttcaaggatgcattgttccatggtccacagggtatgaccattatgggaacaaatggtgtgcaaacctgggattgtgcgtttgccattcaatactttttcgtcgcaggcctcgcagaaagacctgaattctataacacaattgtctctgcctataaattcttgtgtcatgctcaatttgacaccgagtgcgttccaggtagttatagggataagagaaagggggcttggggcttctcaacaaaaacacagggctatacagtggcagattgcactgcagaagcaattaaagccatcatcatggtgaaaaactctcccgtctttagtgaagtacaccatatgattagcagtgaacgtttatttgaaggcattgatgtgttattgaacctacaaaacatcggatcttttgaatatggttcctttgcaacctatgaaaaaatcaaggccccactagcaatggaaaccttgaatcctgctgaagtttttggtaacataatggtagaatacccatacgtggaatgtactgattcatccgttctggggttgacatattttcacaagtacttcgactataggaaagaggaaatacgtacacgcatcagaatcgccatcgaattcataaaaaaatctcaattaccagatggaagttggtatggaagctggggtatttgttttacatatgccggtatgtttgcattggaggcattacacaccgtgggggagacctatgagaattcctcaacggtaagaaaaggttgcgacttcttggtcagtaaacagatgaaggatggcggttggggggaatcaatgaagtccagtgaattacatagttatgtggatagtgaaaaatcgctagtcgttcaaaccgcatgggcgctaattgcacttcttttcgctgaatatcctaataaagaagtcatcgaccgcggtattgaccttttaaaaaatagacaagaagaatccggggaatggaaatttgaaagtgtagaaggtgttttcaaccactcttgtgcaattgaatacccaagttatcgattcttattccctattaaggcattaggtatgtacagcagggcatatgaaacacatacgctttaa

SEQ ID NO: 4978 - DNA, 2196 bp, Artificial Sequence
  Description of Artificial Sequence: Synthetic polynucleotide
atgacagaattttattctgacacaatcggtttgccaaagacagatccacgtctttggagattgagaactgatgagttgggcagagaaagctgggaatatttaacccctcagcaagccgcaaacgacccaccatccactttcacgcagtggcttcttcaagatcccaaatttcctcaacctcatccagaaagaaataagcattctccagatttttctgccttcgatgcgtgtcataatggtgcatcttttttcaaattacttcaagagcctgactctggtatttttccgtgtcaatataaaggacccatgttcatgacaatcggttacgtagccgtaaactatatcgccggtattgaaattcctgagcatgagagaatagaattaattagatacatcgtcaatacagcacatccggttgatggtggctggggtttgcattctgttgacaaatccaccgtgtttggtacagtattgaactatgtaatcttacgtttattgggtttgcccaaggaccacccggtttgcgccaaggcaagaagcacattgttaaggttaggcggtgctattggatcccctcactggggaaaaatttggttgagtgcattgaacttgtataaatgggaaggtgtgaaccctgcccctcctgaaacttggttacttccatattctttacccatgcatccggggagatggtgggttcatactagaggtgtttacattccggtcagttacctttctttggtcaaattttcttgcccaatgactcctcttcttgaagaattgaggaatgaaatttacactaaaccgtttgacaagattaacttctccaagaacaggaataccgtatgtggagtagacctttattacccccattctactactttgaatattgcgaacagccttgtagtattttacgaaaaatacttgagaaacagattcatttactctttatccaagaagaaggtttatgatttgatcaaaacggagttacagaatactgattccttgtgtatagcacctgttaaccaggcgttttgcgcacttgtcactcttattgaagaaggggtagactctgaagcgttccagcgtctccaatataggttcaaggatgcattgttccatggtccacagggtatgaccattatgggaacaaatggtgtgcaaacctgggattgtgcgtttgccattcaatactttttcgtcgcaggcctcgcagaaagacctgaattctataacacaattgtctctgcctataaattcttgtgtcatgctcaatttgacaccgagtgcgttccaggtagttatagggataagagaaagggggcttggggcttcagtacaaaaacacagggctatacagtggcagattgcactgcagaagcaattaaagccatcatcatggtgaaaaactctcccgtctttagtgaagtacaccatatgattagcagtgaacgtttatttgaaggcattgatgtgttattgaacttacaaaacatcggatcttttgaatatggttcctttgcaacctatgaaaaaatcaaggccccattggcaatggaaaccttgaatcctgctgaagtttttggtaacataatggtagaatacccatacgtggaatgtactgattcttccgttttggggttgacatattttcacaagtacttcgactataggaaagaggaaatacgtacacgcatcagaatcgccatcgaattcataaaaaaatctcaattaccagatggaagttggtatggaagctggggtatttgttttacatatgccggtatgtttgcattggaggcattacacaccgtgggggagacctatgagaattcctctacggtaagaaaaggttgcgacttcttggtcagtaaacagatgaaggatggcggttggggggaaagtatgaagtccagtgaattacatagttatgtggatagtgaaaaatctttggtcgttcaaaccgcatgggcgttaattgcacttcttttcgctgaatatcctaataaagaagtcatcgaccgcggtattgaccttttaaaaaatagacaagaagaatccggggaatggaaatttgaaagtgtagaaggtgttttcaaccactcttgtgcaattgaatacccaagttatagattcttattccctattaaggcattaggtatgtacagcagggcatatgaaacacatacgctttga

SEQ ID NO: 4979 - DNA, 177 bp, Saccharomyces cerevisiae
atgcatttgatgtacactttgggcccagacggcaagagaatctatacattgaaaaaggtcaccgaaagtggtgaaatcacgaagtctgctcacccagctagattttctccagacgacaaatattcaagacaaagagtaactttgaagaagagatttggtttggtaccaggccaatag

SEQ ID NO: 4980 - DNA, 177 bp, Artificial Sequence
  Description of Artificial Sequence: Synthetic polynucleotide
atgcatttgatgtacactttgggcccagacggcaagagaatctatacattgaaaaaggtcaccgaaagtggtgaaatcacgaagtctgctcacccagctagattttctccagacgacaaatattctagacaaagagtaactttgaagaagagatttggtttggtaccaggccaatga

SEQ ID NO: 4981 - DNA, 2991 bp, Saccharomyces cerevisiae
atggaaacaattgatatacaaaatcgatcatttgttgttcgttgggtaaaatgtggccgtggcgatgtaatcaattatcagatcaagccattgaagaaatctattgaagtcggcatatacaaaaagttgaaatccagtgtagatgaccatgcttccgcagttcacattgcacctgacactaaaacattgctagactatactacgaaatctctattacataagggaagttcgagtaatattgaggagcatcacaggcgttcctcacagcactctcatagttcgagcaatggatcggataataagaggaaagagagatcatattcttcactgtccattagcggcatacagcagcaatcccaggaaatacccctacgtgaaaaactctctgcgtcaggattcactttggtcaagagggtcggcaacgtttccggtaacactatggtccaaggtgatcttgaagtgaaagatacagactactattatgcatttatactggacaactcgtcttccaagaatgcaaaaaagaaaattctttttaacgcaagtgtgataaacggcgataatcaatcgatgataagcacaagatccacccctcccgcaaggcctacagctttaagcagaacatctactcaacaggatatgttatttagagtaggacaaggtcgttacttgcaaggctacctgctgaaaaaaaggagaaagagactacaaggttttaagaaaaggtttttcaccttggactttcgatatggaaccctatcgtactatttaaacgaccataatcaaacttgtaggggtgaaattgtcataagcttgtcatctgttagtgccaataagaaggacaaaataatcataattgattctggtatggaagtttgggtcttgaaggctacaactaaggaaaattggcagtcgtgggtcgatgcgttacaaacttgttttgacgatcagttcgaagataaggacacgtccactttggaagaaaatcccgacattcttgacgatgacaaggaagtaattaataaaagctcacctcaagaccacgaccacctcacgcccacggctacgaccaaaagtgcactatcacatagacagcatactcagaaagacatggatgacatatatgtcccattgcccagcgaatcttacgctactttctccatgaatctacgtttgattcaacaacgactggagcagtgtaaaaaagactcgttatcttataaaccaactactttacatcaaagatcggaggggctaaatggaacacattcgtcatcttccgtctttaccaataatagagtgtcttcattcaatcattcttcttctggtatgacgtcatctgattctttagcctctgaagaggttccttccaacaaaacatatattgagcatgctttatataaccaattggcagatcttgaagtatttgttagccggttcgttacacagggagaggttttattcaaggaccaccagatcctgtgcaagaaagcaaaagacacgagagtttctttaacttcatatcttagcgagaatgatgaattttttgatgcagaagaggaaatcagtcggggagtcattatattacctgacacagaagatgatattaataatatagtcgaggaaactccccttcttggtaaaagtgaccaaaatgagttcacaaaagaggtccaattgtcgggatccgaacagatagcttcatcaagtgtggagagctatacaactaacgatgaaaatcatagccgtaaacacctcaaaaatcgtcacaaaaatcgtcgccgtggccaccctcatcatcaaaaaaccaaaagcgcccaatcctcaacagaaacatttacaagtaaggatttgtttgctctttcctatccaaagagtgttacacgccgtaatgacatacctgaagctgcagcttctccgccaagcctattatcttttttgagaaagaatgtaggcaaagatctgagctctattgccatgccagtaacctcaaatgagcctatttctattttgcagttgatatcagaaacatttgagtatgctccacttttaacgaaggctacccaacgtcctgatcctataacctttgtttctgcatttgctatttcctttctttccatatatagggataaaacaagaacgctaagaaagccttttaatcctttactggctgaaacatttgaacttatacgagaagatatggggtttaggcttatatcggaaaaggtctcacatcgtcctccagtatttgccttctttgcagagcatctcgactgggagtgtagttacactgtaacgccatcgcaaaagttttggggtaagtctattgaattgaataacgaaggtatactgagattgaagtttaagacaactggagaactatttgaatggacgcaaccaacaactattttaaaaaatttgatagcgggtgagagatatatggagcctgtcaacgaattcgaagtacattcttcgaagggagacaaatcacacatcctgttcgataaggcaggtatgtttagtggaagatctgaaggatttaaggtttcgataatcccaccaccttcgagcaatcgcaagaaggaaactctagctggtaaatggacacagagtttagctaatgaaactacacatgaaactatatgggaagtaggtgatttagttagcaatccgaagaagaaatatggctttactaaattcaccgcaaatttgaatgagataactgaaattgaaaagggcaatttaccacctacggactcaagattaagaccagatattagagcttacgaggagggaaatgttgataaggcggaagagtggaagctgaaattggaacaacttcaacgtgaaagacgtaataaagggcaagatgtggagcctaaatatttcgaaaaagtatctaagaatgaatggaaatacataactggaccgaagagttattgggaaagaagaaagaagcatgattggtctgatatttctcaactctggtga

SEQ ID NO: 4982 - DNA, 2991 bp, Artificial Sequence
  Description of Artificial Sequence: Synthetic polynucleotide
atggaaacaattgatatacaaaatagatcttttgttgttcgttgggtaaaatgtggccgtggcgatgtaatcaattatcagatcaagccattgaagaaatctattgaagtcggcatatacaaaaagttgaaatccagtgtagatgaccatgcttccgcagttcacattgcacctgacactaaaacattgttggactatactacgaaatctttattacataagggaagtagtagtaatattgaggagcatcacaggcgttcctctcagcactctcatagtagtagcaatggaagtgataataagaggaaagagagatcttattcttctttatccattagcggcatacagcagcaatcccaggaaatacccttacgtgaaaaactctctgcgtctggattcactttggtcaagagggtcggcaacgtttccggtaacactatggtccaaggtgatcttgaagtgaaagatacagactactattatgcatttatattggacaactcttcttccaagaatgcaaaaaagaaaattctttttaacgcaagtgtgataaacggcgataatcaatctatgataagcacaagatccacccctcccgcaaggcctacagctttaagcagaacatctactcaacaggatatgttatttagagtaggacaaggtcgttacttgcaaggctacttgttgaaaaaaaggagaaagagattacaaggttttaagaaaaggtttttcaccttggactttagatatggaaccttatcttactatttaaacgaccataatcaaacttgtaggggtgaaattgtcataagcttgtcttctgttagtgccaataagaaggacaaaataatcataattgattctggtatggaagtttgggtcttgaaggctacaactaaggaaaattggcagagttgggtcgatgcgttacaaacttgttttgacgatcagttcgaagataaggacacgtccactttggaagaaaatcccgacattcttgacgatgacaaggaagtaattaataaaagctctcctcaagaccacgaccacctcacgcccacggctacgaccaaaagtgcattatctcatagacagcatactcagaaagacatggatgacatatatgtcccattgcccagcgaatcttacgctactttctccatgaatttacgtttgattcaacaaagattggagcagtgtaaaaaagactctttatcttataaaccaactactttacatcaaagaagtgaggggttaaatggaacacattcttcttcttccgtctttaccaataatagagtgtcttctttcaatcattcttcttctggtatgacgtcttctgattctttagcctctgaagaggttccttccaacaaaacatatattgagcatgctttatataaccaattggcagatcttgaagtatttgttagcaggttcgttacacagggagaggttttattcaaggaccaccagatcctttgcaagaaagcaaaagacacgagagtttctttaacttcttatcttagcgagaatgatgaattttttgatgcagaagaggaaatcagtagaggagtcattatattacctgacacagaagatgatattaataatatagtcgaggaaactccccttcttggtaaaagtgaccaaaatgagttcacaaaagaggtccaattgagtggatccgaacagatagcttcttccagtgtggagagctatacaactaacgatgaaaatcatagccgtaaacacctcaaaaatcgtcacaaaaatcgtcgccgtggccaccctcatcatcaaaaaaccaaaagcgcccaatcctctacagaaacatttacaagtaaggatttgtttgctctttcctatccaaagagtgttacacgccgtaatgacatacctgaagctgcagcttctccgccaagcttattatcttttttgagaaagaatgtaggcaaagatttgagctctattgccatgccagtaacctctaatgagcctatttctattttgcagttgatatctgaaacatttgagtatgctccacttttaacgaaggctacccaacgtcctgatcctataacctttgtttctgcatttgctatttcctttctttccatatatagggataaaacaagaacgttgagaaagccttttaatcctttattagctgaaacatttgaacttataagagaagatatggggtttaggcttatatctgaaaaggtctctcatcgtcctccagtatttgccttctttgcagagcatctcgactgggagtgtagttacactgtaacgccatctcaaaagttttggggtaagtctattgaattgaataacgaaggtatattaagattgaagtttaagacaactggagaattatttgaatggacgcaaccaacaactattttaaaaaatttgatagcgggtgagagatatatggagcctgtcaacgaattcgaagtacattcttccaagggagacaaatctcacatcttattcgataaggcaggtatgtttagtggaagatctgaaggatttaaggtttctataatcccaccaccttccagcaatcgcaagaaggaaactttggctggtaaatggacacagagtttagctaatgaaactacacatgaaactatatgggaagtaggtgatttagttagcaatccgaagaagaaatatggctttactaaattcaccgcaaatttgaatgagataactgaaattgaaaagggcaatttaccacctacggacagtagattaagaccagatattagagcttacgaggagggaaatgttgataaggcggaagagtggaagttgaaattggaacaacttcaacgtgaaagacgtaataaagggcaagatgtggagcctaaatatttcgaaaaagtatctaagaatgaatggaaatacataactggaccgaagagttattgggaaagaagaaagaagcatgattggtctgatatttctcaactctggtga

SEQ ID NO: 4983 - DNA, 2145 bp, Saccharomyces cerevisiae
atgtcacatcttatcactttagctacatgcaacttgaatcaatgggccctagattttgaaggtaatagagaccgtatcctacagtccattaagattgccaaagagaggggtgccaggttacgtgtcggcccagaactggaaataactggctacggatgtttagatcattttttagaaaatgacgtttgccttcattcatgggaaatgtatgctcaaatcattaagaataaagaaacccatggattaatacttgacattggtatgcccgttctacacaagaatgttcgttataattgtcgtttgttatccttggatggtgagatattgttcataagacctaagatttggttagctaatgatggtaactatagggaaatgagatttttcacaccttggatgaaacctggcgtggtggaggactttatccttccacctgagattcagaaagttaccggccagagacttgtgccatttggggacgctgtgataaattcattggatacatgcattggtacagaaacttgtgaagaattgtttacacctcaatccccccacatcgccatgtctttagatggtgtggaaatcatgacaaactcatctggttctcatcatgaactgcgtaagttaaataaaaggttagacctaattttaaatgccactaaacgttgtggtggtgtttacttgtatgcaaatcaaagaggttgtgatggtgacagattatattatgatggctgtgcactaattgccatcaatggtacaattgtagcccaaggttcacaattttcgctagatgatgtggaagtagttactgctactgtggacctagaagaggtgaggagttatcgtgcagctgtcatgtctcgtggcctacaagcctccttggcagaaataaagttcaagcgtattgatattcctgtagaattggctttaatgacctccagatttgatcctacagtgtgtccaacaaaagtccgcgagcctttctatcactctcctgaggaagaaattgcactgggacctgcttgctggatgtgggattatttaagacgttgtaacggaacagggtttttccttcccttatctgggggcattgactcttgtgcaactgcaatgattgtccactctatgtgccgtttagtgaccgacgctgctcaaaatggaaatgagcaagttatcaaagacgttcgtaagataacacgtagcggcgatgattggattccagacagtccacaggatctagcctcaaaaatatttcactcctgtttcatgggtacggaaaattcatccaaggagacaagaaacagagcaaaggacctttccaatgcaattggatcttaccacgtggatttaaagatggactcattggtatccagtgtggtgtccttattcgaagtagccactggcaaaaaaccaatatacaaaatatttgggggatctcaaatcgagaacttggctttacaaaacatccaggcgcgtctaagaatggttctttcttatctttttgcgcaactgttgccgtgggttcgtggtatcccaaactcgggtggattgttagtacttggtagcgcaaatgttgatgagtgcttacgtgggtatctaacaaaatatgactgctcctccgcagatatcaaccctattgggggtatttcaaaaactgacttgaaaagattcattgcctacgcatcaaaacaatataacatgccaatcttgaatgactttttaaacgctacaccaactgcagaattagaacctatgactaaagattacgttcaatcggatgagatagatatggggatgacgtatgaagaattgggcgtgtttggttacctaagaaaggttgaaaaatgtggtccttattctatgttcttaaaacttcttcatcaatggtccccaaagttaacacctcgtcaaatatctgaaaaggtgaaaagatttttcttcttctatgccatcaacagacacaagcaaactgttttaactcctagttatcatgctgaacagtattcaccagaagacaacagatttgacttacgtcctttcttaatcaacccaagatttccatgggcttcaagaaaaattgatgaagttgtcgagcagtgtgaagcacataaaggctcaacgcttgacattatgtctattgattag

SEQ ID NO: 4984 - DNA, 2145 bp, Artificial Sequence
  Description of Artificial Sequence: Synthetic polynucleotide
atgtcccatcttatcactttagctacatgcaacttgaatcaatgggccttggattttgaaggtaatagagaccgtatcttacagtccattaagattgccaaagagaggggtgccaggttacgtgtcggcccagaattggaaataactggctacggatgtttagatcattttttagaaaatgacgtttgccttcattcttgggaaatgtatgctcaaatcattaagaataaagaaacccatggattaatacttgacattggtatgcccgttttgcacaagaatgttcgttataattgtcgtttgttatccttggatggtgagatattgttcataagacctaagatttggttagctaatgatggtaactatagggaaatgagatttttcacaccttggatgaaacctggcgtggtggaggactttatccttccacctgagattcagaaagttaccggccagagacttgtgccatttggggacgctgtgataaattctttggatacatgcattggtacagaaacttgtgaagaattgtttacacctcaatccccccacatcgccatgtctttagatggtgtggaaatcatgacaaactcttctggttctcatcatgaattgcgtaagttaaataaaaggttagacttgattttaaatgccactaaacgttgtggtggtgtttacttgtatgcaaatcaaagaggttgtgatggtgacagattatattatgatggctgtgcattgattgccatcaatggtacaattgtagcccaaggttctcaattttctttagatgatgtggaagtagttactgctactgtggacttggaagaggtgaggagttatcgtgcagctgtcatgtctcgtggcttacaagcctccttggcagaaataaagttcaagcgtattgatattcctgtagaattggctttaatgacctccagatttgatcctacagtgtgtccaacaaaagtccgcgagcctttctatcactctcctgaggaagaaattgcattgggacctgcttgctggatgtgggattatttaagacgttgtaacggaacagggtttttccttcccttatctgggggcattgactcttgtgcaactgcaatgattgtccactctatgtgccgtttagtgaccgacgctgctcaaaatggaaatgagcaagttatcaaagacgttcgtaagataacacgtagcggcgatgattggattccagacagtccacaggatttggcctccaaaatatttcactcctgtttcatgggtacggaaaattcttccaaggagacaagaaacagagcaaaggacctttccaatgcaattggatcttaccacgtggatttaaagatggactctttggtatccagtgtggtgtccttattcgaagtagccactggcaaaaaaccaatatacaaaatatttgggggatctcaaatcgagaacttggctttacaaaacatccaggcgcgtttaagaatggttctttcttatctttttgcgcaattattgccgtgggttcgtggtatcccaaacagtggtggattgttagtacttggtagcgcaaatgttgatgagtgcttacgtgggtatttgacaaaatatgactgctcctccgcagatatcaaccctattgggggtatttccaaaactgacttgaaaagattcattgcctacgcatccaaacaatataacatgccaatcttgaatgactttttaaacgctacaccaactgcagaattagaacctatgactaaagattacgttcaatctgatgagatagatatggggatgacgtatgaagaattgggcgtgtttggttacttgagaaaggttgaaaaatgtggtccttattctatgttcttaaaacttcttcatcaatggtccccaaagttaacacctcgtcaaatatctgaaaaggtgaaaagatttttcttcttctatgccatcaacagacacaagcaaactgttttaactcctagttatcatgctgaacagtattctccagaagacaacagatttgacttacgtcctttcttaatcaacccaagatttccatgggcttccagaaaaattgatgaagttgtcgagcagtgtgaagcacataaaggctctacgcttgacattatgtctattgattga

SEQ ID NO: 4985 - DNA, 1203 bp, Saccharomyces cerevisiae
atgtctgacgatttgagaagaaaaattgctttatcccagtttgagagagccaagaatgttctagatgcgacattccaagaagcatacgaggatgatgaaaacgatggtgatgcattaggttccctgccatcatttaatggacaatcaaataggaacagaaaatatacgggcaaaaccggtagtactactgatagaatttcaagtaaggaaaagagtagtttacccacttggagtgatttttttgataataaggagttggtaagtcttcctgatagagatctggacgtaaatacatactatacattacctacttcattgttatcaaataccacttcaattcccatctttattttccaccatggggcgggctcctcaggtttatcatttgcaaacttggccaaggaattaaatactaaactagaaggaagatgcggatgctttgcatttgatgctagggggcatgcagaaacaaagtttaagaaggctgatgcgcctatatgctttgacagggactcttttatcaaagattttgtaagcctgctaaattattggtttaagtctaaaataagccaagagccacttcagaaggtatctgttatactaattggtcattcccttggtggaagtatatgtacttttgcgtaccctaaattatcaacagaactacaaaagaaaattcttggtattactatgttagatattgtagaagaggctgccattatggccttaaataaagttgaacattttttgcagaatacacccaatgtatttgaatcaattaatgacgctgtcgattggcacgttcaacacgcgttatcgagattgaggtcaagcgccgaaattgctataccagctttatttgctccgctcaagtcagggaaagttgtcaggataacaaaccttaagacctttagccctttctgggacacatggtttaccgatctgtcgcactcctttgttggcttacctgttagtaaattattaatattggcgggaaacgaaaatctcgataaagaattaattgtggggcaaatgcaaggtaaatatcagttggtagttttccaagattccgggcatttcattcaagaagattcgcctataaaaacagcaatcactttaattgatttctggaagcggaacgattctaggaatgtagtaatcaagactaattggggtcaacacaaaaccgtgcaaaatacataa

SEQ ID NO: 4986 - DNA, 1203 bp, Artificial Sequence
  Description of Artificial Sequence: Synthetic polynucleotide
atgtctgacgatttgagaagaaaaattgctttatcccagtttgagagagccaagaatgttttggatgcgacattccaagaagcatacgaggatgatgaaaacgatggtgatgcattaggttccttgccatcttttaatggacaaagcaataggaacagaaaatatacgggcaaaaccggtagtactactgatagaatttccagtaaggaaaagagtagtttacccacttggagtgatttttttgataataaggagttggtaagtcttcctgatagagatttggacgtaaatacatactatacattacctacttctttgttatccaataccacttctattcccatctttattttccaccatggggcgggctccagtggtttatcttttgcaaacttggccaaggaattaaatactaaattagaaggaagatgcggatgctttgcatttgatgctagggggcatgcagaaacaaagtttaagaaggctgatgcgcctatatgctttgacagggactcttttatcaaagattttgtaagcttgttgaattattggtttaagtctaaaataagccaagagccacttcagaaggtatctgttatattgattggtcattcccttggtggaagtatatgtacttttgcgtaccctaaattatctacagaattacaaaagaaaattcttggtattactatgttagatattgtagaagaggctgccattatggccttaaataaagttgaacattttttgcagaatacacccaatgtatttgaaagtattaatgacgctgtcgattggcacgttcaacacgcgttatctagattgaggagcagcgccgaaattgctataccagctttatttgctccgctcaagagtgggaaagttgtcaggataacaaaccttaagacctttagccctttctgggacacatggtttaccgatttatcccactcctttgttggcttacctgttagtaaattattaatattggcgggaaacgaaaatctcgataaagaattaattgtggggcaaatgcaaggtaaatatcagttggtagttttccaagattccgggcatttcattcaagaagattctcctataaaaacagcaatcactttaattgatttctggaagagaaacgattctaggaatgtagtaatcaagactaattggggtcaacacaaaaccgtgcaaaatacatga

SEQ ID NO: 4987 - DNA, 1032 bp, Saccharomyces cerevisiae
atgtttgcaaacgttggatttagaactttgagggtctcgagaggtcccctttatggatcctgcagtcaaatcatcagcttttccaagaggactttttactcaagtgccaagagtgggtatcaatcgaacaacagtcatggtgatgcgtatagttcaggtagccaatcaggcccgttcacctataaaaccgcggtagctttccaaccaaaagacagagacgatctgatataccaaaaactaaaggattctattagatcacctacaggagaagacaactattttgttacatcaaacaacgttcacgatatttttgccggtgtcgcagacggtgttggaggatgggctgagcatgggtatgactccagcgccatctcaagagaattgtgtaaaaaaatggacgaaataagcactgctttagcagaaaattcatccaaagaaacgcttttaacgccaaagaaaattattggtgctgcatacgcaaaaattagggatgagaaagtagtgaaggttggtgggacaacagccattgtggctcacttcccatctaatggaaaattggaagttgccaacttgggtgattcttggtgtggagtcttcagagattctaaacttgtattccagacaaagtttcaaactgttggatttaatgctccttaccaattgtcaatcattccagaagaaatgttgaaagaggccgaaagaaggggtagcaagtatattttaaacacccccagagacgctgatgaatatagcttccaattgaaaaaaaaggatattattatattggctaccgatggtgtaaccgataatattgccacagatgatattgagctttttctgaaggataacgctgcgagaacaaacgatgagttacagctattatcccagaagtttgtggacaatgttgtcagtttaagcaaggaccccaattaccccagtgtttttgcgcaagagatttctaagctaactggcaaaaactacagcggtggtaaagaagacgatataactgttgttgtcgtgagagttgactaa

SEQ ID NO: 4988 - DNA, 1032 bp, Artificial Sequence
  Description of Artificial Sequence: Synthetic polynucleotide
atgtttgcaaacgttggatttagaactttgagggtctctagaggtcccctttatggatcctgcagtcaaatcatcagcttttccaagaggactttttactctagtgccaagagtgggtatcaaagtaacaacagtcatggtgatgcgtatagttctggtagccaaagtggcccgttcacctataaaaccgcggtagctttccaaccaaaagacagagacgatttgatataccaaaaattgaaggattctattagatctcctacaggagaagacaactattttgttacaagtaacaacgttcacgatatttttgccggtgtcgcagacggtgttggaggatgggctgagcatgggtatgactccagcgccatctccagagaattgtgtaaaaaaatggacgaaataagcactgctttagcagaaaattcttccaaagaaacgcttttaacgccaaagaaaattattggtgctgcatacgcaaaaattagggatgagaaagtagtgaaggttggtgggacaacagccattgtggctcacttcccatctaatggaaaattggaagttgccaacttgggtgattcttggtgtggagtcttcagagattctaaacttgtattccagacaaagtttcaaactgttggatttaatgctccttaccaattgtccatcattccagaagaaatgttgaaagaggccgaaagaaggggtagcaagtatattttaaacacccccagagacgctgatgaatatagcttccaattgaaaaaaaaggatattattatattggctaccgatggtgtaaccgataatattgccacagatgatattgagctttttttgaaggataacgctgcgagaacaaacgatgagttacagcttttatcccagaagtttgtggacaatgttgtcagtttaagcaaggaccccaattaccccagtgtttttgcgcaagagatttctaagttgactggcaaaaactacagcggtggtaaagaagacgatataactgttgttgtcgtgagagttgactga

SEQ ID NO: 4989 - DNA, 3270 bp, Saccharomyces cerevisiae
atggacgatggacggaaaaaagaattgcatgatttgaacacccgagcttggaatggcgaagaagtctttcccctgaaaagtaaaaaactggattccagtataaagagaaacactggctttataaaaaaactaaagaagggttttgtgaaaggttcagaatcttcattattgaaagatttaagtgaggcgtccttggaaaagtacctatcagagataatagtgacggtaacagaatgtctgctaaatgttttgaataaaaatgatgacgtaattgccgctgttgagatcataagtggacttcatcaaaggttcaatggccgatttactagtccgcttttaggagcttttttacaagcttttgagaacccctctgttgacattgaatccgaaagagatgagcttcaaaggataaccagagttaaaggtaatcttcgggtatttaccgagctttatttagttggagtttttagaacattggatgatattgagtcgaaagatgctattccaaacttcctacagaagaaaactgggcgaaaggatccgttgttattcagtattctcagagagattcttaattataagttcaaattgggctttactaccactattgcgaccgcatttattaagaaatttgcacctttgtttcgcgacgatgataattcttgggatgatttaatatatgactcgaagttaaaaggtgcgttacagtctctgtttaagaattttatagacgccacttttgcgagggccacagaactgcataagaaggtcaataaactgcaaagagaacatcagaaatgccaaataagaacgggaaaattgagagatgagtacgtagaggagtacgacaagttacttccaatattcattaggttcaagacatctgcaattactttgggagaattttttaagttagaaattccggagcttgaaggtgcctctaatgatgatctgaaagaaacagcttctccaatgatcacgaatcagatattgccacccaaccaacgattatgggaaaatgaagatacaaggaaattttatgaaatcttaccagatatctcaaaaacagtagaagaatcacaatcttctaaaacagaaaaagattcaaacgttaactcaaaaaatatcaatctattctttacggatttggaaatggcagattgtaaagatataatcgatgacctttcaaatagatattggtcatcatatttggacaacaaagccacaagaaatcgaatattgaaatttttcatggaaacacaagattggagcaaactgccagtgtattccagatttattgcaacaaatagcaaatatatgccggaaattgtttctgagtttattaactacctagacaatggcttcaggagtcaattacattctaataagattaacgttaaaaacatcatcttcttcagtgaaatgattaaatttcaattaataccatcgtttatgatttttcataagattagaacattaatcatgtatatgcaagttccaaataacgtagaaattttgacggttttgttggagcactcagggaaatttctgctaaataagccagaatataaggaattaatggaaaaaatggtccaactaatcaaggataaaaaaaatgataggcaattgaacatgaacatgaaaagcgccttagaaaacataattactttactttatcccccttctgtaaaatcattaaatgttacggtaaaaacaataacgcctgaacaacagttttatcgcatattaattagaagtgaactaagtagcctagacttcaaacacattgtcaagttggttcggaaagctcactgggacgatgtagctattcagaaagtgctgttttctctgttttcaaaaccacataagattagctatcaaaatattcccttattaacaaaagttctaggcggtctatacagttaccgccgcgatttcgtcatcagatgtatagaccaagtactggaaaacattgagcgaggcttagaaattaacgattatggacaaaacatgcatagaatatcaaatgtcagatacttaactgaaatattcaactttgaaatgataaaatccgatgttttgttagatactatctaccacattattcggtttggtcatatcaacaatcaacccaatccattttatttaaactactcagatccaccggataattatttcaggattcaactagtcactacaattctgttaaatatcaacaggacccctgcagcttttactaagaaatgcaaacttttgctgaggtttttcgagtattatacttttattaaagaacaacctttacccaaggaaacagaattcagagtttcaagcacatttaaaaaatatgagaatattttcggaaacactaaatttgaaaggtcagaaaatttggtagaaagtgcctcaaggttggaaagtttactgaaatcattaaacgcaataaaaagtaaagacgacagagtgaagggatcttctgcaagcattcacaacggtaaggagagtgctgttcctatcgagtcaatcaccgaagatgatgaggatgaagatgatgaaaacgacgatggtgtcgatttactaggagaagatgaagacgcggagataagtacaccgaacacagagtcagcgccaggaaaacatcaggcaaagcaagacgaaagtgaagatgaagacgatgaggacgatgacgaggatgatgacgatgacgatgacgatgatgatgatgatggagaagaaggcgatgaggatgatgatgaagatgatgatgatgaggatgatgatgatgaagaagaagaagacagcgactctgatttggagtatggtggtgatcttgacgcagacagagatattgaaatgaaacgaatgtatgaagagtacgagagaaaactaaaggatgaggaagaaaggaaagcggaagaagaattggaaaggcaatttcagaaaatgatgcaagaatccatagacgcaaggaaaagcgaaaaggttgttgccagtaaaattccagtaatttcgaagccagtcagcgttcaaaaacctttattattaaaaaagagtgaagaaccttcttcaagcaaggagacctacgaagagttatccaagccaaagaagattgcatttacgttcttgactaaaagcggtaagaagacacaatcaagaattttacaattaccaacggatgtgaaatttgtctctgatgtccttgaagaagaagagaaactaaaaaccgagcgaaacaagattaaaaagattgttttaaaacgttctttcgactga

SEQ ID NO: 4990 - DNA, 3270 bp, Artificial Sequence
  Description of Artificial Sequence: Synthetic polynucleotide
atggacgatggaagaaaaaaagaattgcatgatttgaacaccagagcttggaatggcgaagaagtctttcccttgaaaagtaaaaaattggattccagtataaagagaaacactggctttataaaaaaattgaagaagggttttgtgaaaggttctgaatcttctttattgaaagatttaagtgaggcgtccttggaaaagtacctttctgagataatagtgacggtaacagaatgtttattgaatgttttgaataaaaatgatgacgtaattgccgctgttgagatcataagtggacttcatcaaaggttcaatggcagatttactagtccgcttttaggagcttttttacaagcttttgagaacccctctgttgacattgaatccgaaagagatgagcttcaaaggataaccagagttaaaggtaatcttcgtgtatttaccgagctttatttagttggagtttttagaacattggatgatattgagagtaaagatgctattccaaacttcttacagaagaaaactgggagaaaggatccgttgttattcagtattctcagagagattcttaattataagttcaaattgggctttactaccactattgcgaccgcatttattaagaaatttgcacctttgtttcgcgacgatgataattcttgggatgatttaatatatgactccaagttaaaaggtgcgttacagtctttatttaagaattttatagacgccacttttgcgagggccacagaattacataagaaggtcaataaattacaaagagaacatcagaaatgccaaataagaacgggaaaattgagagatgagtacgtagaggagtacgacaagttacttccaatattcattaggttcaagacatctgcaattactttgggagaattttttaagttagaaattccggagcttgaaggtgcctctaatgatgatttgaaagaaacagcttctccaatgatcacgaatcagatattgccacccaaccaaagattatgggaaaatgaagatacaaggaaattttatgaaatcttaccagatatctccaaaacagtagaagaatctcaatcttctaaaacagaaaaagattccaacgttaactccaaaaatatcaatttattctttacggatttggaaatggcagattgtaaagatataatcgatgacctttctaatagatattggtcttcttatttggacaacaaagccacaagaaatagaatattgaaatttttcatggaaacacaagattggagcaaattaccagtgtattccagatttattgcaacaaatagcaaatatatgccggaaattgtttctgagtttattaactacttggacaatggcttcaggagtcaattacattctaataagattaacgttaaaaacatcatcttcttcagtgaaatgattaaatttcaattaataccatcttttatgatttttcataagattagaacattaatcatgtatatgcaagttccaaataacgtagaaattttgacggttttgttggagcactctgggaaatttttattgaataagccagaatataaggaattaatggaaaaaatggtccaattgatcaaggataaaaaaaatgataggcaattgaacatgaacatgaaaagcgccttagaaaacataattactttactttatcccccttctgtaaaatctttaaatgttacggtaaaaacaataacgcctgaacaacagttttatcgcatattaattagaagtgaattaagtagcttggacttcaaacacattgtcaagttggttagaaaagctcactgggacgatgtagctattcagaaagtgcttttttctttattttccaaaccacataagattagctatcaaaatattcccttattaacaaaagttttaggcggtttatacagttaccgccgcgatttcgtcatcagatgtatagaccaagtattggaaaacattgagagaggcttagaaattaacgattatggacaaaacatgcatagaatatccaatgtcagatacttaactgaaatattcaactttgaaatgataaaatccgatgttttgttagatactatctaccacattattagatttggtcatatcaacaatcaacccaatccattttatttaaactactctgatccaccggataattatttcaggattcaattggtcactacaattttattaaatatcaacaggacccctgcagcttttactaagaaatgcaaacttttgttgaggtttttcgagtattatacttttattaaagaacaacctttacccaaggaaacagaattcagagtttccagcacatttaaaaaatatgagaatattttcggaaacactaaatttgaaaggtctgaaaatttggtagaaagtgcctctaggttggaaagtttattgaaatctttaaacgcaataaaaagtaaagacgacagagtgaagggatcttctgcaagcattcacaacggtaaggagagtgctgttcctatcgagagtatcaccgaagatgatgaggatgaagatgatgaaaacgacgatggtgtcgatttattaggagaagatgaagacgcggagataagtacaccgaacacagagtctgcgccaggaaaacatcaggcaaagcaagacgaaagtgaagatgaagacgatgaggacgatgacgaggatgatgacgatgacgatgacgatgatgatgatgatggagaagaaggcgatgaggatgatgatgaagatgatgatgatgaggatgatgatgatgaagaagaagaagacagcgactctgatttggagtatggtggtgatcttgacgcagacagagatattgaaatgaaaagaatgtatgaagagtacgagagaaaattgaaggatgaggaagaaaggaaagcggaagaagaattggaaaggcaatttcagaaaatgatgcaagaatccatagacgcaaggaaaagcgaaaaggttgttgccagtaaaattccagtaatttccaagccagtcagcgttcaaaaacctttattattaaaaaagagtgaagaaccttcttctagcaaggagacctacgaagagttatccaagccaaagaagattgcatttacgttcttgactaaaagcggtaagaagacacaatctagaattttacaattaccaacggatgtgaaatttgtctctgatgtccttgaagaagaagagaaattgaaaaccgagagaaacaagattaaaaagattgttttaaaacgttctttcgactga

SEQ ID NO: 4991 - DNA, 1659 bp, Saccharomyces cerevisiae
atggaggcacttatcgtatttatagtgctttccgtatccggagcatttgcttacaaatgctcctatgaaaggctctggtttaaagtagggtctttgtttgacattatatcaacttcctcgaagaaaaatgtcattccgttggcaagcaaaatggaagttggctcgaatgaggatgtgtctagtatgggtaatttcataaataaattctacacagagtattctttaccctcacataaggtactgcaatcactgcgagtccttttttcattagcaatgatgacgtatacagtaaccatagagattattctatggcagattaaggttgctggaatggacaaggaagttactttcataacgacttgggtgtggcctctgactgcaatcatgctatccttcatactaattttatttcagccctttttcattataatatcgttactgaataaattctacaatgacaagttcgatatcgataggttgataatagtgacatgcataatcttgtccacacttattgcgctgttaagttacataaatattggaccgttccagtacacaaaaaatattctaactagattgtccatcggaggcgtcacagtcatggcttccctatctgggttagccactgtttctagtttatactacaactttttagtcatctggcacaagtttcgtaatacaccaatgtcagaccccagttttagaaacatcaacaacagcaacaataacagtaaatctctcttatggacaacagacgcctatatagaggaaaaaatccaagattatgaacacaacattgaacaaaatgtacaaatattaagaagtttagaagaagaggtcggagaaaactcaacttttaaagcagagttgatggaaaaaatcgcctggtatcaactggagcttgggaaattggaagcattattacaacagtcccctcaggtacgcacttttaagaaagcttttgaagtcgggtttatcatatactgtcttcataaactaataataactttcctgaaaagaatcccctatatcatataccactcgctcaaatatccagatgactacgattatgaaaattttagtgaaaatgcagcatccgatcctttagccattacgatagcaaatattttggatttttcgtttttcaggttcaattaccagcacgatctcgattcgttaacaaaacagatatcgttatttttgtcaatttctctctttctttgctgtctttctgctgtcaataccaccatctcctacgttgtgacccttttgcccataaagttccagattcttgcacttttcgccatgcagaatgatgacactgctaatgtacttccagagtacaccaataactcttcctataagggaaaaaagagaaactattctcaggaacaaaaaggaatatctttgataaaaaatctggtggtgtcagagttgactggcgtctacgttttggctacaacgctaatggttaggtcccatctcccttttgaagtatcacaaagattaaaggagctattgggtggaaagtttaccgtcccaaacattgtcatagattcttggtttgatgaagtctacgcttttgcatgtgtgtttacctttatttgcataagaattgcagaacgaaagctttccaccaaaaaagtcagtgttgaataa

SEQ ID NO: 4992 - DNA, 1659 bp, Artificial Sequence
  Description of Artificial Sequence: Synthetic polynucleotide
atggaggcacttatcgtatttatagtgctttccgtatccggagcatttgcttacaaatgctcctatgaaaggctctggtttaaagtagggtctttgtttgacattatatctacttcctccaagaaaaatgtcattccgttggcaagcaaaatggaagttggcagtaatgaggatgtgtctagtatgggtaatttcataaataaattctacacagagtattctttaccctctcataaggtattacaaagtcttagggtccttttttctttagcaatgatgacgtatacagtaaccatagagattattttatggcagattaaggttgctggaatggacaaggaagttactttcataacgacttgggtgtggcctttaactgcaatcatgctttccttcatattgattttatttcagccctttttcattataatatctttattgaataaattctacaatgacaagttcgatatcgataggttgataatagtgacatgcataatcttgtccacacttattgcgttattaagttacataaatattggaccgttccagtacacaaaaaatattttgactagattgtccatcggaggcgtcacagtcatggcttccttatctgggttagccactgtttctagtttatactacaactttttagtcatctggcacaagtttcgtaatacaccaatgtctgaccccagttttagaaacatcaacaacagcaacaataacagtaaatctctcttatggacaacagacgcctatatagaggaaaaaatccaagattatgaacacaacattgaacaaaatgtacaaatattaagaagtttagaagaagaggtcggagaaaactctacttttaaagcagagttgatggaaaaaatcgcctggtatcaattggagcttgggaaattggaagcattattacaacagtcccctcaggtacgcacttttaagaaagcttttgaagtcgggtttatcatatactgtcttcataaattgataataactttcttgaaaagaatcccctatatcatataccacagtctcaaatatccagatgactacgattatgaaaattttagtgaaaatgcagcatccgatcctttagccattacgatagcaaatattttggatttttcttttttcaggttcaattaccagcacgatctcgattctttaacaaaacagatatctttatttttgtctatttctctctttctttgctgtctttctgctgtcaataccaccatctcctacgttgtgacccttttgcccataaagttccagattcttgcacttttcgccatgcagaatgatgacactgctaatgtacttccagagtacaccaataactcttcctataagggaaaaaagagaaactattctcaggaacaaaaaggaatatctttgataaaaaatttggtggtgtctgagttgactggcgtctacgttttggctacaacgttgatggttaggtcccatctcccttttgaagtatctcaaagattaaaggagttattgggtggaaagtttaccgtcccaaacattgtcatagattcttggtttgatgaagtctacgcttttgcatgtgtgtttacctttatttgcataagaattgcagaaagaaagctttccaccaaaaaagtcagtgttgaatga

SEQ ID NO: 4993 - DNA, 3348 bp, Saccharomyces cerevisiae
atgcgtctacttcgaagaaacatgttagtattgacactgctcgtttgtgtgttttcatccatcatttcatgctcaatcccattgtcgtctcgcacctcaaggcggcagatagtggaagatgaagttgcctccactaaaaagctcaatttcaactatggtgtggataaaaatataaactcgcccattcctgctccaagaaccactgaaggtttaccaaatatgaaactcagctcatatccaactcctaacttattgaatactgctgataatcgacgtgctaacaaaaaaggacgtagggctgccaattctataagtgtaccctatttggagaatcgttccttgaacgaactgagtttatcagatatactaatcgcagccgacgttgagggtggacttcatgctgtagatagaagaaatggtcatatcatatggtcaatcgaaccagaaaattttcaacctctgatagaaatacaagaaccttcgaggttagaaacatatgaaacgttgattatagaacctttcggtgatgggaacatttactactttaacgcccatcaagggttacaaaaactgcctttatccatacgacaacttgtatcaacttccccgctgcacttgaaaacaaatattgtggttaatgactctggaaaaattgttgaagatgaaaaggtctacactggatcgatgagaactataatgtatactataaacatgttgaatggtgaaattatatcagcgttcggacctggttcaaaaaacgggtatttcgggagccagagtgtggattgctcacctgaggagaagataaaacttcaggaatgtgaaaatatgattgtaataggcaaaactatttttgagctgggaattcactcttatgatggagcaagctacaatgtcacttactctacatggcagcaaaatgttttagatgttcccctagcgcttcagaatacattttcaaaggacggcatgtgcatagcgcctttccgtgataaatcattgctagcaagcgatttagattttagaattgctagatgggtttctccgacattccccggaattattgttgggcttttcgatgtgtttaatgatctccgcaccaatgaaaatatactggtaccgcatccctttaatcctggtgatcatgaaagtatatcgagtaacaaagtttacttggatcagacttcgaacctctcctggtttgcattatctagtcagaattttccatctttagtcgaatcagctcccatatcaagatacgcttccagtgaccgttggagggtgtcttcaatttttgaagatgagactttattcaagaacgcaatcatgggtgttcatcagatatataataatgaatatgatcacctttatgaaaactatgaaaaaacgaatagtttggacactacgcacaaatatccacctctgatgattgattcgtccgttgatacaaccgatttacatcagaataacgagatgaattcactaaaggaatacatgtcaccagaagaccttgaggcatatagaaaaaagatacacgagcaaatatcgagagaattagatgaaaagaaccaaaattctttgctactgaagtttggaagtctagtatatcgaattatagagactggagtatttctgttgttatttctcattttttgtgcaatactacaaagattcaaaattttgccgccactatatgtattattatccaaaattggatttatgcctgaaaaggaaatccccatagttgagtcgaaatcgctaaattgtccctcttcatcggaaaatgtaaccaagccattcgatatgaaatcagggaagcaagttgtttttgaaggtgctgtgaacgatggaagtctaaaatctgaaaaagataacgatgatgctgatgaagatgatgaaaaatcactagatttaaccacagaaaagaagaagaggaaaagaggttcgagaggaggcaaaaagggccgaaaatcacgcattgcaaatataccaaactttgagcaatctttaaaaaatttggtagtatccgaaaaaattttaggttacggttcatcaggaacagtagtttttcagggaagttttcaaggaagacctgttgcggtaaagagaatgttaattgatttttgtgacatagctttaatggaaataaaacttttgactgaaagcgatgatcaccctaacgtcatacgatactactgttcagaaacaacagacagatttttgtatattgctttagagctctgcaatttgaaccttcaagatttggtggagtctaagaatgtatcagatgaaaacctgaaattacagaaagagtataatccaatttcgttattgagacaaatagcgtccggggtagcacatttacattctttaaagattatccatcgagatttaaagcctcaaaatattctcgtttctacttcgagtaggtttactgccgatcagcaaacaggagcagaaaatcttcgaattttgatatcagactttggtctttgcaaaaaactagactctggtcagtcttcatttagaacaaatttgaataacccttctggcacaagtggttggagggccccagagctgcttgaagaatcaaacaatttgcagtgccaagtcgaaacggaacactcttctagtaggcatacagtagtttcatctgattctttttatgatccgttcaccaagaggaggctaacaagatctattgatattttttctatgggatgtgtattctattatatcctatccaaagggaagcatccatttggagataaatattcacgtgaaagcaatatcataagaggaatattcagtcttgatgaaatgaaatgtctacatgatagatccttaattgcagaagctacagatctgatctcccaaatgattgatcacgatccgttaaaaagacctactgctatgaaagttctaaggcatccgttgttttggccaaagtcgaaaaaattggagttccttttaaaagttagtgataggcttgaaattgaaaacagagaccctccaagtgccctgttaatgaaatttgacgccggttctgactttgtaatacccagtggagattggactgtcaagtttgataaaacattcatggacaaccttgaaaggtacagaaaataccattcatcaaagttaatggatctattaagagcacttaggaataaatatcatcattttatggatttacctgaagatatagcagaactaatggggccggtacccgatggattttacgattacttcaccaagcgttttccaaacctattaataggtgtttatatgattgtcaaggaaaatttaagtgacgatcaaattttacgtgaatttttgtattcataa

SEQ ID NO: 4994 - DNA, 3348 bp, Artificial Sequence
  Description of Artificial Sequence: Synthetic polynucleotide
atgcgtttacttagaagaaacatgttagtattgacattactcgtttgtgtgttttcttccatcatttcttgctccatcccattgtcttctcgcacctctaggaggcagatagtggaagatgaagttgcctccactaaaaagctcaatttcaactatggtgtggataaaaatataaactctcccattcctgctccaagaaccactgaaggtttaccaaatatgaaactcagctcttatccaactcctaacttattgaatactgctgataatagacgtgctaacaaaaaaggacgtagggctgccaattctataagtgtaccctatttggagaatcgttccttgaacgaattaagtttaagtgatatattgatcgcagccgacgttgagggtggacttcatgctgtagatagaagaaatggtcatatcatatggtctatcgaaccagaaaattttcaacctttgatagaaatacaagaaccttctaggttagaaacatatgaaacgttgattatagaacctttcggtgatgggaacatttactactttaacgcccatcaagggttacaaaaattacctttatccataagacaacttgtatccacttccccgttgcacttgaaaacaaatattgtggttaatgactctggaaaaattgttgaagatgaaaaggtctacactggatccatgagaactataatgtatactataaacatgttgaatggtgaaattatatctgcgttcggacctggttccaaaaacgggtatttcgggagccagagtgtggattgctctcctgaggagaagataaaacttcaggaatgtgaaaatatgattgtaataggcaaaactatttttgagttaggaattcactcttatgatggagcaagctacaatgtcacttactctacatggcagcaaaatgttttagatgttcccttagcgcttcagaatacattttccaaggacggcatgtgcatagcgcctttccgtgataaatctttgttggcaagcgatttagattttagaattgctagatgggtttctccgacattccccggaattattgttgggcttttcgatgtgtttaatgatctccgcaccaatgaaaatatattagtaccgcatccctttaatcctggtgatcatgaaagtatatctagtaacaaagtttacttggatcagacttctaacctctcctggtttgcattatctagtcagaattttccatctttagtcgaatctgctcccatatctagatacgcttccagtgaccgttggagggtgtcttccatttttgaagatgagactttattcaagaacgcaatcatgggtgttcatcagatatataataatgaatatgatcacctttatgaaaactatgaaaaaacgaatagtttggacactacgcacaaatatccacctttgatgattgattcttccgttgatacaaccgatttacatcagaataacgagatgaattctttgaaggaatacatgtctccagaagaccttgaggcatatagaaaaaagatacacgagcaaatatctagagaattagatgaaaagaaccaaaattctttgttgttgaagtttggaagtttagtatatagaattatagagactggagtatttttattgttatttctcattttttgtgcaatattgcaaagattcaaaattttgccgccattgtatgtattattatccaaaattggatttatgcctgaaaaggaaatccccatagttgagagtaaatctttgaattgtccctcttcttctgaaaatgtaaccaagccattcgatatgaaaagtgggaagcaagttgtttttgaaggtgctgtgaacgatggaagtttgaaatctgaaaaagataacgatgatgctgatgaagatgatgaaaaatctttagatttaaccacagaaaagaagaagaggaaaagaggttccagaggaggcaaaaagggcagaaaaagccgcattgcaaatataccaaactttgagcaatctttaaaaaatttggtagtatccgaaaaaattttaggttacggttcttctggaacagtagtttttcagggaagttttcaaggaagacctgttgcggtaaagagaatgttaattgatttttgtgacatagctttaatggaaataaaacttttgactgaaagcgatgatcaccctaacgtcataagatactactgttctgaaacaacagacagatttttgtatattgctttagagctctgcaatttgaaccttcaagatttggtggagtctaagaatgtatctgatgaaaacttgaaattacagaaagagtataatccaatttctttattgagacaaatagcgtccggggtagcacatttacattctttaaagattatccatagagatttaaagcctcaaaatattctcgtttctacttctagtaggtttactgccgatcagcaaacaggagcagaaaatcttagaattttgatatctgactttggtctttgcaaaaaattagactctggtcagtcttcttttagaacaaatttgaataacccttctggcacaagtggttggagggccccagagttgcttgaagaatctaacaatttgcagtgccaagtcgaaacggaacactcttctagtaggcatacagtagtttcttctgattctttttatgatccgttcaccaagaggaggttgacaagatctattgatattttttctatgggatgtgtattctattatatcttgtccaaagggaagcatccatttggagataaatattctcgtgaaagcaatatcataagaggaatattcagtcttgatgaaatgaaatgtttgcatgatagatccttaattgcagaagctacagatttgatctcccaaatgattgatcacgatccgttaaaaagacctactgctatgaaagttttgaggcatccgttgttttggccaaagagtaaaaaattggagttccttttaaaagttagtgataggcttgaaattgaaaacagagaccctccaagtgccttattaatgaaatttgacgccggttctgactttgtaatacccagtggagattggactgtcaagtttgataaaacattcatggacaaccttgaaaggtacagaaaataccattcttccaagttaatggatttattaagagcacttaggaataaatatcatcattttatggatttacctgaagatatagcagaattgatggggccggtacccgatggattttacgattacttcaccaagcgttttccaaacttattaataggtgtttatatgattgtcaaggaaaatttaagtgacgatcaaattttacgtgaatttttgtattcttga

SEQ ID NO: 4995 - DNA, 276 bp, Saccharomyces cerevisiae
atgaactatttggaaacacagttaaataaaaagcaaaaacagatacaggaatacgaaagtatgaatggcaacctgataaagatgtttgagcaattgtctaaagaaaagaaaaatgatgagacaccaaaaaaaatttcctcgacgtacattaaagagttaaaggagtacaacgaattgagagatgccggtttaaggttggcccaaataattgctgatgaaaagcaatgcaaaattaaggatgtttttgaagagatcggttattcaatgaaggactaa

SEQ ID NO: 4996 - DNA, 276 bp, Artificial Sequence
  Description of Artificial Sequence: Synthetic polynucleotide
atgaactatttggaaacacagttaaataaaaagcaaaaacagatacaggaatacgaaagtatgaatggcaacttgataaagatgtttgagcaattgtctaaagaaaagaaaaatgatgagacaccaaaaaaaatttcctctacgtacattaaagagttaaaggagtacaacgaattgagagatgccggtttaaggttggcccaaataattgctgatgaaaagcaatgcaaaattaaggatgtttttgaagagatcggttattccatgaaggactga

SEQ ID NO: 4997 - DNA, 4038 bp, Saccharomyces cerevisiae
atgactagagattcaaaaaagaagcaccattggggcactgcctttttaaggacaattggagtcaaacgtaagcacaagaaggatcgtaattttttaaataatactacaggagagaatgttagcacaacagccagtgctgagcgattcagaagagtaggaggaaatccggatattccgtctttacttaagcccgaaactttcacggaatctcctgcaaaaggatctcaaaaggcggcggcatcttccttagcgcatagccaaggtgtattcaatattccaatcgttatagatcccatggaaacaaacaggcttgaaaagacaaacacgaatttgacggcaggttcattgaagggtcgctttcaggatggtaactcgaattcaaattctgtaccaagtttatccgtccaggcattagaaaaggaaaaactgcaaagtgggaaacgagaagggtccagcaatcaagctgaggaaaaaactccagacggccatgatgaacataccgcctttgaaacgtttctttccttcgcccataatgccgtaagccacattcccaaaataaacgtacaagacgctgacaatggaacaatttccaggaatgaaccaaaggacaggaaaaaaaactcatctaatatatcaggagccctttccgaaaatagcactaacaataaaaacacttcatcgacaaaagaaagcgatggcccatttttgaaaaatttagacaatattcttgcagcatccaaatcatcaactccaagtaaccaacagcttaatacaacggaagcaggaagtaaaagtaaaccatcatcattatctagattggcatttggaaatttgaaaggccatattcactcgaactcacattcaagctctaatgctatctcaggagatgatacatcattagatgacactagaaagatgacggatgatatggccaggaaagtggttttcgaacccatcaggcactctcatgataagcctacccccggagttggaaacttaaaattagagcacttcgatgattctcaagctactcttgaagggttagaggcaatgtcagcagaatcgctgccagaggcggatcaccttgacagcagaggcccggtacaacaaagtaatttggaaagaaaaactgttccttccaaatggtcagtagtcagttcctctacaacagatggagtcaagcctagaagaagagccaaatcaatgattagcgcaatggcagataaacaaaacaccagtagcgacgttttacaagattgtaaaaaaagattgtccttcaactcctctaatggcctaacgaataacgacccggagtatgaagaccgcgaacctagggaaatgtccaagaagtttcttaacaggaggtcattttcccccggaagcattagcatgggaatgaaagtactaccttcgacggcactgaaatattcgctaaacaaagtaaaaaacagcactgatattgcatcgaccatcataccgagacctagtatgtccaacggtcgtccatcttcgggattgaggagaagttctagtaaaagcttttcatctacccccgtaaatatcattgagccatcggaggaaaatggtagacaatccagcattagaataaagggagtcgaatacgcgagcgaaaagaaagatgcagaattccatgcaatattcaaggactctggtgtcagccccaatgaaaggttgattttagaccatagttgtgctttgtcaagagatatccttttgcaaggcagaatgtatatttctgatcaacatattggattttattcgaacatccttggttgggtaagtaccgtttttataccgttcaagacaatcgttcaaatagagaaaagggccacagcaggaatattccctaatgggatcgttatagacactttacacacaaaatacacgtttgcctctttcacttcaagagatgctacatatgatttaattactgaagtatggaatcaaataattttgggaaagaggtttcgtagcaacagtaataacactaatagcagctccaattctatcagtgatgatgaaaatgacgattacgatgatgattacgatgattatggagatgatgatgacgatctttacgataatagcaataacatatctgattctaccgacatgacatcaagcgtcagcataggaaagccggaagatttacccatgcctctacaaacagacaccccttatggaacaggaattccaccactaggtccaaaaattcactcacccacagaaacagtatacaaaccagcgcccaatgaaaaattagttaacgaatcaacaatacacgcttcgttagggcgggttgtcaatatattattcgggaaagatgtcagttatattatggccattttaaaagcgcaaaagaatagtgatatttcgccaatccctgttctcgttgattcacccacggtttctgaaggtaaaaagagagattattcctacgtaaaaacaacaccaggtgccattggacccggtaaaactaaatgcatgataactgaaaccattcaacactttaacttagaggagtatgttcaagtcttgcaaacaacaaaaactccggatgttccttctggaaattcattttatgtgagaacagtttatcttttatcatgggcaaacaacaatgaaacaaaactaaaactgtatgtctctgttgaatggacaggtaaaagcttgatcaaaagtcctattgaaaagggtacatttgatggtgtaacggatgcaacaaagatattggtggaggagcttggtaatattttaacaagatctgctaccaaaaggaaaaggtcttcgaaggagaacactgttacagtatcaactttaccgaaaatggaacctagctcacatgcacctaccgagcctgatattcaaaaggataaggatgactctattataagggaaaatgagaatataccagctccattagggaccgtggtccaattgctatttggatcgaatacagagtatatgcagaaagttatcactagagataagaataatgtcaatgtggaaacgataccaaaattcacgccttcgttggttgaaggaggttcaagacactatgagtacacgaagaaattgaacaattctatcggacctaagcaaacaaaatgtttactaaccgagtctattgaacacatggatatcaataactatgttttggtgacacaaacaactaaaactccagacgtcccctctggtagcaattttgcagtagaaagtaaaatctttctattctgggggcagcatgacaccacgaatatgaccgttataacaaaaatcaactggacaagtaaatcatttttgaaaggtgcaattgagaaaggatctgttgagggtcagaaggtttctgtcgattacatgctatccgagttaagagacattattagcagggcaaaaagcaaaaaaccggtgaagaaagtaatgaagagtcatgataaacataggcctttccatagtaaggttgaacagaaaagttccgaaagccgtaagagcgatgataataaagacattttaactcatattttggatttcgttcagaataattttagttcagaaatttttatgaacaaattgctgagtcctcaaaaactattcttgatcttggggttgaccattatgcttttctggtctcctcggcttcacgtgtttcaagaaaaaaataatcttcaaatcatcaagccaggaaggctgctgattgatggtcaagaatataattacgtgcccagtttcggcacactgtataactcatatgaaaacgccatatcatctaagaagaagagagaaaatgtaaattacgcaagggataagagtcctattgtaggaagggaaagcgatatttgggattggatcagtaacagagggagtgcaatatcacctcgaggtcgtgctatgttgagaaacgatgacgaacacaaattgcagcaattatcagaaagtatcaaaataacagaaatgcaactaaatcatatgaaaactatgttggacaacattgagagggacgcaaatgatctatcttaa

SEQ ID NO: 4998 - DNA, 4038 bp, Artificial Sequence
  Description of Artificial Sequence: Synthetic polynucleotide
atgactagagattctaaaaagaagcaccattggggcactgcctttttaaggacaattggagtcaaacgtaagcacaagaaggatcgtaattttttaaataatactacaggagagaatgttagcacaacagccagtgctgagagattcagaagagtaggaggaaatccggatattccgtctttacttaagcccgaaactttcacggaatctcctgcaaaaggatctcaaaaggcggcggcatcttccttagcgcatagccaaggtgtattcaatattccaatcgttatagatcccatggaaacaaacaggcttgaaaagacaaacacgaatttgacggcaggttctttgaagggtcgctttcaggatggtaacagtaatagtaattctgtaccaagtttatccgtccaggcattagaaaaggaaaaattacaaagtgggaaaagagaagggtccagcaatcaagctgaggaaaaaactccagacggccatgatgaacataccgcctttgaaacgtttctttccttcgcccataatgccgtaagccacattcccaaaataaacgtacaagacgctgacaatggaacaatttccaggaatgaaccaaaggacaggaaaaaaaactcttctaatatatctggagccctttccgaaaatagcactaacaataaaaacacttcttctacaaaagaaagcgatggcccatttttgaaaaatttagacaatattcttgcagcatccaaatcttctactccaagtaaccaacagcttaatacaacggaagcaggaagtaaaagtaaaccatcttctttatctagattggcatttggaaatttgaaaggccatattcactccaactctcattctagctctaatgctatcagtggagatgatacaagtttagatgacactagaaagatgacggatgatatggccaggaaagtggttttcgaacccatcaggcactctcatgataagcctacccccggagttggaaacttaaaattagagcacttcgatgattctcaagctactcttgaagggttagaggcaatgtctgcagaatctttaccagaggcggatcaccttgacagcagaggcccggtacaacaaagtaatttggaaagaaaaactgttccttccaaatggtctgtagtcagttcctctacaacagatggagtcaagcctagaagaagagccaaatctatgattagcgcaatggcagataaacaaaacaccagtagcgacgttttacaagattgtaaaaaaagattgtccttcaactcctctaatggcttgacgaataacgacccggagtatgaagaccgcgaacctagggaaatgtccaagaagtttcttaacaggaggtctttttcccccggaagcattagcatgggaatgaaagtattaccttctacggcattgaaatattctttgaacaaagtaaaaaacagcactgatattgcatctaccatcataccgagacctagtatgtccaacggtcgtccatcttctggattgaggagaagttctagtaaaagcttttcttctacccccgtaaatatcattgagccaagtgaggaaaatggtagacaatccagcattagaataaagggagtcgaatacgcgagcgaaaagaaagatgcagaattccatgcaatattcaaggactctggtgtcagccccaatgaaaggttgattttagaccatagttgtgctttgtccagagatatccttttgcaaggcagaatgtatatttctgatcaacatattggattttattccaacatccttggttgggtaagtaccgtttttataccgttcaagacaatcgttcaaatagagaaaagggccacagcaggaatattccctaatgggatcgttatagacactttacacacaaaatacacgtttgcctctttcacttccagagatgctacatatgatttaattactgaagtatggaatcaaataattttgggaaagaggtttcgtagcaacagtaataacactaatagcagctccaattctatcagtgatgatgaaaatgacgattacgatgatgattacgatgattatggagatgatgatgacgatctttacgataatagcaataacatatctgattctaccgacatgacatctagcgtcagcataggaaagccggaagatttacccatgcctttacaaacagacaccccttatggaacaggaattccaccattgggtccaaaaattcactcccccacagaaacagtatacaaaccagcgcccaatgaaaaattagttaacgaatctacaatacacgcttctttagggagagttgtcaatatattattcgggaaagatgtcagttatattatggccattttaaaagcgcaaaagaatagtgatatttctccaatccctgttctcgttgattctcccacggtttctgaaggtaaaaagagagattattcctacgtaaaaacaacaccaggtgccattggacccggtaaaactaaatgcatgataactgaaaccattcaacactttaacttagaggagtatgttcaagtcttgcaaacaacaaaaactccggatgttccttctggaaattctttttatgtgagaacagtttatcttttatcttgggcaaacaacaatgaaacaaaattgaaactttatgtctctgttgaatggacaggtaaaagcttgatcaaaagtcctattgaaaagggtacatttgatggtgtaacggatgcaacaaagatattggtggaggagcttggtaatattttaacaagatctgctaccaaaaggaaaaggtcttccaaggagaacactgttacagtatccactttaccgaaaatggaacctagctctcatgcacctaccgagcctgatattcaaaaggataaggatgactctattataagggaaaatgagaatataccagctccattagggaccgtggtccaattgttatttggaagtaatacagagtatatgcagaaagttatcactagagataagaataatgtcaatgtggaaacgataccaaaattcacgccttctttggttgaaggaggttccagacactatgagtacacgaagaaattgaacaattctatcggacctaagcaaacaaaatgtttattaaccgagtctattgaacacatggatatcaataactatgttttggtgacacaaacaactaaaactccagacgtcccctctggtagcaattttgcagtagaaagtaaaatctttcttttctgggggcagcatgacaccacgaatatgaccgttataacaaaaatcaactggacaagtaaaagttttttgaaaggtgcaattgagaaaggatctgttgagggtcagaaggtttctgtcgattacatgctttccgagttaagagacattattagcagggcaaaaagcaaaaaaccggtgaagaaagtaatgaagagtcatgataaacataggcctttccatagtaaggttgaacagaaaagttccgaaagccgtaagagcgatgataataaagacattttaactcatattttggatttcgttcagaataattttagttctgaaatttttatgaacaaattgttaagtcctcaaaaattattcttgatcttggggttgaccattatgcttttctggtctcctcgtcttcacgtgtttcaagaaaaaaataatcttcaaatcatcaagccaggaaggttattgattgatggtcaagaatataattacgtgcccagtttcggcacattatataacagttatgaaaacgccatatcttctaagaagaagagagaaaatgtaaattacgcaagggataagagtcctattgtaggaagggaaagcgatatttgggattggatcagtaacagagggagtgcaatatctcctcgtggtcgtgctatgttgagaaacgatgacgaacacaaattgcagcaattatctgaaagtatcaaaataacagaaatgcaattgaatcatatgaaaactatgttggacaacattgagagggacgcaaatgatttatcttga

SEQ ID NO: 4999 - DNA, 555 bp, Saccharomyces cerevisiae
atggaagatatcgaaaagataaaaccatacgttaggagtttttcaaaggcgttagacgagctgaaaccagaaatagagaaactaacgtcgaagtcactggatgaacagctgttgctattatctgatgagagggctaaattagaactaattaatcgttacgcgtatgtattgagttctctgatgtttgctaatatgaaagtcctaggcgtcaaagatatgtctcctatactcggcgaactgaaaagagtaaaatcatacatggataaggctaaacaatacgataataggataaccaaatccaacgaaaaatcgcaggcagagcaagaaaaagctaagaatatcatttccaatgttttggacggtaataaaaaccaattcgagccctctataagcaggagcaactttcaagggaagcatacgaaatttgaaaacgatgaactggcagagagtacaacgactaagattattgacagtaccgatcatataaggaaagcaagtagtaagaaaagtaaaagattggataaagttggaaaaaagaaaggagggaagaagtag

SEQ ID NO: 5000 - DNA, 555 bp, Artificial Sequence
  Description of Artificial Sequence: Synthetic polynucleotide
atggaagatatcgaaaagataaaaccatacgttaggagtttttccaaggcgttagacgagttgaaaccagaaatagagaaattaacgtccaagtctttagatgaacagttattgttattatctgatgagagggctaaattagaattgattaatcgttacgcgtatgtattgagttctttgatgtttgctaatatgaaagtccttggcgtcaaagatatgtctcctatactcggcgaattgaaaagagtaaaatcttacatggataaggctaaacaatacgataataggataaccaaatccaacgaaaaatctcaggcagagcaagaaaaagctaagaatatcatttccaatgttttggacggtaataaaaaccaattcgagccctctataagcaggagcaactttcaagggaagcatacgaaatttgaaaacgatgaattggcagagagtacaacgactaagattattgacagtaccgatcatataaggaaagcaagtagtaagaaaagtaaaagattggataaagttggaaaaaagaaaggagggaagaagtga

SEQ ID NO: 5001 - DNA, 3090 bp, Saccharomyces cerevisiae
atgactttagattacgagatttacaaagaaggaggtattttgaataatcgatatcaaaaaatagaggatatcagtgaaggttcatatggttatgtatcattggctaaagatgttagagagaaaagattggttgcagtcaaatacattttcaaattagaagatgacggccagtacgatgggcctcaggacgacgaaaatgattgtgatagtagcgattgtgatgatgatgaagacacgaaagttgatacggatcgccatgaaaatgaaaatggtaatgcctccagtaataacgggtcaagtagagagaagaaacacaatctctacaaacacaaaaagtccctaatttcttcgaaagttaaatcaagactatctaataacatttgtctcgaagccatgtatgaagttgatattcaaacaaaaattggtagacaccaaaatattgctgctctattagatttcttcgactcttacatcatcatggaatattgctctggcggtgacctatatgaggcgatcaaagccgatgctgtgcctaagaaaaccaaatcgatcactcatattatcacacaaatcatggatgcaattgaatatgttcataacaagggcatttatcatcgtgatataaaacctgagaacattttaatttctggaattgattggacaattaagcttacagattggggattggctactacagataagacgtctatggatagaaatgtcggtagtgaaagatatatgtcccctgaactttttgatagtaatttggatatcaaggaaagaaaggaaccttatgactgtgccaaagtggatttatgggctatgggaattgtgtttcttaatattgttttccataagaatccttttagtattgccaatcaatccgacaagtcattctgttattttgctgctaatagagaagcgttgtttgatgtattttcgacaatggcttatgatttctttcaagtattaaggtatagtttaaccatcgatccggctaatagagacttgaaaatgatgagaactgaactacagaacttatctgagtatacattagacgatgaatactataataacttggatgaaggatatgaagaaactatgattgacggtttgccacctcagcctgttcctccatcttcagcaccggtatcattacctactcctatttcatctagtaacaaacaacatatgcctgaatttaaaaaggatttcaatttcaataatgtgaatgaaaggaaacggtcagatgtctctcaaaatcaaaatgttgcaagcggcttctttaaaaaaccgtctacacaacaacagaaatttttcaaccagggttataatacaacactatctactcatgaaagggctaaatctgctcctaagttcaaatttaagaagcgcaataagtacggaagaactgataatcaattttccaaaccagtcaatatcgaagatagaaagaaaagtaaaattttgaaaaaatcaaggaagcctcttggcataccaacgcctaatacacacatgaataattttttccacgattacaaagcaagggatgaattcaacaccagagattttttcactcctccaagtgtccagcacaggtatatggaggggttttccaacaacaacaataaacagtacagacagaatcgtaattacaacaataataacaacaacagcaataacaatcatggaagtaattataataattttaacaatggtaatagctatataaagggttggaacaaaaactttaacaaatacagaagaccaagttcctccagttataccggtaagtcaccactttcaaggtacaacatgagctataatcataacaacaatagttctataaatggttatgcaaggcgtggttctacgactacagttcaacattcaccaggcgcttatattccaccaaatgccaggaaccatcacgtaagcccaacgaatcagtttttaagagttccgcaatcaactgctcctgatatctctaccgttttaggtgggaagccttcataccaggaacactacactcaggatagtatggattctgagggcgatcacgattcagacgacgttttattcactcttgaagaaggtgatcatgatttcgtcaatggtatggacaacttatctataaatgatcacttaccgcatacaacggtaggtagccataatgaagtatttgttcacgcaagcactaatcacaataacaatggcaacaacaaccatatcgacaccaatagtaccactaatcaatatcatagacaatatattccacctcctttgacaacatcattgcatatcaacaataacaataatgaatctaatgaactaccagatttactaaaatcaccagcatcatctgaagcacatttaaatttatcttctggaccaattgatccaattttaacaggtaatattggcaatcgatattcacactcatctgactctaaggagctagagcaggagcgtagactcagtatggaacaaaaatttaaaaatggggtttatgttccacctcatcataggaagagtttcaacttgggaacacaggtacctcctatgaatatgaagacaagtaacgaggccacgttgtcagtttcgcataattctgttaattttggtggatcttacaattccaggcgttccagtgctaatgaatctaacccactgcatatgaataaagcactcgagaagttgtcctcttcaccaggagctaaaagctccttcgttggcttccctaaacctttattacctcgtaatcattcaagcactacgattgcgttgcaaaatgaagacgtattcgcagactctaacaatgacgccataattttcgaagacgaagaatacgaaggagaaagtgacaagatggcacatggcaaaatggaaggtggtgacaacgaatcctcgtcaacctccccggatgaaaggcaaattttcggtccttatgaaatttatgctcaaactttcgctggctccactcacgataaaaaattaggagctggcaggaagacaagtattcaggatgaaatggtcggatcgttagaacaatacaagaataattggttaattttacagcaacaagactaa

SEQ ID NO: 5002 - DNA, 3090 bp, Artificial Sequence
  Description of Artificial Sequence: Synthetic polynucleotide
atgactttagattacgagatttacaaagaaggaggtattttgaataatagatatcaaaaaatagaggatatcagtgaaggttcttatggttatgtatctttggctaaagatgttagagagaaaagattggttgcagtcaaatacattttcaaattagaagatgacggccagtacgatgggcctcaggacgacgaaaatgattgtgatagtagcgattgtgatgatgatgaagacacgaaagttgatacggatcgccatgaaaatgaaaatggtaatgcctccagtaataacgggagtagtagagagaagaaacacaatctctacaaacacaaaaagtccttgatttcttctaaagttaaatctagattatctaataacatttgtctcgaagccatgtatgaagttgatattcaaacaaaaattggtagacaccaaaatattgctgctttattagatttcttcgactcttacatcatcatggaatattgctctggcggtgacctttatgaggcgatcaaagccgatgctgtgcctaagaaaaccaaatctatcactcatattatcacacaaatcatggatgcaattgaatatgttcataacaagggcatttatcatcgtgatataaaacctgagaacattttaatttctggaattgattggacaattaagcttacagattggggattggctactacagataagacgtctatggatagaaatgtcggtagtgaaagatatatgtcccctgaactttttgatagtaatttggatatcaaggaaagaaaggaaccttatgactgtgccaaagtggatttatgggctatgggaattgtgtttcttaatattgttttccataagaatccttttagtattgccaatcaatccgacaagagtttctgttattttgctgctaatagagaagcgttgtttgatgtattttctacaatggcttatgatttctttcaagtattaaggtatagtttaaccatcgatccggctaatagagacttgaaaatgatgagaactgaattacagaacttatctgagtatacattagacgatgaatactataataacttggatgaaggatatgaagaaactatgattgacggtttgccacctcagcctgttcctccatcttctgcaccggtatctttacctactcctatttcttctagtaacaaacaacatatgcctgaatttaaaaaggatttcaatttcaataatgtgaatgaaaggaaaagaagtgatgtctctcaaaatcaaaatgttgcaagcggcttctttaaaaaaccgtctacacaacaacagaaatttttcaaccagggttataatacaacattatctactcatgaaagggctaaatctgctcctaagttcaaatttaagaagcgcaataagtacggaagaactgataatcaattttccaaaccagtcaatatcgaagatagaaagaaaagtaaaattttgaaaaaatctaggaagcctcttggcataccaacgcctaatacacacatgaataattttttccacgattacaaagcaagggatgaattcaacaccagagattttttcactcctccaagtgtccagcacaggtatatggaggggttttccaacaacaacaataaacagtacagacagaatcgtaattacaacaataataacaacaacagcaataacaatcatggaagtaattataataattttaacaatggtaatagctatataaagggttggaacaaaaactttaacaaatacagaagaccaagttcctccagttataccggtaagtctccactttctaggtacaacatgagctataatcataacaacaatagttctataaatggttatgcaaggcgtggttctacgactacagttcaacattctccaggcgcttatattccaccaaatgccaggaaccatcacgtaagcccaacgaatcagtttttaagagttccgcaatctactgctcctgatatctctaccgttttaggtgggaagccttcttaccaggaacactacactcaggatagtatggattctgagggcgatcacgattctgacgacgttttattcactcttgaagaaggtgatcatgatttcgtcaatggtatggacaacttatctataaatgatcacttaccgcatacaacggtaggtagccataatgaagtatttgttcacgcaagcactaatcacaataacaatggcaacaacaaccatatcgacaccaatagtaccactaatcaatatcatagacaatatattccacctcctttgacaacatctttgcatatcaacaataacaataatgaatctaatgaattaccagatttattgaaatctccagcatcttctgaagcacatttaaatttatcttctggaccaattgatccaattttaacaggtaatattggcaatagatattctcactcttctgactctaaggagttagagcaggagcgtagactcagtatggaacaaaaatttaaaaatggggtttatgttccacctcatcataggaagagtttcaacttgggaacacaggtacctcctatgaatatgaagacaagtaacgaggccacgttgagtgtttctcataattctgttaattttggtggatcttacaattccaggcgttccagtgctaatgaatctaacccattgcatatgaataaagcactcgagaagttgtcctcttctccaggagctaaaagctccttcgttggcttccctaaacctttattacctcgtaatcattctagcactacgattgcgttgcaaaatgaagacgtattcgcagactctaacaatgacgccataattttcgaagacgaagaatacgaaggagaaagtgacaagatggcacatggcaaaatggaaggtggtgacaacgaatcctcttccacctccccggatgaaaggcaaattttcggtccttatgaaatttatgctcaaactttcgctggctccactcacgataaaaaattaggagctggcaggaagacaagtattcaggatgaaatggtcggatctttagaacaatacaagaataattggttaattttacagcaacaagactga

SEQ ID NO: 5003 - DNA, 990 bp, Saccharomyces cerevisiae
atggtaagttcattcagtgttcccatgccagtaaaacggatatttgacacatttccgttacaaacatatgctgcgcagactgacaaggacgaggccgttgcattagaaatacagcggaggtcctacacattcacagaacgcggtggtggaagctctgagttgactgtggaggggacgtacaagctaggtgtttacaacgtttttttggaggcaaatacaggggcggcattggccacagatccatggtgtctgtttgttcagcttgcgctgtgtcaaaagaatggtctagtcttacccacgcactcgcaggaacaaaccccatcgcatacctgtaaccatgaaatgctcgttctgtcccgtctttctaaccccgatgaggccctacctattctagttgagggttacaagaagagaattataagatccaccgtggcaatcagcgaaattatgaggtctcggatacttgatgatgctgagcagttgatgtactatacgttgctggataccgtgctgtacgattgttggatcacgcaaataattttctgtgcctcagatgcgcaattcatggaattgtactcttgccagaagttaagtggttcgatagtcactccattggacgtagaaaactctttattacagaagttgtccgcaaagagtttgaagatatccctaacaaagcggaacaagttccagttccgccatcgagaaatcgtcaagagtatgcaaggagtttatcacaaccatcacaactccgttaatcaagagcaggtcttgaacgttttgttcgagaatagcaagcaagttcttttaggtttaaaagatatgttgaaaagcgacgggcaacccacttacttacatctgaaaattgcaagttacattctttgtataacgaacgttaaggaacccataaagctaaagacatttgttgaaaacgaatgtaaagaattggtccagtttgcacaagacaccctgaagaacttcgttcagtaa

SEQ ID NO: 5004 - DNA, 990 bp, Artificial Sequence
  Description of Artificial Sequence: Synthetic polynucleotide
atggtaagttctttcagtgttcccatgccagtaaaaagaatatttgacacatttccgttacaaacatatgctgcgcagactgacaaggacgaggccgttgcattagaaatacagagaaggtcctacacattcacagaacgcggtggtggaagctctgagttgactgtggaggggacgtacaagttgggtgtttacaacgtttttttggaggcaaatacaggggcggcattggccacagatccatggtgtttatttgttcagcttgcgttatgtcaaaagaatggtttggtcttacccacgcactctcaggaacaaaccccatctcatacctgtaaccatgaaatgctcgttttatcccgtctttctaaccccgatgaggccttgcctattttggttgagggttacaagaagagaattataagatccaccgtggcaatcagcgaaattatgaggtctagaatacttgatgatgctgagcagttgatgtactatacgttgttggataccgtgttatacgattgttggatcacgcaaataattttctgtgcctctgatgcgcaattcatggaattgtactcttgccagaagttaagtggttccatagtcactccattggacgtagaaaactctttattacagaagttgtccgcaaagagtttgaagatatccttaacaaagagaaacaagttccagttccgccatagagaaatcgtcaagagtatgcaaggagtttatcacaaccatcacaactccgttaatcaagagcaggtcttgaacgttttgttcgagaatagcaagcaagttcttttaggtttaaaagatatgttgaaaagcgacgggcaacccacttacttacatttgaaaattgcaagttacattctttgtataacgaacgttaaggaacccataaagttgaagacatttgttgaaaacgaatgtaaagaattggtccagtttgcacaagacaccttgaagaacttcgttcagtga

SEQ ID NO: 5005 - DNA, 2067 bp, Saccharomyces cerevisiae
atgaaagtccaaataaccaatagtagaacagaggaaatcttaaaagttcaagctaataatgaaaacgatgaagtcagtaaagctactccgggcgaagttgaagaatcgctaaggttaatcggcgatctaaaattctttttagccacagcgccggtaaattggcaagaaaaccaaattataaggcgatactatctgaatagtggacaaggctttgtctcttgtgtattttggaacaatctatactatattacaggtactgatattgtcaaatgttgtctttacagaatgcaaaagtttgggagagaagtagttcaaaagaaaaaatttgaagagggtattttttcagatttaagaaatctcaaatgtggtatagatgcaactttagaacaaccaaagtccgaatttttgtcgtttctattcagaaatatgtgtctgaaaacccaaaaaaagcagaaagtatttttttggttcagtgtagcacatgataagttgtttgcggatgcgttggaaagagatttaaaaagagaaagtttgaatcagccttcaacgactaagcccgttaatgagcccgccttatctttttcatatgattcctcatctgataagcctctctacgatcagttacttcaacatttagattctagaagaccatctagtacaacaaaatcagataattcgcctccaaaattagaaagcgagaattttaaggataatgagttggtaacagtaactaatcagccgcttttaggcgttggcctcatggatgacgatgcgccagaatccccctctcaaattaatgattttattcctcagaaattgattatagaacccaatactctcgaattgaatggtctcacagaagaaacgcctcatgacttacccaagaataccgctaagggcagagacgaagaagattttcctctcgactattttcctgtatctgttgaataccctacggaggaaaatgcgtttgatccgttccctccacaggcttttacgccagctgccccttccatgcctatttcctatgataacgtgaatgaaagggattctatgcccgttaattctcttcttaatagatacccctatcagttatcagtggcacccactttcccagtgccaccatcatcatcgaggcaacattttatgacaaatcgggatttttattcatctaacaataacaaggaaaaattggtatctcctagcgaccctaccagctacatgaagtatgacgaaccagttatggattttgatgaatctcggccaaatgaaaactgtacaaatgcaaaatctcacaactctggccagcaaactaaacaacaccaattatattctaacaacttccagcaatcttacccaaacggaatggttccaggatactacccaaaaatgccgtataatcccatggggggggatcctctactcgatcaagccttttatggcgcggacgattttttctttccaccagaaggatgtgataacaatatgctgtatccacaaactgcaacttcatggaatgttttgccccctcaagctatgcaaccagctccaacctatgttgggagaccatacacaccgaattatagatcgacaccaggttccgcgatgttcccatacatgcaaagttcaaattccatgcagtggaacactgctgtttcaccttatagttcgagagcaccatctacaactgctaaaaactatcctcctagcacattttattctcaaaatataaatcaatacccacggcgaagaactgtgggaatgaagtcttcacaaggaaatgttccaacaggtaataaacaatctgtgggcaagtctgcaaaaatttcaaagcctctacatattaagacaagtgcttatcagaagcaatacaaaatcaacttggaaacgaaagccaggccaagtgctggtgacgaagattctgctcatcctgataagaacaaagaaatttcgatgcctactccggattccaatactttggtggtccagtcagaagaaggtggagctcattcacttgaggtagataccaatcgaaggtccgataaaaaccttccagatgcaacctga

SEQ ID NO: 5006 - DNA, 2067 bp, Artificial Sequence
  Description of Artificial Sequence: Synthetic polynucleotide
atgaaagtccaaataaccaatagtagaacagaggaaatcttaaaagttcaagctaataatgaaaacgatgaagtcagtaaagctactccgggcgaagttgaagaatctttgaggttaatcggcgatttgaaattctttttagccacagcgccggtaaattggcaagaaaaccaaattataaggcgttactatttgaatagtggacaaggctttgtctcttgtgtattttggaacaatctttactatattacaggtactgatattgtcaaatgttgtctttacagaatgcaaaagtttgggagagaagtagttcaaaagaaaaaatttgaagagggtattttttctgatttaagaaatctcaaatgtggtatagatgcaactttagaacaaccaaagtccgaatttttgagttttcttttcagaaatatgtgtttgaaaacccaaaaaaagcagaaagtatttttttggttcagtgtagcacatgataagttgtttgcggatgcgttggaaagagatttaaaaagagaaagtttgaatcagccttctacgactaagcccgttaatgagcccgccttatctttttcttatgattcctcttctgataagcctctctacgatcagttacttcaacatttagattctagaagaccatctagtacaacaaaatctgataattctcctccaaaattagaaagcgagaattttaaggataatgagttggtaacagtaactaatcagccgcttttaggcgttggcctcatggatgacgatgcgccagaatccccctctcaaattaatgattttattcctcagaaattgattatagaacccaatactctcgaattgaatggtctcacagaagaaacgcctcatgacttacccaagaataccgctaagggcagagacgaagaagattttcctctcgactattttcctgtatctgttgaataccctacggaggaaaatgcgtttgatccgttccctccacaggcttttacgccagctgccccttccatgcctatttcctatgataacgtgaatgaaagggattctatgcccgttaattctcttcttaatagatacccctatcagttatctgtggcacccactttcccagtgccaccatcttcttccaggcaacattttatgacaaatagagatttttattcttctaacaataacaaggaaaaattggtatctcctagcgaccctaccagctacatgaagtatgacgaaccagttatggattttgatgaatctagaccaaatgaaaactgtacaaatgcaaaatctcacaactctggccagcaaactaaacaacaccaattatattctaacaacttccagcaatcttacccaaacggaatggttccaggatactacccaaaaatgccgtataatcccatggggggggatcctttactcgatcaagccttttatggcgcggacgattttttctttccaccagaaggatgtgataacaatatgctttatccacaaactgcaacttcttggaatgttttgccccctcaagctatgcaaccagctccaacctatgttgggagaccatacacaccgaattatagatctacaccaggttccgcgatgttcccatacatgcaaagtagtaattccatgcagtggaacactgctgtttctccttatagtagtagagcaccatctacaactgctaaaaactatcctcctagcacattttattctcaaaatataaatcaatacccaagaagaagaactgtgggaatgaagtcttctcaaggaaatgttccaacaggtaataaacaatctgtgggcaagtctgcaaaaatttccaagcctttgcatattaagacaagtgcttatcagaagcaatacaaaatcaacttggaaacgaaagccaggccaagtgctggtgacgaagattctgctcatcctgataagaacaaagaaatttccatgcctactccggattccaatactttggtggtccagtctgaagaaggtggagctcattctcttgaggtagataccaatagaaggtccgataaaaaccttccagatgcaacctga

SEQ ID NO: 5007 - DNA, 1005 bp, Saccharomyces cerevisiae
atgacaaaatcaagaaagcagaagcaaaaaaagcaggattttttgagaaaaaagttaaaagttggtaagccaaaggaaaaagcaaggaatgctaccgatacatctttcgtttccaagactatttctattagaaatcaacatttagaccaaaatccacatgatttaacaaaacggctaacgctcttaaagcatcataacatcaatgtgagaaaggaaacattaacaacattccaaaagtcaataccgtctataataaaatctcgacttatgacaccattacttactcaaagtataccgttgatttgcgatgaatcgcagcaagtacgtcagggacttattgatctcgtagatgaaataggtagtcacgatgcggagattttaaaattgcactgcaacatttttgtcttatacattaacatggcaatgacacatattgttacacaaattcaagcagattctactaaatttctctctcatctgttgaagtattgcggagatgaagtggttaggaaatcttgggtaaaacttttgaacggtgtctttggagtgctcggttggggacaggtagggaaaaatgatagcgctagcatagtgcaaacgaagaagcgaaacgccaaatatgtcactattcatctcaatgctctgtacactcttgttgaatacggatgtcaggatgaacgcgctagaagcgacggagacacggcagagactacagaggacagcggtacgctacgaaacccatatttaatcccagattatccgcagccgtttgagcacttgaaactatttaccagagaattgaaagttcaggatgctacctccagtggagtaaatgccacactactgtcattggcaacacaggatatcgatactcgaaaagcggtatttatcgaacaattcctgcctatagtacgtaagaaaatcgaagtaattatcaaggaaggtggtgaatgtggtaaaagtgcaaacaagcttaaaacgctgcttgcaaaaatctttgattga

SEQ ID NO: 5008 - DNA, 1005 bp, Artificial Sequence
  Description of Artificial Sequence: Synthetic polynucleotide
atgacaaaatctagaaagcagaagcaaaaaaagcaggattttttgagaaaaaagttaaaagttggtaagccaaaggaaaaagcaaggaatgctaccgatacatctttcgtttccaagactatttctattagaaatcaacatttagaccaaaatccacatgatttaacaaaaagattgacgctcttaaagcatcataacatcaatgtgagaaaggaaacattaacaacattccaaaagagtataccgtctataataaaatctaggcttatgacaccattacttactcaaagtataccgttgatttgcgatgaatctcagcaagtacgtcagggacttattgatctcgtagatgaaataggtagtcacgatgcggagattttaaaattgcactgcaacatttttgtcttatacattaacatggcaatgacacatattgttacacaaattcaagcagattctactaaatttctctctcatcttttgaagtattgcggagatgaagtggttaggaaatcttgggtaaaacttttgaacggtgtctttggagtgctcggttggggacaggtagggaaaaatgatagcgctagcatagtgcaaacgaagaagagaaacgccaaatatgtcactattcatctcaatgctttgtacactcttgttgaatacggatgtcaggatgaacgcgctagaagcgacggagacacggcagagactacagaggacagcggtacgcttagaaacccatatttaatcccagattatccgcagccgtttgagcacttgaaattatttaccagagaattgaaagttcaggatgctacctccagtggagtaaatgccacattattatctttggcaacacaggatatcgatactagaaaagcggtatttatcgaacaattcttacctatagtacgtaagaaaatcgaagtaattatcaaggaaggtggtgaatgtggtaaaagtgcaaacaagcttaaaacgttacttgcaaaaatctttgattga

SEQ ID NO: 5009 - DNA, 1572 bp, Saccharomyces cerevisiae
atgtcctataaacaaacaacatattatcctagcaggggtaatctggtaagaaacgactcatctccgtacactaatactatttcctcagaaaccaacaatagcagtacaagcgtattgagtcttcaaggcgcatctaacgtgagtttagggaccactggtaaccaattgtacatgggcgacttggatcctacatgggataagaataccgttaggcaaatttgggcatctctgggagaagcgaatattaatgtccggatgatgtggaataatacgcttaataatgggtcgagatcatcaatgggtccaaagaataatcaaggatattgctttgttgattttccctcatctactcatgcagcaaatgcacttttaaagaatggtatgcttatacccaattttccaaataaaaaattgaaattaaactgggctacatcctcatattcaaacagcaacaattctcttaacaacgtgaagagtggtaacaactgttctatatttgttggagacttagcaccaaatgttacagagtctcaattatttgaacttttcattaacagatatgcttctacttctcatgccaaaattgtgcacgaccaggttaccgggatgtctaagggctacggttttgtaaagtttaccaattctgatgaacaacagttagctctgtcagaaatgcaaggcgtatttttaaatggtagagccataaaagtaggacccacatctggtcagcagcagcatgtcagcggtaacaacgattacaaccgtagttcttcgtcactaaacaacgaaaatgtagactcgagatttctttccaagggtcaatcatttttaagcaatggaaataataacatgggctttaagagaaaccatatgtctcaattcatttatccagtccaacagcagccgtctttaaaccacttcactgatccgaataacaccactgtgtttatcggaggattgtcatcactggtgactgaagacgaattacgtgcttatttccaaccttttggcacgatagtctatgtcaaaattccggtaggcaaatgttgcgggtttgtccagtatgttgatcggctatcggctgaggctgccattgctgggatgcaagggttccccattgcaaattcaagagttagactgtcttggggcaggtctgctaagcaaacagcgttgcttcagcaagccatgttaagtaactctttacaggttcaacaacagcaaccaggtttacagcaacctaactacggatacattccatccagtacgtgtgaagcacctgttctgccagataataatgtttcatccacgatgcttcctggatgtcaaattctgaattattctaatccatacgctaatgcgaatggattaggctcgaacaatttcagtttctacagtaataataatgctacaaatacgcaagctactagtttactggctgacactagctctatggacctctcaggcacgggtggccaacaagttatcatgcaaggaagcgaagcggttgttaacagcactaatgcaatgttaaaccgtttggaacaaggcagtaatggttttatgtttgcttga

SEQ ID NO: 5010 - DNA, 1572 bp, Artificial Sequence
  Description of Artificial Sequence: Synthetic polynucleotide
atgtcctataaacaaacaacatattatcctagcaggggtaatttggtaagaaacgactcttctccgtacactaatactatttccagtgaaaccaacaatagcagtacaagcgtattgagtcttcaaggcgcatctaacgtgagtttagggaccactggtaaccaattgtacatgggcgacttggatcctacatgggataagaataccgttaggcaaatttgggcatctttgggagaagcgaatattaatgtcagaatgatgtggaataatacgcttaataatgggtccagaagttctatgggtccaaagaataatcaaggatattgctttgttgattttccctcttctactcatgcagcaaatgcacttttaaagaatggtatgcttatacccaattttccaaataaaaaattgaaattaaactgggctacatccagctattccaacagcaacaattctcttaacaacgtgaagagtggtaacaactgttctatatttgttggagacttagcaccaaatgttacagagtctcaattatttgaacttttcattaacagatatgcttctacttctcatgccaaaattgtgcacgaccaggttaccgggatgtctaagggctacggttttgtaaagtttaccaattctgatgaacaacagttagctttatctgaaatgcaaggcgtatttttaaatggtagagccataaaagtaggacccacatctggtcagcagcagcatgtcagcggtaacaacgattacaaccgtagttcttcttctttgaacaacgaaaatgtagacagtagatttctttccaagggtcaaagttttttaagcaatggaaataataacatgggctttaagagaaaccatatgtctcaattcatttatccagtccaacagcagccgtctttaaaccacttcactgatccgaataacaccactgtgtttatcggaggattgagttctttggtgactgaagacgaattacgtgcttatttccaaccttttggcacgatagtctatgtcaaaattccggtaggcaaatgttgcgggtttgtccagtatgttgatagattatctgctgaggctgccattgctgggatgcaagggttccccattgcaaattctagagttagattatcttggggcaggtctgctaagcaaacagcgttgcttcagcaagccatgttaagtaactctttacaggttcaacaacagcaaccaggtttacagcaacctaactacggatacattccatccagtacgtgtgaagcacctgttttgccagataataatgtttcttccacgatgcttcctggatgtcaaattttgaattattctaatccatacgctaatgcgaatggattaggctctaacaatttcagtttctacagtaataataatgctacaaatacgcaagctactagtttattagctgacactagctctatggacctcagcggcacgggtggccaacaagttatcatgcaaggaagcgaagcggttgttaacagcactaatgcaatgttaaaccgtttggaacaaggcagtaatggttttatgtttgcttga

SEQ ID NO: 5011 - DNA, 162 bp, Saccharomyces cerevisiae
atgcgtttgtctctctattcatgttgtctctgtataggggcacggcgaattcctactccgtgtctcttctcctatatctttacaccaaatttggcccattttcattcccctttacgtagtagcggttttcggcctgccggtgctacgcgtttctatagctag

SEQ ID NO: 5012 - DNA, 162 bp, Artificial Sequence
  Description of Artificial Sequence: Synthetic polynucleotide
atgcgtttgtctctctattcttgttgtctctgtataggggcacgtagaattcctactccgtgtctcttctcctatatctttacaccaaatttggcccattttcattcccctttacgtagtagcggttttagacctgccggtgctacgcgtttctatagctga

SEQ ID NO: 5013 - DNA, 336 bp, Saccharomyces cerevisiae
atgtctactgtaaccaaatacttttacaagggtgaaaatacagatttgattgtcttcgctgcatccgaagagcttgtagacgaatatttgaaaaatccatcaattggtaagctatctgaagttgtcgaactcttcgaagttttcactcctcaggacggtaggggtgccgagggtgagttgggcgctgcctccaaggcccaagtggaaaatgagttcggtaagggcaagaagatcgaagaagttatcgatttgatattgagaaatggtaagccaaactctaccacctctagtctcaaaaccaaagggggtaacgccggaaccaaagcctacaattga

SEQ ID NO: 5014 - DNA, 336 bp, Artificial Sequence
  Description of Artificial Sequence: Synthetic polynucleotide
atgtctactgtaaccaaatacttttacaagggtgaaaatacagatttgattgtcttcgctgcatccgaagagcttgtagacgaatatttgaaaaatccatctattggtaagttatctgaagttgtcgaactcttcgaagttttcactcctcaggacggtaggggtgccgagggtgagttgggcgctgcctccaaggcccaagtggaaaatgagttcggtaagggcaagaagatcgaagaagttatcgatttgatattgagaaatggtaagccaaactctaccacctctagtctcaaaaccaaagggggtaacgccggaaccaaagcctacaattga

SEQ ID NO: 5015 - DNA, 888 bp, Saccharomyces cerevisiae
atggctctcggtaatgagataaacatcacaaacaagctaaagaggcaagaaatttttgctgatataaaacatgaaaaaaataaagagcgccataccatgagaagaaagagagctaaggaagagagagagaatccggagctgcgggagcagagattaaaagagaacgtaacacagacgatagagaacactagagtgtacgatgagaccattaacaaggaagtggagggagatgaagacgatttgatgagatacttcaacagcaattctaatgagccaccaaagatctttctgaccacaaatgtaaacgctaagaagagcgcttatgaatttgctaacattttaatcgaaattttaccaaacgtcacatttgtgaaaagaaaatttggctacaaattgaaggaaatatctgatatttgtataaaaaggaatttcactgacatcgtgataatcaacgaggacaagaaaaaggttactggcctaacattcatacatctgccagagggcccaactttttattttaaattatcatcatttgttgaagtgaagaaaattgtcggtcatggtagaccaactagccatattccagaattgattctaaataatttccagaccagattgggtcaaacagtaggtaggttgtttcagtccattttacctcagaatcctgatattgaaggtcgacaagttatcaccctacataatcaaagagattacattttcttcagaaggcatcggtatgtcttcaaagataatgaaagggttggtttgcaagaactgggtccacaatttaccctcaagttgaaaagattgcaaaggggtattaaggaagaaactgaatgggagcataaacctgagatggacaaagaaaagaaaaagttttatttatag

SEQ ID NO: 5016 - DNA, 888 bp, Artificial Sequence
  Description of Artificial Sequence: Synthetic polynucleotide
atggctctcggtaatgagataaacatcacaaacaagttgaagaggcaagaaatttttgctgatataaaacatgaaaaaaataaagagcgccataccatgagaagaaagagagctaaggaagagagagagaatccggagttaagagagcagagattaaaagagaacgtaacacagacgatagagaacactagagtgtacgatgagaccattaacaaggaagtggagggagatgaagacgatttgatgagatacttcaacagcaattctaatgagccaccaaagatctttttaaccacaaatgtaaacgctaagaagagcgcttatgaatttgctaacattttaatcgaaattttaccaaacgtcacatttgtgaaaagaaaatttggctacaaattgaaggaaatatctgatatttgtataaaaaggaatttcactgacatcgtgataatcaacgaggacaagaaaaaggttactggcttaacattcatacatttaccagagggcccaactttttattttaaattatcttcttttgttgaagtgaagaaaattgtcggtcatggtagaccaactagccatattccagaattgattttgaataatttccagaccagattgggtcaaacagtaggtaggttgtttcagtccattttacctcagaatcctgatattgaaggtagacaagttatcaccttacataatcaaagagattacattttcttcagaaggcatcgttatgtcttcaaagataatgaaagggttggtttgcaagaattgggtccacaatttaccctcaagttgaaaagattgcaaaggggtattaaggaagaaactgaatgggagcataaacctgagatggacaaagaaaagaaaaagttttatttatga

SEQ ID NO: 5017 - DNA, 618 bp, Saccharomyces cerevisiae
atgagtttcagaggaggtaatagaggtggccgtggcggcttccgtggcggctttcgtggtggacgtacaggcagtgctagatcatttcaacaaggaccaccagacactgttctagaaatgggagcttttctacatccatgtgagggtgatattgtttgccgttctatcaacactaagattccatatttcaatgcgccaatatatttggaaaacaagactcaagtcggtaaagttgacgaaatattgggtccattaaacgaagtatttttcactatcaagtgtggtgacggtgtccaagcaaccagttttaaagaaggtgataaattctacattgccgctgacaaactattgcctattgaaagatttttacctaagcctaaggtggtaggcccaccaaaaccaaaaaacaagaagaagagaagtggtgccccaggtggccgtggtggtgcttcaatgggtcgcggtggtagcagaggaggtttcagaggaggccgtggtggtagttctttcagaggaggccgtggtggcagttctttcagaggtggatctcgtggcggatcatttagaggaggatctcgtggcggatctcgtggtggtttcagaggaggtagaagataa

SEQ ID NO: 5018 - DNA, 618 bp, Artificial Sequence
  Description of Artificial Sequence: Synthetic polynucleotide
atgagtttcagaggaggtaatagaggtggccgtggcggcttccgtggcggctttcgtggtggacgtacaggcagtgctagatcttttcaacaaggaccaccagacactgttttggaaatgggagcttttttacatccatgtgagggtgatattgtttgccgttctatcaacactaagattccatatttcaatgcgccaatatatttggaaaacaagactcaagtcggtaaagttgacgaaatattgggtccattaaacgaagtatttttcactatcaagtgtggtgacggtgtccaagcaaccagttttaaagaaggtgataaattctacattgccgctgacaaacttttgcctattgaaagatttttacctaagcctaaggtggtaggcccaccaaaaccaaaaaacaagaagaagagaagtggtgccccaggtggccgtggtggtgcttccatgggtcgcggtggtagcagaggaggtttcagaggaggccgtggtggtagttctttcagaggaggccgtggtggcagttctttcagaggtggatctcgtggcggaagttttagaggaggatctcgtggcggatctcgtggtggtttcagaggaggtagaagatga

SEQ ID NO: 5019 - DNA, 849 bp, Saccharomyces cerevisiae
atggatccaagtttagttttagagcaaacgatacaagatgtgtccaacctcccatcagaatttcgttacctcttagaggagatcggttcaaatgatttgaagctcatcgaagaaaaaaagaaatacgagcaaaaagaatcacaaatacacaaatttataagacagcaaggctcaataccgaaacatccacaggaagatgggcttgacaaagaaataaaagaatcacttttgaaatgtcagtctttgcaaagagaaaaatgcgttctggcgaacactgccttgtttctaattgctagacacttgaataagttggaaaaaaacatcgctttattggaggaagatggtgttctagcccccgtggaagaagatggagacatggatagcgctgctgaagcctctagagaaagttcagttgtgagtaacagtagcgtgaaaaagagaagagctgcatcaagctcaggatccgttccacccactttgaaaaagaaaaaaactagtcgaacatctaaactgcaaaatgaaattgacgtttcttcaagagaaaagtctgttactccagtgagcccaagcattgaaaagaagattgcaagaacaaaagaattcaaaaacagtagaaatggtaaaggccaaaacggttcccctgaaaacgaggaagaggacaaaactttatactgcttctgtcaaagagtttcgtttggagaaatggttgcatgtgatggacccaactgtaaatatgaatggtttcattatgattgtgtaaatttaaaagaacctccgaaaggaacatggtactgtcccgaatgtaaaattgagatggaaaaaaacaaactgaaaagaaaacgtaactga

SEQ ID NO: 5020 - DNA, 849 bp, Artificial Sequence
  Description of Artificial Sequence: Synthetic polynucleotide
atggatccaagtttagttttagagcaaacgatacaagatgtgtccaacctcccatctgaatttcgttacctcttagaggagatcggtagtaatgatttgaagctcatcgaagaaaaaaagaaatacgagcaaaaagaatctcaaatacacaaatttataagacagcaaggctctataccgaaacatccacaggaagatgggcttgacaaagaaataaaagaatctcttttgaaatgtcagtctttgcaaagagaaaaatgcgttttggcgaacactgccttgtttttgattgctagacacttgaataagttggaaaaaaacatcgctttattggaggaagatggtgttttggcccccgtggaagaagatggagacatggatagcgctgctgaagcctctagagaaagttctgttgtgagtaacagtagcgtgaaaaagagaagagctgcaagtagcagtggatccgttccacccactttgaaaaagaaaaaaactagtaggacatctaaattacaaaatgaaattgacgtttcttctagagaaaagtctgttactccagtgagcccaagcattgaaaagaagattgcaagaacaaaagaattcaaaaacagtagaaatggtaaaggccaaaacggttcccctgaaaacgaggaagaggacaaaactttatactgcttctgtcaaagagtttcttttggagaaatggttgcatgtgatggacccaactgtaaatatgaatggtttcattatgattgtgtaaatttaaaagaacctccgaaaggaacatggtactgtcccgaatgtaaaattgagatggaaaaaaacaaattgaaaagaaaacgtaactga

SEQ ID NO: 5021 - DNA, 1932 bp, Saccharomyces cerevisiae
atgttcgggatagtttatctgaagaatcgcagtttactctgcaagaaccccttttcttcttaccctcgttatggcttcatgccctcgttcgacacccagttcagcaaccaatttcgtaaattagaaattaatattggacggaaaagatacagctcaaaaaccttgaatacaaaatatactgaccaacccgaaggcccaatttatcctttggatgtactacgcctagacatctcaaaagcactgcatgatatatccggaatagaccactcgctaatactaaatgcgcttgagtcgacaaatagtatggatagaggtgatctactgctacctcttccaaagataaaagtggctgaccctgtggccgttgccaaccgatgggccattgaactaagcacgcatgggtgtattggaaaggtttgtgcaaaagggccatttcttcagttcttcctggaccagcggtatttgatacaatcaacggtaccaaatatattacttcaaaaggggaaatatggtcagaaaaaatctcgtcatcagaaaaaagttgtagtagaattttcatcaccaaatattgccaaaccattccatgcaggccatttaagatcgactataataggtggattcctttcaaacttatatgaagcaatggggtggtccgttacacgtatgaactacctaggagactggggcagacagtttggtttgttagcagtcggttttaagagatacggcgatgaaaagacgttacaaaagcagccaattcagcatttattcgacgtctacgttaaaatcaacatggaccttgccaaggaagagataaacggaaactctaagtgtgggattagcggtgaggcccgtagttttttcaaaaacttagaaaatggggatgagaatgccattaagatatggaataggtttcgctcgttatccatccaccactatatccaaacttattcacgtttgaacattaattttgatatattctccggtgaatcacaagtgtctaaagaatctatgaatgaagccttagatatatttcgcaaaaacaatcttgttaaagaaatagacggtgcccttgtcatcgatttaacccaatggtcgaaaagattgggcagagttgttgtacaaaaatcagacggaacaactttgtacttgacaagagatgtaggggcagccatagagcgtaaaaagaatctacattttgataaaatggtgtacgtgatttcctcacagcaagatttatacatgtcccagttttttatgatattaaaaaaaatgaattttgaatgggcaaaagacttgcagcatataaattttggtatggtgcagggcatgtcgaccagaaaaggaaatgtggtattcttagataccatactagacgaggcaagggataaagctctgcaaattatggaaaataacaaaatgaaaatatctcaggtagataatccacagcgtgttgcagatttaattggcgtatctgctatcattattcaagatatgaaatcaaagcgtatcaataactatgaattcaactggaacagaatgttgtctttcgaaggtgacacagggccctatttacaatacacacattccagacttagatctttagaaaggacctccagcgactttacgacggacatgctaatacacgcagatttttcaaatttaaatgaaccacaactagttgagcttgtgaggttgctagcgcagtatccagatgtccttagacgagcattcgaaactcaagagccggccacgattgtaacatatttattcaaagtttgccatcaggtctcctcgtgctataaaaaaatatgggtttccggaaaacctgcagatattgccataccgcgactcgccgtatattcagcaagtagacaagtgttacacaatgcaatgtcgcttttgggactagtcccggttgatagaatgtaa

SEQ ID NO: 5022 - DNA, 1932 bp, Artificial Sequence
  Description of Artificial Sequence: Synthetic polynucleotide
atgttcgggatagtttatttgaagaatcgcagtttactctgcaagaaccccttttcttcttaccctcgttatggcttcatgccctctttcgacacccagttcagcaaccaatttcgtaaattagaaattaatattggaagaaaaagatacagcagtaaaaccttgaatacaaaatatactgaccaacccgaaggcccaatttatcctttggatgtattgcgcttggacatctccaaagcattgcatgatatatccggaatagaccactctttgatattgaatgcgcttgagtctacaaatagtatggatagaggtgatttattattgcctcttccaaagataaaagtggctgaccctgtggccgttgccaacagatgggccattgaattgagcacgcatgggtgtattggaaaggtttgtgcaaaagggccatttcttcagttcttcttggaccagagatatttgatacaatctacggtaccaaatatattacttcaaaaggggaaatatggtcagaaaaaatctcgtcatcagaaaaaagttgtagtagaattttcttctccaaatattgccaaaccattccatgcaggccatttaagatctactataataggtggattcctttccaacttatatgaagcaatggggtggtccgttacacgtatgaactacttgggagactggggcagacagtttggtttgttagcagtcggttttaagagatacggcgatgaaaagacgttacaaaagcagccaattcagcatttattcgacgtctacgttaaaatcaacatggaccttgccaaggaagagataaacggaaactctaagtgtgggattagcggtgaggcccgtagttttttcaaaaacttagaaaatggggatgagaatgccattaagatatggaataggtttcgctctttatccatccaccactatatccaaacttattctcgtttgaacattaattttgatatattctccggtgaatctcaagtgtctaaagaatctatgaatgaagccttagatatatttcgcaaaaacaatcttgttaaagaaatagacggtgcccttgtcatcgatttaacccaatggtccaaaagattgggcagagttgttgtacaaaaaagtgacggaacaactttgtacttgacaagagatgtaggggcagccatagagcgtaaaaagaatttacattttgataaaatggtgtacgtgatttcctctcagcaagatttatacatgtcccagttttttatgatattaaaaaaaatgaattttgaatgggcaaaagacttgcagcatataaattttggtatggtgcagggcatgtctaccagaaaaggaaatgtggtattcttagataccatattggacgaggcaagggataaagctttacaaattatggaaaataacaaaatgaaaatatctcaggtagataatccacagcgtgttgcagatttaattggcgtatctgctatcattattcaagatatgaaatccaagcgtatcaataactatgaattcaactggaacagaatgttgtctttcgaaggtgacacagggccctatttacaatacacacattccagacttagatctttagaaaggacctccagcgactttacgacggacatgttgatacacgcagatttttctaatttaaatgaaccacaattggttgagcttgtgaggttgttagcgcagtatccagatgtccttagaagagcattcgaaactcaagagccggccacgattgtaacatatttattcaaagtttgccatcaggtctccagttgctataaaaaaatatgggtttccggaaaacctgcagatattgccataccgagactcgccgtatattctgcaagtagacaagtgttacacaatgcaatgtctcttttgggattagtcccggttgatagaatgtga

SEQ ID NO: 5023 - DNA, 1731 bp, Saccharomyces cerevisiae
atgtctgaagaagctgcctatcaagaggatacagcagtccaaaatactccagctgatgctttgtcgccagttgaatccgattctaattccgctttgtctactccatccaacaaagctgaaagagatgacatgaaagatttcgacgagaatcacgaagaatctaataactacgttgaaattccaaagaagcccgcctccgcctacgttacagtttccatctgttgtttaatggttgctttcggtggttttgttttcggttgggatactggtaccatttctggttttgttgctcaaactgattttatcagaagatttggtatgaagcaccacgatggtacttattatttgtctaaggttagaactggtttaattgtctccattttcaacattggttgtgccattggtggtattattttagcaaaattaggtgatatgtatggtcgtaaaatgggtttgattgtcgttgttgtcatctacattatcggtatcattatccaaattgcctcaatcaacaagtggtaccaatatttcattggtagaattatctctggtttaggtgtcggtggtattgccgttttatctcctatgttgatttctgaagtctctccaaagcatattagaggtactttggtttcatgttaccaacttatgattactttgggtattttcttgggttactgtacaaactacggtaccaagacctacaccaattctgtccaatggagagttccattaggtctaggtttcgcttgggctttgtttatgattggtggtatgacattcgttccagaatctccacgttatttagttgaagtcggtaaaattgaagaagctaagcgttctattgctctttcaaataaggtcagcgcagacgatccagctgttatggctgaagtcgaagttgttcaagctacagttgaagctgaaaaattagctggtaatgcctcctggggtgaaatatttagcactaagactaaggttttccaacgtttgatcatgggtgctatgattcaatcattgcaacaattgacaggtgataactatttcttctattacggtactaccgttttcactgctgtcggtttggaagattcttttgaaacttctattgtcttgggtattgtcaactttgcttccacctttgttggtattttcttagtcgaaagatatggtcgtcgtagatgtttattatggggtgctgcttccatgacagcttgtatggttgttttcgcttctgttggtgttacaagattgtggccaaatggtaagaagaacgggtcttctaagggtgctggtaactgtatgattgtcttcacatgtttctacttattctgttttgccactacctgggctccaattccatttgttgttaactctgaaactttcccattgagagttaagtccaagtgtatggctattgctcaagcttgtaactggatctggggtttcttgattggtttctttactccatttatttcaggtgctattgatttctactacggttatgttttcatgggctgtttggtcttttcttacttctacgtcttcttcttcgttccagaaactaaaggtttgactttagaagaagttaacaccttatgggaagaaggtgttttgccatggaaatcaccttcttgggttccaccaaacaagagaggtactgactacaacgctgatgatctaatgcatgatgatcaaccattttacaagaagatgttcggaaaaaagtag

SEQ ID NO: 5024 - DNA, 1731 bp, Artificial Sequence
  Description of Artificial Sequence: Synthetic polynucleotide
atgtctgaagaagctgcctatcaagaggatacagcagtccaaaatactccagctgatgctttgtctccagttgaatccgattctaattccgctttgtctactccatccaacaaagctgaaagagatgacatgaaagatttcgacgagaatcacgaagaatctaataactacgttgaaattccaaagaagcccgcctccgcctacgttacagtttccatctgttgtttaatggttgctttcggtggttttgttttcggttgggatactggtaccatttctggttttgttgctcaaactgattttatcagaagatttggtatgaagcaccacgatggtacttattatttgtctaaggttagaactggtttaattgtctccattttcaacattggttgtgccattggtggtattattttagcaaaattaggtgatatgtatggtcgtaaaatgggtttgattgtcgttgttgtcatctacattatcggtatcattatccaaattgccagcatcaacaagtggtaccaatatttcattggtagaattatctctggtttaggtgtcggtggtattgccgttttatctcctatgttgatttctgaagtctctccaaagcatattagaggtactttggtttcttgttaccaacttatgattactttgggtattttcttgggttactgtacaaactacggtaccaagacctacaccaattctgtccaatggagagttccattaggtttaggtttcgcttgggctttgtttatgattggtggtatgacattcgttccagaatctccacgttatttagttgaagtcggtaaaattgaagaagctaagcgttctattgctctttctaataaggtcagcgcagacgatccagctgttatggctgaagtcgaagttgttcaagctacagttgaagctgaaaaattagctggtaatgcctcctggggtgaaatatttagcactaagactaaggttttccaacgtttgatcatgggtgctatgattcaatctttgcaacaattgacaggtgataactatttcttctattacggtactaccgttttcactgctgtcggtttggaagattcttttgaaacttctattgtcttgggtattgtcaactttgcttccacctttgttggtattttcttagtcgaaagatatggtcgtcgtagatgtttattatggggtgctgcttccatgacagcttgtatggttgttttcgcttctgttggtgttacaagattgtggccaaatggtaagaagaacgggtcttctaagggtgctggtaactgtatgattgtcttcacatgtttctacttattctgttttgccactacctgggctccaattccatttgttgttaactctgaaactttcccattgagagttaagtccaagtgtatggctattgctcaagcttgtaactggatctggggtttcttgattggtttctttactccatttatttctggtgctattgatttctactacggttatgttttcatgggctgtttggtcttttcttacttctacgtcttcttcttcgttccagaaactaaaggtttgactttagaagaagttaacaccttatgggaagaaggtgttttgccatggaaatctccttcttgggttccaccaaacaagagaggtactgactacaacgctgatgatttgatgcatgatgatcaaccattttacaagaagatgttcggaaaaaagtga

SEQ ID NO: 5025 - DNA, 549 bp, Saccharomyces cerevisiae
atggactgtaaaatcaaagcagctggaaaaaactctggaatttttcatgaaggtggcactaaatcgtcgaagagcttcttgaccgtttttatccgaagtgtttttcctctttccccaagttttcctgcaggcgggggaatatggggccccatggaaaaaaaaccggggggggtgggaaaaaaaaaggggtcagaaaaaaaaactgctcagggaaatatcttcttctccacagaaagagacgcaggccaggaaaaatgtggaatattatataaacattgtttttccattttgtacggatttttttggaagaaagcggataaaccgaaagaaaaaacgggaaatggttccggtttgggcattgtttttcctattgggcaaaaaaaaatcccggaaccagctgactcggatatttttcttccttgtttccgctatgctgctgcaagtgactttacgaaggccaagcgtttcttggtggaaattactgcagtgtactgggtttcgttggaggcccagccttcatctgcgtcttgtttattcattctcatctga

SEQ ID NO: 5026 - DNA, 549 bp, Artificial Sequence
  Description of Artificial Sequence: Synthetic polynucleotide
atggactgtaaaatcaaagcagctggaaaaaactctggaatttttcatgaaggtggcactaaaagctctaagagcttcttgaccgtttttatcagaagtgtttttcctctttccccaagttttcctgcaggcgggggaatatggggccccatggaaaaaaaaccggggggggtgggaaaaaaaaaggggagtgaaaaaaaaactgctcagggaaatatcttcttctccacagaaagagacgcaggccaggaaaaatgtggaatattatataaacattgtttttccattttgtacggatttttttggaagaaagcggataaaccgaaagaaaaaacgggaaatggttccggtttgggcattgtttttcctattgggcaaaaaaaaatcccggaaccagctgacagtgatatttttcttccttgtttccgctatgctgctgcaagtgactttacgaaggccaagcgtttcttggtggaaattactgcagtgtactgggtttctttggaggcccagccttcttctgcgtcttgtttattcattctcatctga

SEQ ID NO: 5027 - DNA, 1713 bp, Saccharomyces cerevisiae
atgaattcaactcccgatctaatatctcctcagaaatccaattcatccaactcatatgaattggaatctggtcgttcaaaggccatgaatactccagaaggtaaaaatgaaagttttcacgacaacttaagtgaaagtcaagtgcaacccgccgttgcccctccaaacaccggaaaaggtgtctacgtaacggtttctatctgttgtgttatggttgctttcggtggtttcatatttggatgggatactggtaccatttctggttttgttgctcaaactgattttctaagaagatttggtatgaagcaccacgacggtagtcattacttgtccaaggtgagaactggtttaattgtctctatttttaacattggttgtgccattggtggtatcgtcttagccaagctaggtgatatgtatggtcgtagaatcggtttgattgtcgttgtagtaatctacactatcggtatcattattcaaatagcctcgatcaacaagtggtaccaatatttcattggtagaattatctctggtttaggtgtcggtggtatcacagttttatctcccatgctaatatctgaggtcgcccccagtgaaatgagaggcaccttggtttcatgttaccaagtcatgattactttaggtattttcttaggttactgtaccaattttggtaccaagaattactcaaactctgtccaatggagagttccattaggtttgtgtttcgcctgggccttatttatgattggtggtatgatgtttgttcctgaatctccacgttatttggttgaagctggcagaatcgacgaagccagggcttctttagctaaagttaacaaatgcccacctgaccatccatacattcaatatgagttggaaactatcgaagccagtgtcgaagaaatgagagccgctggtactgcatcttggggcgaattattcactggtaaaccagccatgtttcaacgtactatgatgggtatcatgattcaatctctacaacaattaactggtgataactatttcttctactacggtaccattgttttccaggctgtcggtttaagtgactcttttgaaacttctattgtctttggtgtcgtcaacttcttctccacttgttgttctctgtacaccgttgaccgttttggccgtcgtaactgtttgatgtggggtgctgtcggtatggtctgctgttatgttgtctatgcctctgttggtgttaccagattatggccaaacggtcaagatcaaccatcttcaaagggtgctggtaactgtatgattgttttcgcatgtttctacattttctgtttcgctactacctgggccccaattgcttacgttgttatttcagaatgtttcccattaagagtcaaatccaagtgtatgtctattgccagtgctgctaactggatctggggtttcttgattagtttcttcaccccatttattactggtgccatcaacttctactacggttacgttttcatgggctgtatggttttcgcttacttttacgtctttttcttcgttccagaaactaaaggtttatcattagaagaagttaatgatatgtacgccgaaggtgttctaccatggaaatcagcttcctgggttccagtatccaagagaggcgctgactacaacgctgatgacctaatgcatgatgaccaaccattttacaagagtttgtttagcaggaaataa

SEQ ID NO: 5028 - DNA, 1713 bp, Artificial Sequence
  Description of Artificial Sequence: Synthetic polynucleotide
atgaattctactcccgatttgatatctcctcagaaatccaattcttccaacagttatgaattggaatctggtcgttccaaggccatgaatactccagaaggtaaaaatgaaagttttcacgacaacttaagtgaaagtcaagtgcaacccgccgttgcccctccaaacaccggaaaaggtgtctacgtaacggtttctatctgttgtgttatggttgctttcggtggtttcatatttggatgggatactggtaccatttctggttttgttgctcaaactgattttttaagaagatttggtatgaagcaccacgacggtagtcattacttgtccaaggtgagaactggtttaattgtctctatttttaacattggttgtgccattggtggtatcgtcttagccaagttgggtgatatgtatggtcgtagaatcggtttgattgtcgttgtagtaatctacactatcggtatcattattcaaatagccagcatcaacaagtggtaccaatatttcattggtagaattatctctggtttaggtgtcggtggtatcacagttttatctcccatgttgatatctgaggtcgcccccagtgaaatgagaggcaccttggtttcttgttaccaagtcatgattactttaggtattttcttaggttactgtaccaattttggtaccaagaattactctaactctgtccaatggagagttccattaggtttgtgtttcgcctgggccttatttatgattggtggtatgatgtttgttcctgaatctccacgttatttggttgaagctggcagaatcgacgaagccagggcttctttagctaaagttaacaaatgcccacctgaccatccatacattcaatatgagttggaaactatcgaagccagtgtcgaagaaatgagagccgctggtactgcatcttggggcgaattattcactggtaaaccagccatgtttcaacgtactatgatgggtatcatgattcaatctttacaacaattaactggtgataactatttcttctactacggtaccattgttttccaggctgtcggtttaagtgactcttttgaaacttctattgtctttggtgtcgtcaacttcttctccacttgttgttctttgtacaccgttgaccgttttggccgtcgtaactgtttgatgtggggtgctgtcggtatggtctgctgttatgttgtctatgcctctgttggtgttaccagattatggccaaacggtcaagatcaaccatcttccaagggtgctggtaactgtatgattgttttcgcatgtttctacattttctgtttcgctactacctgggccccaattgcttacgttgttatttctgaatgtttcccattaagagtcaaatccaagtgtatgtctattgccagtgctgctaactggatctggggtttcttgattagtttcttcaccccatttattactggtgccatcaacttctactacggttacgttttcatgggctgtatggttttcgcttacttttacgtctttttcttcgttccagaaactaaaggtttatctttagaagaagttaatgatatgtacgccgaaggtgttttgccatggaaatctgcttcctgggttccagtatccaagagaggcgctgactacaacgctgatgacttgatgcatgatgaccaaccattttacaagagtttgtttagcaggaaatga

SEQ ID NO: 5029 - DNA, 1779 bp, Saccharomyces cerevisiae
atgtcggaacttgaaaacgctcatcaaggccccttggaagggtctgctactgtgagcacaaattctaactcatacaacgagaagtcaggaaactcgactgctcctggtaccgccggttacaacgataatttggcacaagctaaacccgtctcaagttacatttcccatgaaggccctcccaaagacgaactggaagagcttcagaaggaggttgacaaacaactagagaagaaatcgaagtcggatttactatttgtatccgtctgctgtttgatggttgcttttggtgggttcgtgtttgggtgggatactggtactatatctggttttgtcaggcaaacagacttcattaggcgatttggcagcacccgtgcaaacgggactacctatctttccgatgtcagaaccggtttgatggtttctattttcaacatcggctgcgctatcggaggtatagttttgtcaaagctcggtgatatgtatggacgtaagattggtctgatgactgttgtcgtcatttactcaattgggatcatcatccaaatcgcctccattgacaaatggtatcaatatttcattggaagaatcatctcaggactgggcgttggtggtattacagttttggcgcctatgctaatttctgaagtgtcgcctaagcagttgcgtggtactctggtttcatgttaccaattaatgatcactttcggtatctttttgggatattgtactaattttggtaccaagaattactcaaactctgtccaatggagggtaccattaggcttatgctttgcatggtctatttttatgattgttggtatgacgttcgttcctgaatccccacgttatctggtagaagtgggaaaaattgaagaggccaagcggtccttagcaagagctaacaaaaccactgaagactctcctttagtaactttagaaatggagaactatcagtcttctattgaagctgagagattggcgggctctgcttcttggggggaattggttactggtaagccccagatgttcagacgtacactaatgggtatgatgattcaatctttacaacagctgacaggtgacaattacttcttttactatggtactacaattttccaggctgttggtttggaagattcatttgaaactgctattgttttgggtgttgttaattttgtttcgacttttttctcgctatataccgtcgatcgttttggtcgtcgtaattgtttgttatggggctgtgtaggtatgatttgttgctatgtcgtctatgcctctgttggtgttaccagattatggccaaacggtcaagatcaaccatcttcaaagggtgctggtaactgtatgattgttttcgcatgtttctacattttctgtttcgctaccacttgggcccccgttgcctatgtccttatctctgagtcgtatcccttaagagtacgtggtaaagcaatgtcgattgcaagtgcctgtaactggatttgggggttcttgatcagttttttcactccatttattacttcagcaatcaatttctattatggctatgtctttatgggttgtatggtgttcgcatacttttatgtgttcttctttgttccagagacaaagggcttaacattagaagaagtcaacgaaatgtatgaagaaaatgtgctaccttggaagtctaccaaatggatcccaccatctaggagaacaacagattatgacctagacgctactagaaatgatccgagaccattttataaaaggatgttcactaaagaaaaataa

SEQ ID NO: 5030 - DNA, 1779 bp, Artificial Sequence
  Description of Artificial Sequence: Synthetic polynucleotide
atgtctgaacttgaaaacgctcatcaaggccccttggaagggtctgctactgtgagcacaaattctaactcttacaacgagaagagtggaaactctactgctcctggtaccgccggttacaacgataatttggcacaagctaaacccgtctctagttacatttcccatgaaggccctcccaaagacgaattggaagagcttcagaaggaggttgacaaacaattggagaagaaatccaagagtgatttactttttgtatccgtctgctgtttgatggttgcttttggtgggttcgtgtttgggtgggatactggtactatatctggttttgtcaggcaaacagacttcattaggaggtttggcagcacccgtgcaaacgggactacctatctttccgatgtcagaaccggtttgatggtttctattttcaacatcggctgcgctatcggaggtatagttttgtccaagctcggtgatatgtatggacgtaagattggtttgatgactgttgtcgtcatttactctattgggatcatcatccaaatcgcctccattgacaaatggtatcaatatttcattggaagaatcatcagtggattgggcgttggtggtattacagttttggcgcctatgttgatttctgaagtgtctcctaagcagttgcgtggtactttggtttcttgttaccaattaatgatcactttcggtatctttttgggatattgtactaattttggtaccaagaattactctaactctgtccaatggagggtaccattaggcttatgctttgcatggtctatttttatgattgttggtatgacgttcgttcctgaatccccacgttatttggtagaagtgggaaaaattgaagaggccaagaggtccttagcaagagctaacaaaaccactgaagactctcctttagtaactttagaaatggagaactatcagtcttctattgaagctgagagattggcgggctctgcttcttggggggaattggttactggtaagccccagatgttcagacgtacattgatgggtatgatgattcaatctttacaacagttgacaggtgacaattacttcttttactatggtactacaattttccaggctgttggtttggaagattcttttgaaactgctattgttttgggtgttgttaattttgtttccacttttttctctttgtataccgtcgatcgttttggtcgtcgtaattgtttgttatggggctgtgtaggtatgatttgttgctatgtcgtctatgcctctgttggtgttaccagattatggccaaacggtcaagatcaaccatcttccaagggtgctggtaactgtatgattgttttcgcatgtttctacattttctgtttcgctaccacttgggcccccgttgcctatgtccttatctctgagtcttatcccttaagagtacgtggtaaagcaatgtctattgcaagtgcctgtaactggatttgggggttcttgatcagttttttcactccatttattacttctgcaatcaatttctattatggctatgtctttatgggttgtatggtgttcgcatacttttatgtgttcttctttgttccagagacaaagggcttaacattagaagaagtcaacgaaatgtatgaagaaaatgtgttgccttggaagtctaccaaatggatcccaccatctaggagaacaacagattatgacttggacgctactagaaatgatccgagaccattttataaaaggatgttcactaaagaaaaatga

SEQ ID NO: 5031 - DNA, 1101 bp, Saccharomyces cerevisiae
atgaatcaaacaggaaggaccataggcggtcctcaaaatggcgtgaatacagtgattaaccccttcagagtttctccttcagaggacagagtatcaagcagggatgaaacgcccaggaattataataacccatttttaaatgaagatgacactaggagggcccataacagtagcgtttccaattctagacaagaaagactcccatcatatgaagaagctgcggggacaccgaaacagcaagctccatacccaaaagaaaagaaacgcagtagtggttcaaatagtcaccaacacaaccaccaccaccatcgtcgtacatcacacggacatagggacaaagataagcagaagagcaaaagcagaaccaaggttaagccccctaaaaatgtagacactattgacaagatggatgttacaggattatttggcggatctttccatcatgacggcccctttgatgcatgcactccacagagaaataagaataataaagtggcgcctgtactggccttcccagcagatggtccaaataatacagtaggcggccgcacaagtaagaagtctaccttagatgaggtgtttggtagggaaacagtagacgacgattctgagacgctgaaccaactacaagatagagcatatttattcaataaggccaattccagtactacgactttggatgcgattaaaccgaattcaaaaaatattacccagttcgattccaaaatgaaaactgaactagtccatgggcccattacgatgggtctaggctcaacgacgttcctggatggcgcaccagcgtcttccgctgccatagagcaagatgttatcaaccacgcacaagaatctcgtaggaaaaacagcatagcaagaaaaaagtctctcccctcaagaagacatctacaagtgaacaacaacaatttaaagctagtgaaaacacatagtggacacttggagcaaaaggacgtagacgataatagaacttctgttccggtcactgccacccaaggaagcggtcacgaagatgttgttaaaaaggaaaacaccggcaacaagctattaaggagggtgaaaagcttgaaaactagtaaaaagcactga

SEQ ID NO: 5032 - DNA, 1101 bp, Artificial Sequence
  Description of Artificial Sequence: Synthetic polynucleotide
atgaatcaaacaggaaggaccataggcggtcctcaaaatggcgtgaatacagtgattaaccccttcagagtttctccttctgaggacagagtatccagcagggatgaaacgcccaggaattataataacccatttttaaatgaagatgacactaggagggcccataacagtagcgtttccaattctagacaagaaagactcccatcttatgaagaagctgcggggacaccgaaacagcaagctccatacccaaaagaaaagaaacgcagtagtggtagtaatagtcaccaacacaaccaccaccaccatcgtcgtacaagtcacggacatagggacaaagataagcagaagagcaaaagcagaaccaaggttaagccccctaaaaatgtagacactattgacaagatggatgttacaggattatttggcggatctttccatcatgacggcccctttgatgcatgcactccacagagaaataagaataataaagtggcgcctgtattggccttcccagcagatggtccaaataatacagtaggcggccgcacaagtaagaagtctaccttagatgaggtgtttggtagggaaacagtagacgacgattctgagacgttgaaccaattacaagatagagcatatttattcaataaggccaattccagtactacgactttggatgcgattaaaccgaattctaaaaatattacccagttcgattccaaaatgaaaactgaattggtccatgggcccattacgatgggtcttggctctacgacgttcttggatggcgcaccagcgtcttccgctgccatagagcaagatgttatcaaccacgcacaagaatctcgtaggaaaaacagcatagcaagaaaaaagtctctccccagtagaagacatttacaagtgaacaacaacaatttaaagttagtgaaaacacatagtggacacttggagcaaaaggacgtagacgataatagaacttctgttccggtcactgccacccaaggaagcggtcacgaagatgttgttaaaaaggaaaacaccggcaacaagcttttaaggagggtgaaaagcttgaaaactagtaaaaagcactga

SEQ ID NO: 5033 - DNA, 2790 bp, Saccharomyces cerevisiae
atgtctcagcagaatattttggcagctagtgtttcagcgctctctcttgatgaatctactgtgcatacgggcggagcatcttccaaaaaaagtagaagacctcacagagcatatcataacttttcctcgggcactgttcctactttgggcaattcaccctacactacaccccaattgaatcagcaggatggttttcaacaacctcaagcctttacccctaagcaatttggtggcttcaacaacggttcgggttccgttatgtccacgcctgtaatggtgagtcaagagcgattcggtgcgagtgaggcctcctcgccatatggtcaatctatgcttgatatgacagcgcctcaacctacatctcacattgttccaactcaaagatttgaagatcaagctcaatatttacaacgatctttcgaaacttgtagagattctgttccgcccttgccgaccacccagttttattgtgttgaccaaggttcatgtgatccgcacttgatgagtttatccatgtacaacatccccgaaagtgaacacttgagagccgccacgaagctaccacttggattaaccatccaaccattttccactttgacaccgaatgatgcagaagttcccacaattccattaccaatggatggtacgcctttgcgttgtagacgttgtcgtgcgtatgctaatcctaaatttcagttcacttatgattcaagtgttatttgtaatatttgtagagttaagatgcaagttccaggtgagcattttgcgcccatgggtcccaatgggcaacgaagtgatttgaacgaaaaatcagagttattgcacggaacagtcgatttcttggtgccaagtatttacaatgctattcaggagaaggagcttttaccactacactacgtgtttttgattgatgtttcattgttagctaatgagaacggaagttctttagccatggtggaaggtgtcaggtcatgtattgagtatatttcagatttccagccaaattgtgaggttgctataatcgtttatgataataagttgcggttctttaatttgagaccagatttagataatgcacaagagtacattgtaagtgaattggacgatgttttcttaccattttataatggattatttgttaaacccggaaactcgatgaaaatcattaatgacacattgataaaaattagtggttacatctccaccgacaagtatagtcacgtaccccaagtctgttatggttctgctttacaagccgcaaaattagcgttagacacagtaactggcgggcaaggtggtaagattatttgttctttgaacagcttgccaacgatcggcaacgggaatttatcgctaaaaagggacaatgcacacattgctcatgttaaatgcgacaatgggttctataagaaattagcatcggattttttgaaatcctacatttctttagatttatatgtgaccaatgcgggattcattgatatggccactgtgggccatcctgtagagatgacttccggtattttgaaatattatccccactttcaacaagagacggatgccttcactttggttaacgacatggttacaaatgtctccaatattgttggttatcaagctttattgaaagttcgctgttctactgggctatctgtggaacagtactactgcgattcatctgataatacggatcatgatccaattattcctgtattgactagagataccaccttagatgtcttactaaaatatgacagtaaaataaaaacaggaaccgatgttcatttccaaactgcattgttatatactgatattgatggtgtcagaaaagttcgttctattaacacgtcaggtgcggtatctaataacattcgtgaaattttcaagtttataaatcaaaatcctgtcatgagaataatgatcaaagatgtcataaagacgctcggtgattgtgactttgtaaagatcagaagattaattgatgacaagatggtcgaaatcttgacccaatatagaggattggttagcagtaactcatcaacgcaattgatactgccggattctataaagacattgcctgcttacatgttagcatttgaaaaaagcgaattaatgaagccaaacgctcaaagtacccgtggtaatgaacgaatttatgatttattgaagtacgattcattgaactcagcacaactttgctacaaactttatccacaaattgtgccattccatgtattattagaggaaactgatctgaccttttacgatgctaatgataaattattacagatcaactccagctctattaataatctatctgtaagagcctcacactctaatttcattaacggcggttgctacttgattttccaaggtgatactatctatctatggtttaatgagaacaccaatagaatgctcttgcaagacctgctgtcagtggatgaatccttgcccgtcagccaaatttcgttatttagtggaacattgcctgagacgggcactagtattaatcaaaaggcttcaaacgtcattaaaaactggcaacaagtagtcaacaagtcatcattgccgttagtcttgttgaggcctaatgttgatcaatattacagtaatgtgatgagtcaattgctttgcgaggacaagaccgtcaacagaatcgaatcatatgacaattacttggtgataatgcataaaaaaattcaagaaaaacttcaaaaagacgatttcattaaagtctcgactgccgcaactcacgaaaatatccatcaaaaatttgtgcagttttga

SEQ ID NO: 5034 - DNA, 2790 bp, Artificial Sequence
  Description of Artificial Sequence: Synthetic polynucleotide
atgtctcagcagaatattttggcagctagtgtttctgcgctctctcttgatgaatctactgtgcatacgggcggagcatcttccaaaaaaagtagaagacctcacagagcatatcataacttttccagtggcactgttcctactttgggcaattctccctacactacaccccaattgaatcagcaggatggttttcaacaacctcaagcctttacccctaagcaatttggtggcttcaacaacggttctggttccgttatgtccacgcctgtaatggtgagtcaagagagattcggtgcgagtgaggcctcctctccatatggtcaatctatgcttgatatgacagcgcctcaacctacatctcacattgttccaactcaaagatttgaagatcaagctcaatatttacaaagatctttcgaaacttgtagagattctgttccgcccttgccgaccacccagttttattgtgttgaccaaggttcttgtgatccgcacttgatgagtttatccatgtacaacatccccgaaagtgaacacttgagagccgccacgaagttaccacttggattaaccatccaaccattttccactttgacaccgaatgatgcagaagttcccacaattccattaccaatggatggtacgcctttgcgttgtagacgttgtcgtgcgtatgctaatcctaaatttcagttcacttatgattctagtgttatttgtaatatttgtagagttaagatgcaagttccaggtgagcattttgcgcccatgggtcccaatgggcaaagaagtgatttgaacgaaaaaagtgagttattgcacggaacagtcgatttcttggtgccaagtatttacaatgctattcaggagaaggagcttttaccattacactacgtgtttttgattgatgtttctttgttagctaatgagaacggaagttctttagccatggtggaaggtgtcaggagttgtattgagtatatttctgatttccagccaaattgtgaggttgctataatcgtttatgataataagttgagattctttaatttgagaccagatttagataatgcacaagagtacattgtaagtgaattggacgatgttttcttaccattttataatggattatttgttaaacccggaaactccatgaaaatcattaatgacacattgataaaaattagtggttacatctccaccgacaagtatagtcacgtaccccaagtctgttatggttctgctttacaagccgcaaaattagcgttagacacagtaactggcgggcaaggtggtaagattatttgttctttgaacagcttgccaacgatcggcaacgggaatttaagtttgaaaagggacaatgcacacattgctcatgttaaatgcgacaatgggttctataagaaattagcatctgattttttgaaatcctacatttctttagatttatatgtgaccaatgcgggattcattgatatggccactgtgggccatcctgtagagatgacttccggtattttgaaatattatccccactttcaacaagagacggatgccttcactttggttaacgacatggttacaaatgtctccaatattgttggttatcaagctttattgaaagttcgctgttctactgggttatctgtggaacagtactactgcgattcttctgataatacggatcatgatccaattattcctgtattgactagagataccaccttagatgtcttattgaaatatgacagtaaaataaaaacaggaaccgatgttcatttccaaactgcattgttatatactgatattgatggtgtcagaaaagttcgttctattaacacgtctggtgcggtatctaataacattcgtgaaattttcaagtttataaatcaaaatcctgtcatgagaataatgatcaaagatgtcataaagacgctcggtgattgtgactttgtaaagatcagaagattaattgatgacaagatggtcgaaatcttgacccaatatagaggattggttagcagtaactcttctacgcaattgatattaccggattctataaagacattgcctgcttacatgttagcatttgaaaaaagcgaattaatgaagccaaacgctcaaagtacccgtggtaatgaaagaatttatgatttattgaagtacgattctttgaactctgcacaactttgctacaaactttatccacaaattgtgccattccatgtattattagaggaaactgatttgaccttttacgatgctaatgataaattattacagatcaactccagctctattaataatttatctgtaagagcctctcactctaatttcattaacggcggttgctacttgattttccaaggtgatactatctatttatggtttaatgagaacaccaatagaatgctcttgcaagacttattatctgtggatgaatccttgcccgtcagccaaatttctttatttagtggaacattgcctgagacgggcactagtattaatcaaaaggcttctaacgtcattaaaaactggcaacaagtagtcaacaagagttctttgccgttagtcttgttgaggcctaatgttgatcaatattacagtaatgtgatgagtcaattgctttgcgaggacaagaccgtcaacagaatcgaaagttatgacaattacttggtgataatgcataaaaaaattcaagaaaaacttcaaaaagacgatttcattaaagtctctactgccgcaactcacgaaaatatccatcaaaaatttgtgcagttttga

SEQ ID NO: 5035 - DNA, 11235 bp, Saccharomyces cerevisiae
atgtcactcactgagcagatcgagcaattcgccagtaggtttcgcgatgatgatgccactctacaatcgagatattccactctatcggaattgtacgacataatggaattactgaattctcctgaggattaccattttttcttacaagctgtgatacctttacttctaaaccagctaaaggaagttcctatttcatatgatgcgcattcaccggaacaaaagttgagaaactctatgcttgatattttcaacaggtgtctcatgaaccaaacctttcaaccctacgcaatggaagtgctcgagtttttactttcagtactaccaaaggaaaacgaagaaaatgggatattatgtatgaaagtgctgacgacacttttcaaatcattcaaatcaatactacaggacaaactcgactccttcatacgaataattattcagatttataaaaatacaccaaaccttataaaccagacgttttatgaagccgggaaagcagaacagggtgatttggattcaccaaaagaaccacaggcagatgaacttctcgatgaattctccaaaaatgatgaagaaaaggactttccatcgaaacaatcatccacggagccaaggtttgaaaactctacctcatcaaacgggttgaggtcatctatgttttcctttaaaatcctttctgaatgccctattacaatggtcactttatattcgtcttacaagcagttgactagcacctcgcttccggaattcactcctcttattatgaatctattgaatatacaaattaaacaacaacaggaagcgagagaacaggcggaatcacggggagaacatttcacttctatatcgacggagattatcaacagaccggcttactgtgattttatattagcccagatcaaggccacgtctttcttggcttacgtattcattagaggatacgctcctgaatttttgcaggattatgtgaattttgttcctgatttaatcataaggcttttacaagactgcccttctgaactatcatctgctaggaaggaacttttgcatgccactagacacattctatctacaaactacaaaaagctctttttacccaaattggactatctgtttgacgaacgtatacttattggtaacggttttactatgcatgaaacattaaggcccctggcttatagtactgtggcagatttcattcataatataagatctgaattacaactaagtgaaattgaaaaaacaataaagatttacactggatatctattggatgagtcattagccttaactgtacaaatcatgagtgcaaaattgctgcttaatttagttgaaagaatattaaaattgggaaaggagaacccacaagaggcccctagagcaaagaaattgttaatgataatcattgactcatatatgaatagatttaaaaccttaaacagacagtacgatacaataatgaagtactatggaagatacgaaacgcataagaaggagaaagcagaaaagctcaaaaactctatacaggataatgacaaagagagtgaggaatttatgaggaaggtactggaaccatccgatgacgaccatttgatgccacagcctaaaaaagaagatatcaatgatagtcccgatgttgaaatgacagaatctgacaaagtggtgaagaatgacgttgaaatgtttgacataaaaaactacgcacctatattattactacccacaccaacaaatgatcccatcaaggatgctttttacttatacagaactttaatgtctttcttaaaaacaataattcatgacttaaaagtctttaacccacctcctaacgaatatacggttgctaatcctaaattgtgggcttctgtttctagagttttttcatatgaggaagtcattgttttcaaggatttatttcacgaatgtattattggtttgaaattttttaaagatcataatgaaaaattatctccagaaacaacaaaaaaacattttgatatatcaatgcccagcctaccggtctcagccaccaaagatgctcgtgagttaatggactatttggcatttatgtttatgcagatggataatgccacttttaatgaaataattgaacaggaactgccatttgtctatgaaagaatgctggaggattctgggctgctacatgtcgcgcaatcctttttaacaagtgaaataacctccccaaattttgctggcatccttttaagattcttgaaagggaaattgaaagatttaggaaacgttgattttaacacttctaatgtcctaatacgacttttcaaattgtcctttatgtccgtcaatcttttccccaatatcaatgaggttgttcttcttccacacttaaacgatctaattctaaactccctgaaatactcaactacagcagaagagcctctagtatacttttatcttattagaactctttttagaagtataggtgggggcagatttgaaaacttatatagatcgattaagcccatactacaggtgctattacaatctttaaaccaaatgatacttactgcacgattgccccacgagagagaactttatgtggaattatgcatcactgtaccagttcggttaagtgtgcttgctccttatttgccatttttgatgaaaccattggtatttgcattacagcaatatcctgatctcgtttcgcagggtttaaggaccttagaattatgtattgataatttgaccgccgagtattttgatcctataatcgaaccggtaatcgatgacgtttcgaaggccttgtttaaccttctgcaacctcaaccatttaatcatgctatcagccacaacgtagtcagaatactgggcaaattaggaggtagaaatcgtcaatttttaaagccaccaacggacctcacggaaaaaacggaactagacattgatgcgatagcagatttcaaaatcaatggtatgccggaagatgtaccgctttctgtaacgccaggaatccagtccgctttgaatatattgcaaagctacaaaagtgatattcactacaggaagagtgcttacaagtatctaacctgtgtactactgttaatgacaaaatcatcagcagagtttcctacgaattacacggaactgttgaagacagcagtgaattctataaagctagagaggattggaatagaaaaaaactttgatttggaaccaactgtaaataagagagattattcgaaccaagaaaatttgtttttgaggttactggagagcgttttttacgcaacttcgataaaggaactaaaagatgacgcaatggacctactgaataaccttttggatcatttctgcctattacaagtaaacactacgttgcttaataagagaaactataatgggacatttaacatcgatctaaagaacccaaacttcatgctagatagctcattgattctagatgctattccctttgccctttcgtactacattccagaagttcgtgaggtgggtgttttggcgtacaaaagaatatacgaaaaaagttgtctgatatatggggaggaactagctttaagtcactccttcataccggaattagctaaacagtttatccatttgtgttacgacgaaacatattacaacaaaagaggcggtgtcttgggtataaaagttctcattgataatgttaagtcgtcctcagttttcctaaaaaagtatcagtataacctagccaatggtctattatttgtgctgaaggacactcagagcgaggccccatctgctataacagatagcgctgagaaattactaatagatctattaagtattacgttcgcggatgtaaaagaagaggatttgggtaacaaagtcttggagaacacactgacggacatagtatgcgaattaagtaatgcaaatcctaaggtaagaaatgcctgccagaagtccttacatacaatttcaaacctcactggaattcctatagtaaaattgatggatcattccaaacaatttcttctatcaccaatatttgcaaaacctttaagagcattacctttcactatgcaaatcggtaatgtcgatgctatcacattctgtttaagtctaccaaacacatttctaacatttaatgaagaactgtttaggttactccaagaatctattgtcttggcagatgcagaagatgaatcactatccaccaatatccaaaagacaaccgaatatagtacttccgagcaattagtacaattaagaatagcgtgcataaaattacttgcgattgctcttaaaaatgaagaatttgccacagctcaacaaggaaacatcagaattcgaattctagctgtttttttcaaaacaatgctgaaaacttcaccagaaattattaatactacatatgaagctttgaaaggttccttagcagaaaactctaaattgccgaaagaattacttcagaacggattaaaacctcttttaatgaatttatctgaccaccaaaagctgacggtccctggtctggatgctttatcgaagcttctcgagttattgattgcatactttaaagtagaaatcggaagaaagttgttagatcacctcacggcatggtgccgtgttgaagttcttgacacattatttggccaagatttagcagagcagatgccaactaaaataatagtaagcattattaatatatttcatctactgccaccacaagctgatatgtttttaaatgatttgttgctcaaagttatgcttctagagagaaaactacgtcttcaactggattctccatttcgtacaccactagcgaggtacctgaaccgtttccataaccccgtaacagagtacttcaagaaaaatatgacgttaaggcaattagtgcttttcatgtgcaatattgtgcaaagacctgaagcaaaggagctggccgaagattttgagaaagaactcgacaacttctatgacttttacatttccaatataccaaaaaaccaagtacgtgttgttagtttttttactaatatggttgatctctttaatacaatggtgatcacgaatggggacgaatggctaaagaaaaaaggcaacatgattttgaaattaaaagatatgctgaacttgacattaaaaacaataaaggaaaactcgttttacatcgaccatctacaattaaatcaaagtattgcaaaattccaagctctttacctgcgtttcactgaattatccgaaagggatcaaaatcctctgctcctagatttcattgatttttctttttcaaatggtatcaaagcctcatattccctcaagaaattcatcttccataatataatagcaagttcaaataaagaaaagcagaataacttcataaatgatgcaacacttttcgttctatctgacaaatgtttggatgctagaatatttgtacttaaaaatgtcataaattcaactttgatttatgaagtggcaacatctggatctttgaaaagctatcttgtggaggataaaaaacctaaatggttagagttactccacaataaaatttggaagaactcaaatgcaattttagcatatgacgttctagaccatcatgatttattccgttttgaactcttacaactgtcagcaattttcattaaggcagatccagaaattatagccgagataaagaaagatataataaaattctgctggaatttcataaagctcgaagatacccttatcaaacaatccgcgtacctggttacatcatatttcatatccaagtttgatttccctattaaagttgtcacccaggtttttgttgccctattacgttcttctcatgtcgaagctaggtacttagttaagcaatcgctggacgttctcacccctgttctccatgaacgtatgaacgcagctgggacgcccgatacctggattaactgggttaaaagggtaatggtagaaaattcttctagtcagaacaacattttataccaatttttgataagccaccctgatttatttttcaattcaagagatttgttcatatcaaatattattcatcatatgaataagataacgttcatgtcaaattcaaactctgatagtcatactttagctattgatttggcgtcattaattctttattgggagaacaagaccttagaaattacgaatgtaaataataccaagaccgattccgacggagatgttgtaatgtccgattctaaaagtgatattaatccagttgaggctgacacaaccgcaataattgtagacgctaataacaactcgcctatatctttacatttacgcgaggcttgtacggcgtttttgataagatacgtgtgtgcaagtaatcaccgtgccatagaaacagaactaggattaagagctatcaatattttatcagaattaatctcagataagcattggacaaacgtcaatgttaaactggtttacttcgagaagtttttgatatttcaagatctcgattccgaaaatattctttactactgcatgaatgctttggatgtgctttatgtattcttcaaaaataagacaaaagaatggataatggaaaacttacctaccattcaaaatcttctagaaaaatgtatcaaatctgatcatcacgatgtacaggaagctctgcaaaaagttttgcaggtaataatgaaggcaataaaagctcagggtgtatcagtgataattgaagaagaaagccctggtaagacatttatccaaatgttaacctccgtgataactcaggatcttcaggaaacctcatcagttacagctggtgtaactctagcttgggtactcttcatgaactttccggataacatcgtcccattattaacgcctttgatgaagacgttcagtaagttatgcaaagatcacttaagcatttcacaaccgaaggacgccatggctctggaagaggcaaggattacgacgaaacttttagagaaagttttatatatattatctttgaaagtctcactcttgggtgactcccgtcgtcctttcctctccactgtggcacttctgattgatcactccatggatcaaaattttttgaggaaaattgtcaatatgtccagaagctggatattcaatactgaaatttttccaactgttaaagaaaaagcggctatattaacgaagatgctggcgtttgagattagaggggaaccttcattgtcaaagctattctacgaaatagtcttgaaactatttgatcaagaacattttaataacacagaaattaccgttagaatggaacaacctttcctcgtaggaacgcgtgttgaagacatcggtataaggaaaagattcatgacaattttggataatagtttggaaagagatatcaaagagagactatattatgttatacgggaccaaaactgggaatttattgctgattatccatggttaaatcaagctttacaattactatatggttcttttaatagagagaaggaattatctttaaagaacatttattgtttgtctccaccatcgattttacaagagtacctcccagaaaatgctgaaatggtaaccgaagtaaacgatctggaattatcaaactttgttaaaggtcatatagcttccatgcaaggtttatgtcgaataatctcttcggatttcatcgattctttgattgaaatattttaccaagatccaaaagcaattcatagagcgtgggttacgttatttccccaggtatacaaaagtattccaaagaatgaaaaatacgggtttgttcgatctatcattacattgctttctaaaccttatcataccagacaaatttcctctaggacaaatgtgattaatatgctattggactcaataagtaaaattgaatcgttagaattaccccctcatttggtcaaatacttggcgatatcatacaacgcttggtatcaatcgattaacatcttggaatccattcaaagcaatactagcatcgacaatacaaaaattatcgaagccaacgaagatgcgctattagaactatacgtcaatctacaagaagaagacatgttttatggtctttggagacgtagagcaaaatacacagagactaacattggtttatcatatgaacaaattggcctttgggacaaagctcaacaactttatgaagtggcacaggtcaaagctcgtagtggtgccttgccctactcacagtctgagtatgcactatgggaagataactggatacagtgtgctgaaaaattacaacattgggacgtattaactgaattagcgaagcatgaagggttcacggacttattattagaatgtggttggcgtgttgctgattggaacagtgatcgtgatgcacttgagcaatcagtaaaaagcgttatggacgttccaactccacgaaggcaaatgtttaagacctttttggctcttcaaaatttcgcagaaagcagaaaaggagatcaagaagttagaaagctatgcgatgaaggaatacaattaagtctaataaagtgggtgtctctgccaattagatatacaccagctcataagtggctattacatgggtttcaacagtacatggaatttttggaagcgacacagatatatgctaacttgcatacaacaacagtacagaatctggattctaaagcccaagagattaagcgcatcttgcaagcttggagagaccgtctaccaaacacatgggatgatgtcaatatgtggaatgacctagtaacatggagacaacatgcattccaggttattaacaacgcatatctcccattaataccggcacttcaacaatcaaacagtaatagcaatattaatactcatgcatataggggatatcatgaaattgcctgggtaatcaacaggtttgcacatgttgcaaggaagcacaacatgcctgacgtgtgtatcagtcagctggcacgtatttacaccctaccgaatatagaaattcaggaggctttcctaaagttaagggagcaagctaaatgtcattaccaaaacatgaacgaattaacaacgggtctggatgttattagtaatactaatttggtttactttggtactgtccaaaaagctgaattcttcacattgaagggtatgtttttgtctaaattacgcgcatatgaagaggcaaatcaagcctttgcaacagctgttcagatagacttgaacttggctaaagcatgggcccaatggggtttcttcaatgaccgtcgtttgtcagaagagccaaacaacattagttttgctagtaatgcaataagctgttatttacaagccgccggcctgtataagaactcgaagattagggagttattgtgcaggattttatggctcatcagtatagatgatgcttcgggcatgctcacaaacgcatttgactcctttagaggcgaaatacccgtttggtactggattactttcattcctcaactattaacctctctatcacataaggaggccaatatggttcgtcatatcttaatcagaattgctaaaagttatcctcaagctcttcacttccaattaagaacgacaaaggaagatttcgccgttatccaacgacagacaatggctgttatgggggataaaccagatacaaacgatcggaatggacggcgccagccttgggaatatttacaagagttaaacaatattctaaagacagcttatccattgttggccttatccttagagtctcttgttgcccaaataaacgaccgtttcaaatctactactgacgaagatcttttcaggttgataaatgtcctattgatcgatggaacgctgaactacaatcgcttaccatttcctaggaaaaatccaaaacttcctgaaaatacagaaaaaaatttggtcaaattttctacaactttgttggcgccttatataagaccaaagttcaatgccgactttattgacaataaaccggattacgaaacttatatcaagagattacgttactggcgaaggaggttggaaaacaagcttgatagagcatcaaaaaaagaaaatctagaagtattatgtccacatttaagcaacttccatcaccaaaaattcgaggatattgaaattcctggccagtatcttttgaacaaggataataatgttcactttattaaaattgccagatttttacccacggtcgattttgttcgcggaacacattcttcatataggcgtttaatgattcggggccatgatggcagtgtacattcatttgctgttcaatatccagctgttcgccattcaagaagagaagaaaggatgtttcaattgtacagattattcaacaagtcattatccaagaatgtggaaacaagacgtcgcagtatacagttcaatctaccaatagcaatcccgctatctccacaagtccgtatcatgaatgatagtgtttcttttactacccttcatgaaattcacaatgaattttgcaagaaaaaaggatttgacccggatgatatccaagattttatggcagataaactaaacgcagcgcatgatgatgctctgcctgcgccagatatgaccatattgaaagttgaaattttcaattcaattcaaacaatgtttgtaccatcaaatgttttaaaagaccattttacctcgttgtttactcaatttgaagatttctggttattccgtaaacaatttgcgtcacaatacagttcgtttgtcttcatgtcttacatgatgatgatcaataaccgtactcctcacaaaatccatgttgacaaaacctctggtaatgtatttactttagaaatgttaccctcaagatttccatatgaaagggtgaaaccattgctaaagaatcatgacttaagtcttccaccagattctccgatatttcataataatgaaccagttccattcagactgacgcctaatattcaatctttgataggtgattctgctttagaaggtatatttgcggtaaatttatttaccatatcacgtgcattaattgaacctgataatgaactgaacacatacttggccctattcatccgtgacgagatcatatcatggtttagcaaccttcaccggccaatcattgaaaatccacagttacgtgagatggttcaaaccaacgttgacctaattattagaaaggtggcacaattgggccatttgaattcaacacctacagtcacaacccagttcatcctagactgtattggcagcgctgtcagtccaagaaacttagcaagaacagacgtgaacttcatgccatggttctag

SEQ ID NO: 5036 - DNA, 11235 bp, Artificial Sequence
  Description of Artificial Sequence: Synthetic polynucleotide
atgagtctcactgagcagatcgagcaattcgccagtaggtttcgcgatgatgatgccactttacaatctagatattccactttatctgaattgtacgacataatggaattattgaattctcctgaggattaccattttttcttacaagctgtgatacctttacttttgaaccagttgaaggaagttcctatttcttatgatgcgcattctccggaacaaaagttgagaaactctatgcttgatattttcaacaggtgtctcatgaaccaaacctttcaaccctacgcaatggaagtgctcgagtttttactttctgtattgccaaaggaaaacgaagaaaatgggatattatgtatgaaagtgttaacgacacttttcaaatctttcaaatctatattacaggacaaactcgactccttcataagaataattattcagatttataaaaatacaccaaaccttataaaccagacgttttatgaagccgggaaagcagaacagggtgatttggattctccaaaagaaccacaggcagatgaacttctcgatgaattctccaaaaatgatgaagaaaaggactttccatctaaacaatcttccacggagccaaggtttgaaaactctacctcttccaacgggttgaggtcttctatgttttcctttaaaatcctttctgaatgccctattacaatggtcactttatattcttcttacaagcagttgactagcacctctcttccggaattcactcctcttattatgaatttattgaatatacaaattaaacaacaacaggaagcgagagaacaggcggaatctagaggagaacatttcacttctatatctacggagattatcaacagaccggcttactgtgattttatattagcccagatcaaggccacgtctttcttggcttacgtattcattagaggatacgctcctgaatttttgcaggattatgtgaattttgttcctgatttaatcataaggcttttacaagactgcccttctgaattatcttctgctaggaaggaacttttgcatgccactagacacattttatctacaaactacaaaaagctctttttacccaaattggactatttatttgacgaacgtatacttattggtaacggttttactatgcatgaaacattaaggcccttggcttatagtactgtggcagatttcattcataatataagatctgaattacaattgagtgaaattgaaaaaacaataaagatttacactggatatcttttggatgagtctttagccttaactgtacaaatcatgagtgcaaaattgttacttaatttagttgaaagaatattaaaattgggaaaggagaacccacaagaggcccctagagcaaagaaattgttaatgataatcattgactcttatatgaatagatttaaaaccttaaacagacagtacgatacaataatgaagtactatggaagatacgaaacgcataagaaggagaaagcagaaaagctcaaaaactctatacaggataatgacaaagagagtgaggaatttatgaggaaggtattggaaccatccgatgacgaccatttgatgccacagcctaaaaaagaagatatcaatgatagtcccgatgttgaaatgacagaatctgacaaagtggtgaagaatgacgttgaaatgtttgacataaaaaactacgcacctatattattattgcccacaccaacaaatgatcccatcaaggatgctttttacttatacagaactttaatgtctttcttaaaaacaataattcatgacttaaaagtctttaacccacctcctaacgaatatacggttgctaatcctaaattgtgggcttctgtttctagagttttttcttatgaggaagtcattgttttcaaggatttatttcacgaatgtattattggtttgaaattttttaaagatcataatgaaaaattatctccagaaacaacaaaaaaacattttgatatatccatgcccagcttaccggtctctgccaccaaagatgctcgtgagttaatggactatttggcatttatgtttatgcagatggataatgccacttttaatgaaataattgaacaggaattaccatttgtctatgaaagaatgttagaggattctgggttgttgcatgtcgcgcaatcctttttaacaagtgaaataacctccccaaattttgctggcatccttttaagattcttgaaagggaaattgaaagatttaggaaacgttgattttaacacttctaatgtcttgataaggcttttcaaattgtcctttatgtccgtcaatcttttccccaatatcaatgaggttgttcttcttccacacttaaacgatttgattttgaactccttgaaatactccactacagcagaagagcctttggtatacttttatcttattagaactctttttagaagtataggtgggggcagatttgaaaacttatatagatctattaagcccatattacaggtgttattacaatctttaaaccaaatgatacttactgcaagattgccccacgagagagaactttatgtggaattatgcatcactgtaccagttagattaagtgtgcttgctccttatttgccatttttgatgaaaccattggtatttgcattacagcaatatcctgatctcgtttctcagggtttaaggaccttagaattatgtattgataatttgaccgccgagtattttgatcctataatcgaaccggtaatcgatgacgtttccaaggccttgtttaaccttttacaacctcaaccatttaatcatgctatcagccacaacgtagtcagaatattgggcaaattaggaggtagaaatcgtcaatttttaaagccaccaacggacctcacggaaaaaacggaattagacattgatgcgatagcagatttcaaaatcaatggtatgccggaagatgtaccgctttctgtaacgccaggaatccagtccgctttgaatatattgcaaagctacaaaagtgatattcactacaggaagagtgcttacaagtatttgacctgtgtattgttattaatgacaaaatcttctgcagagtttcctacgaattacacggaattattgaagacagcagtgaattctataaagttggagaggattggaatagaaaaaaactttgatttggaaccaactgtaaataagagagattattccaaccaagaaaatttgtttttgaggttattggagagcgttttttacgcaacttccataaaggaattgaaagatgacgcaatggacttattgaataaccttttggatcatttctgccttttacaagtaaacactacgttgcttaataagagaaactataatgggacatttaacatcgatttgaagaacccaaacttcatgcttgatagctctttgattttagatgctattccctttgccctttcttactacattccagaagttcgtgaggtgggtgttttggcgtacaaaagaatatacgaaaaaagttgtttgatatatggggaggaattggctttaagtcactccttcataccggaattagctaaacagtttatccatttgtgttacgacgaaacatattacaacaaaagaggcggtgtcttgggtataaaagttctcattgataatgttaagtcttcctctgttttcttgaaaaagtatcagtataacttggccaatggtttattatttgtgttgaaggacactcagagcgaggccccatctgctataacagatagcgctgagaaattattgatagatttattaagtattacgttcgcggatgtaaaagaagaggatttgggtaacaaagtcttggagaacacattaacggacatagtatgcgaattaagtaatgcaaatcctaaggtaagaaatgcctgccagaagtccttacatacaatttccaacctcactggaattcctatagtaaaattgatggatcattccaaacaatttcttttatctccaatatttgcaaaacctttaagagcattacctttcactatgcaaatcggtaatgtcgatgctatcacattctgtttaagtttaccaaacacatttttaacatttaatgaagaattatttaggttactccaagaatctattgtcttggcagatgcagaagatgaatctttatccaccaatatccaaaagacaaccgaatatagtacttccgagcaattagtacaattaagaatagcgtgcataaaattacttgcgattgctcttaaaaatgaagaatttgccacagctcaacaaggaaacatcagaattagaattttggctgtttttttcaaaacaatgttgaaaacttctccagaaattattaatactacatatgaagctttgaaaggttccttagcagaaaactctaaattgccgaaagaattacttcagaacggattaaaacctcttttaatgaatttatctgaccaccaaaagttgacggtccctggtttggatgctttatccaagcttctcgagttattgattgcatactttaaagtagaaatcggaagaaagttgttagatcacctcacggcatggtgccgtgttgaagttcttgacacattatttggccaagatttagcagagcagatgccaactaaaataatagtaagcattattaatatatttcatttattaccaccacaagctgatatgtttttaaatgatttgttgctcaaagttatgcttttggagagaaaattacgtcttcaattggattctccatttcgtacaccattggcgaggtacttgaaccgtttccataaccccgtaacagagtacttcaagaaaaatatgacgttaaggcaattagtgcttttcatgtgcaatattgtgcaaagacctgaagcaaaggagttggccgaagattttgagaaagaactcgacaacttctatgacttttacatttccaatataccaaaaaaccaagtacgtgttgttagtttttttactaatatggttgatctctttaatacaatggtgatcacgaatggggacgaatggttaaagaaaaaaggcaacatgattttgaaattaaaagatatgttgaacttgacattaaaaacaataaaggaaaactctttttacatcgaccatttacaattaaatcaaagtattgcaaaattccaagctctttacttgcgtttcactgaattatccgaaagggatcaaaatcctttactcttggatttcattgatttttctttttctaatggtatcaaagcctcttattccctcaagaaattcatcttccataatataatagcaagtagtaataaagaaaagcagaataacttcataaatgatgcaacacttttcgttttatctgacaaatgtttggatgctagaatatttgtacttaaaaatgtcataaattctactttgatttatgaagtggcaacatctggatctttgaaaagctatcttgtggaggataaaaaacctaaatggttagagttactccacaataaaatttggaagaacagtaatgcaattttagcatatgacgttttggaccatcatgatttattccgttttgaactcttacaattaagtgcaattttcattaaggcagatccagaaattatagccgagataaagaaagatataataaaattctgctggaatttcataaagctcgaagatacccttatcaaacaatccgcgtacttggttacatcttatttcatatccaagtttgatttccctattaaagttgtcacccaggtttttgttgccttattacgttcttctcatgtcgaagctaggtacttagttaagcaaagtttggacgttctcacccctgttctccatgaacgtatgaacgcagctgggacgcccgatacctggattaactgggttaaaagggtaatggtagaaaattcttctagtcagaacaacattttataccaatttttgataagccaccctgatttatttttcaattctagagatttgttcatatccaatattattcatcatatgaataagataacgttcatgagtaatagcaactctgatagtcatactttagctattgatttggcgtctttaattctttattgggagaacaagaccttagaaattacgaatgtaaataataccaagaccgattccgacggagatgttgtaatgtccgattctaaaagtgatattaatccagttgaggctgacacaaccgcaataattgtagacgctaataacaactctcctatatctttacatttacgcgaggcttgtacggcgtttttgataagatacgtgtgtgcaagtaatcaccgtgccatagaaacagaattaggattaagagctatcaatattttatctgaattaatcagtgataagcattggacaaacgtcaatgttaaattggtttacttcgagaagtttttgatatttcaagatctcgattccgaaaatattctttactactgcatgaatgctttggatgtgctttatgtattcttcaaaaataagacaaaagaatggataatggaaaacttacctaccattcaaaatcttttagaaaaatgtatcaaatctgatcatcacgatgtacaggaagctttacaaaaagttttgcaggtaataatgaaggcaataaaagctcagggtgtatctgtgataattgaagaagaaagccctggtaagacatttatccaaatgttaacctccgtgataactcaggatcttcaggaaacctcttctgttacagctggtgtaactttggcttgggtactcttcatgaactttccggataacatcgtcccattattaacgcctttgatgaagacgttcagtaagttatgcaaagatcacttaagcatttctcaaccgaaggacgccatggctttggaagaggcaaggattacgacgaaacttttagagaaagttttatatatattatctttgaaagtctctctcttgggtgactcccgtcgtcctttcctctccactgtggcacttttgattgatcactccatggatcaaaattttttgaggaaaattgtcaatatgtccagaagctggatattcaatactgaaatttttccaactgttaaagaaaaagcggctatattaacgaagatgttggcgtttgagattagaggggaaccttctttgtccaagcttttctacgaaatagtcttgaaattatttgatcaagaacattttaataacacagaaattaccgttagaatggaacaacctttcctcgtaggaacgcgtgttgaagacatcggtataaggaaaagattcatgacaattttggataatagtttggaaagagatatcaaagagagattatattatgttataagagaccaaaactgggaatttattgctgattatccatggttaaatcaagctttacaattattatatggttcttttaatagagagaaggaattatctttaaagaacatttattgtttgtctccaccatctattttacaagagtacctcccagaaaatgctgaaatggtaaccgaagtaaacgatttggaattatctaactttgttaaaggtcatatagcttccatgcaaggtttatgtaggataatctcttctgatttcatcgattctttgattgaaatattttaccaagatccaaaagcaattcatagagcgtgggttacgttatttccccaggtatacaaaagtattccaaagaatgaaaaatacgggtttgttagatctatcattacattgctttctaaaccttatcataccagacaaatttcctctaggacaaatgtgattaatatgcttttggacagtataagtaaaattgaatctttagaattaccccctcatttggtcaaatacttggcgatatcttacaacgcttggtatcaatctattaacatcttggaatccattcaaagcaatactagcatcgacaatacaaaaattatcgaagccaacgaagatgcgttattagaattatacgtcaatttacaagaagaagacatgttttatggtctttggagacgtagagcaaaatacacagagactaacattggtttatcttatgaacaaattggcctttgggacaaagctcaacaactttatgaagtggcacaggtcaaagctcgtagtggtgccttgccctactctcagtctgagtatgcattatgggaagataactggatacagtgtgctgaaaaattacaacattgggacgtattaactgaattagcgaagcatgaagggttcacggacttattattagaatgtggttggcgtgttgctgattggaacagtgatcgtgatgcacttgagcaaagtgtaaaaagcgttatggacgttccaactccaagaaggcaaatgtttaagacctttttggctcttcaaaatttcgcagaaagcagaaaaggagatcaagaagttagaaagttgtgcgatgaaggaatacaattaagtttgataaagtgggtgtctttaccaattagatatacaccagctcataagtggttgttacatgggtttcaacagtacatggaatttttggaagcgacacagatatatgctaacttgcatacaacaacagtacagaatttggattctaaagcccaagagattaagcgcatcttgcaagcttggagagaccgtttgccaaacacatgggatgatgtcaatatgtggaatgacttggtaacatggagacaacatgcattccaggttattaacaacgcatatctcccattaataccggcacttcaacaaagtaacagtaatagcaatattaatactcatgcatataggggatatcatgaaattgcctgggtaatcaacaggtttgcacatgttgcaaggaagcacaacatgcctgacgtgtgtatcagtcagttagcacgtatttacaccttaccgaatatagaaattcaggaggctttcttgaagttaagggagcaagctaaatgtcattaccaaaacatgaacgaattaacaacgggtttggatgttattagtaatactaatttggtttactttggtactgtccaaaaagctgaattcttcacattgaagggtatgtttttgtctaaattacgcgcatatgaagaggcaaatcaagcctttgcaacagctgttcagatagacttgaacttggctaaagcatgggcccaatggggtttcttcaatgaccgtcgtttgagtgaagagccaaacaacattagttttgctagtaatgcaataagctgttatttacaagccgccggcttgtataagaactccaagattagggagttattgtgcaggattttatggctcatcagtatagatgatgcttctggcatgctcacaaacgcatttgactcctttagaggcgaaatacccgtttggtactggattactttcattcctcaattattaacctctttatctcataaggaggccaatatggttcgtcatatcttaatcagaattgctaaaagttatcctcaagctcttcacttccaattaagaacgacaaaggaagatttcgccgttatccaaagacagacaatggctgttatgggggataaaccagatacaaacgatagaaatggaaggcgccagccttgggaatatttacaagagttaaacaatattttgaagacagcttatccattgttggccttatccttagagtctcttgttgcccaaataaacgaccgtttcaaatctactactgacgaagatcttttcaggttgataaatgtcttattgatcgatggaacgttgaactacaatcgcttaccatttcctaggaaaaatccaaaacttcctgaaaatacagaaaaaaatttggtcaaattttctacaactttgttggcgccttatataagaccaaagttcaatgccgactttattgacaataaaccggattacgaaacttatatcaagagattacgttactggagaaggaggttggaaaacaagcttgatagagcatccaaaaaagaaaatttggaagtattatgtccacatttaagcaacttccatcaccaaaaattcgaggatattgaaattcctggccagtatcttttgaacaaggataataatgttcactttattaaaattgccagatttttacccacggtcgattttgttcgcggaacacattcttcttataggcgtttaatgattagaggccatgatggcagtgtacattcttttgctgttcaatatccagctgttcgccattccagaagagaagaaaggatgtttcaattgtacagattattcaacaagtctttatccaagaatgtggaaacaagacgtcgcagtatacagttcaatttaccaatagcaatcccgttatctccacaagtccgtatcatgaatgatagtgtttcttttactacccttcatgaaattcacaatgaattttgcaagaaaaaaggatttgacccggatgatatccaagattttatggcagataaattgaacgcagcgcatgatgatgctttacctgcgccagatatgaccatattgaaagttgaaattttcaattctattcaaacaatgtttgtaccatccaatgttttaaaagaccattttacctctttgtttactcaatttgaagatttctggttattccgtaaacaatttgcgtctcaatacagttcttttgtcttcatgtcttacatgatgatgatcaataaccgtactcctcacaaaatccatgttgacaaaacctctggtaatgtatttactttagaaatgttacccagtagatttccatatgaaagggtgaaaccattgttgaagaatcatgacttaagtcttccaccagattctccgatatttcataataatgaaccagttccattcagattgacgcctaatattcaatctttgataggtgattctgctttagaaggtatatttgcggtaaatttatttaccatatctcgtgcattaattgaacctgataatgaattgaacacatacttggcccttttcatccgtgacgagatcatatcttggtttagcaaccttcacagaccaatcattgaaaatccacagttacgtgagatggttcaaaccaacgttgacttgattattagaaaggtggcacaattgggccatttgaattctacacctacagtcacaacccagttcatcttggactgtattggcagcgctgtcagtccaagaaacttagcaagaacagacgtgaacttcatgccatggttctga

SEQ ID NO: 5037 - DNA, 558 bp, Saccharomyces cerevisiae
atgaacatcagtggcaccttaaatacgctccggttgctttataacccatcactgtgtaagcctagtctagttgtccccacttttaacgatcttcctataccaatccacgattctataaaggccgtggtcttggataaggacaactgcatcgccttccctcatgatgacaaaatatggccagattacttgcaacactgggaaaccttaaggtcgaaatactctaacaaagcactcttgattgttagcaataccgccggttccaattctgataaggactattcgcaagcaaaacttttggaagataagacaggtatacctgttttgcggcactctacaaagaaaccaggttgtcacaacgaaatattagattatttttatagaaacaaaaccataacaaatccaaaagaggttgctgttgttggagataggctttttactgacatcttgatggcaaacctaatgggttcatacggggtgtggattcgagatggtgttaaagtttcggcaaatcctctctccaagttcgaaaaaaaattatacaactttttgggattttga

SEQ ID NO: 5038 - DNA, 558 bp, Artificial Sequence
  Description of Artificial Sequence: Synthetic polynucleotide
atgaacatcagtggcaccttaaatacgctccgtttgctttataacccatctttatgtaagcctagtttggttgtccccacttttaacgatcttcctataccaatccacgattctataaaggccgtggtcttggataaggacaactgcatcgccttccctcatgatgacaaaatatggccagattacttgcaacactgggaaaccttaaggtccaaatactctaacaaagcactcttgattgttagcaataccgccggttccaattctgataaggactattctcaagcaaaacttttggaagataagacaggtatacctgttttgagacactctacaaagaaaccaggttgtcacaacgaaatattagattatttttatagaaacaaaaccataacaaatccaaaagaggttgctgttgttggagataggctttttactgacatcttgatggcaaacttgatgggttcttacggggtgtggattagagatggtgttaaagtttctgcaaatcctctctccaagttcgaaaaaaaattatacaactttttgggattttga

SEQ ID NO: 5039 - DNA, 1008 bp, Saccharomyces cerevisiae
atgcaaactgtgttgaaatatttgttgcttattatgtgtggaagcttttgtgcttcggaggaattgcaaaaccagaccaatgttcctgcaatattcttctcttacaaactaactcccggtattttaaagtatcaagaggattatgatagggctgtgactttaccaagagacacctttattgaagcggctgagaaattcttaggtgtatgtaatgctgacacttatgtgtttattaatcaaccaggcctgaggaaattggacttcttggaatttgaaacagagtttgtttcgttacagagatatataagacggagttcaaccgcgattaagttcgaaaaggtagacctattgcctcaagatttatactatgatcttgcagagtttgtaaaggagtattgtaacgtagaccaggtgttgaacttacgaggtaataatacagaagatttccagccctttattgatagcgaaaaaagagtgattataatagagtaccctaagttaccagaggacactaatgaacgtaaagaagcattccgccattatgacaagtatttgaggactatactggcgcagattccgtcgccagaacaaaatgtcatttacacctcgttaaacccaggaactacgctggctcacgagtcgatcatccctatccaaatatttccagatatctttgacataaaatccagagtgggtgaagtggaacaaaataatagagttttggatgtgcctcgtctgtcgtttaatgactatactccacgattttcagagccaccttcggagtatgtctcaatatttgattcacaattaattgagaataacagaggtttattacagctgattttcacaattttggttgggtatattcttattcagttttttttcacaaaaaaaactattgtagatgagaagattactaataaaaaggacaacgtgaaacagacgtcaccacaactgctcaaaaaagtgcaagagatccagaaaaagccatcccagcaagtatcttga

SEQ ID NO: 5040 - DNA, 1008 bp, Artificial Sequence
  Description of Artificial Sequence: Synthetic polynucleotide
atgcaaactgtgttgaaatatttgttgcttattatgtgtggaagcttttgtgcttctgaggaattgcaaaaccagaccaatgttcctgcaatattcttctcttacaaattaactcccggtattttaaagtatcaagaggattatgatagggctgtgactttaccaagagacacctttattgaagcggctgagaaattcttaggtgtatgtaatgctgacacttatgtgtttattaatcaaccaggcttgaggaaattggacttcttggaatttgaaacagagtttgtttctttacagagatatataagaagaagttctaccgcgattaagttcgaaaaggtagacttgttgcctcaagatttatactatgatcttgcagagtttgtaaaggagtattgtaacgtagaccaggtgttgaacttaagaggtaataatacagaagatttccagccctttattgatagcgaaaaaagagtgattataatagagtaccctaagttaccagaggacactaatgaacgtaaagaagcattccgccattatgacaagtatttgaggactatattggcgcagattccgtctccagaacaaaatgtcatttacaccagtttaaacccaggaactacgttggctcacgagagtatcatccctatccaaatatttccagatatctttgacataaaatccagagtgggtgaagtggaacaaaataatagagttttggatgtgcctcgtttatcttttaatgactatactccaagattttctgagccaccttctgagtatgtcagtatatttgattctcaattaattgagaataacagaggtttattacagttgattttcacaattttggttgggtatattcttattcagttttttttcacaaaaaaaactattgtagatgagaagattactaataaaaaggacaacgtgaaacagacgtctccacaattgctcaaaaaagtgcaagagatccagaaaaagccatcccagcaagtatcttga

SEQ ID NO: 5041 - DNA, 3243 bp, Saccharomyces cerevisiae
atgacgacgaagccacaaaatagtaagcagggtttagccgaaggagagatggatgtgagttcacttttcaagagaacggaagttattgggcgagggaaatttggtgtggtttataagggctataacgtgaagactggacgagtgtatgctatcaaagtcttaaatttagattctgattctgacgaggtggaggatgtgcagcgagaaattcagtttttggcctccttgaaacagatttccaatatcacgcggtattatgggtcgtatttgaaagacacaagcctttggatcataatggaacactgcgctggtggttcactgcgttcgttgttaaggccaggcaaaatcgatgaaaagtacattggggttattatgagagaactgcttgtagcattaaaatgcattcataaagataacgtcattcatcgagatatcaaagcagcaaacgttctgatcactaacgaaggtaatgttaaactatgcgattttggtgtcgctgcacaagtaaaccaaacttctttacgacgtcaaactatggctgggaccccctactggatggctccagaagtgatcatggaaggcgtttattacgacactaaagtagatatatggtctttaggtattacaacgtacgagattgccaccggaaatccgccatactgcgatgtggaggccctaagggcaatgcaactaatcatcaaatcgaaaccaccgaggcttgaggacagatcatacagtacatctttgaaagaatttattgcgctttgtcttgatgaggatccaaaggagagattgtcagcagacgatcttttaaaatcaaaatttatcagggcccacaaggcgacgccaacgtccattttgaaagaactaatatcacgatatctactatttagggacaagaataaaaacaaatataaaatagagggcagtataccggaaaatgagccatcaaaacccagtgaagctccaaaaccatcacaaaatggcgggggtgatgaagcacaaaagtcaatagcatcaaatgataatgaaattaagagagtgaacgaaggcgatgtggaaatgaaatgggattttgattcattgagttcgtcggattatattattgaaaataatatcaacctcgatgctttggctgaggacaacaacgagtgggctactgcccaacatgacctgttcaactatgcataccctgacgaagattcttattactttgaccctacaagtcataatactagaccctttgtttatcaagggacaacgataggaaagggctatcctggtacaatagctcaaaattctactttgaatgcaccagtaacaaataactatacgaactcaaaatacccttccaaaatggtagctggaactacaaacacctctggaacacatacggccggtccaatgacatcatctaagaggctggaaagtaaggctccaaaacaattacttgaactttttgaagacaatgaaattattactgctgaaaatgatgtcaatacagaagctcctaaaataagcaaatccatttcatctctaaatgctggtaatagttcacgagatgatttcattccctcaatatccaacgaggtcaacggaaatatcaataataataaaatgcgaccacaccttccacctttatccagtgggaacaattattatagccagagtacacctgctttgccgctactccaaacaaaatttaacaagacgtcaaagggccctccaacaagtggattaactactgctccaacgtctattgaaatagaaattcctgaagaactaccgaatagtgctctaccaacgcctgcgagcgcagatccggttttaataccaagcacaaaggccaggtcatctacagtgacggctggcactccttcgtcatctagctcaatacaatataaatcaccttcaaacgtgcccaggcggttgacagtcagtaacaataggccagaacattgcccaagcaccataacaaatcaaaaattggggtccgcagttgcttctaattccggaatcagctccactccgaacaacagtaataactataacaacaacactgatagtgagaactcaagaggaagcagcggtagtaacactgcaaatagcacacaaatgggcataaccaatccaggtaatgtaacaaagttatctactcataaggcttcttcaccctcaaggccactatttggagttggaacttctcccaatagaaagcctgccggttccccaacccaaaacattggtcataattctactcacacgaacctcgcgcctcctcctacgatgaaaccaatggccaatagcaaagataacaaggacattctcttgcaacctctgaacagcatacctagttcttctacacttaacactattagtggtaatagcagcaataatttaacctcatcaaactacttttccaacgaaaaggaaggctcaagggtcaatggtgactttaaacgcaacaacccaaacttaaaactacaaatgccactacctacacctgttgtgagaaataaacttcttgatccaaatacagcaacctcacagaataacaatggcatgccggggagcgctggcatatccacgaacgaaaatattaatcaatttggatttaacacaagcagtgcgtccaacatccctgtctcaatgactccaattagtgagaaacacattgattttgggggcaagatcaagagaagtcaaagcatttctaacaggaagaactcttctgcctcggaacacccattgaatattcttggctcatctgtttccggcaatgtttccggtatcggtaacaacaatgttggctctaacaacaacagcggccctaataacagtgttcctctttctgctaatacaggaaacactactatcaaagccaattctacgactatcgcaacttcaagttctgccgcggcatcaacgactgcaccaatttcacaacagactattccatccggaacacaattcaatcatattctgagttccgccgcaacagctgcaaactcggttaattctttaggctttggcatgtgtcctcctccacagagtttacaaatggaaatgttcttggacttagaatcgtttctgccaggaaaacagaggcgggtagacaggaaaccccaggttctgaaagaactggaaaatcttttacaaatgttcgaagaaggtttgccctgcattgaacacgctttaaaggaacaacttatttcaacgcctatcaaggataatgagcattaa

SEQ ID NO: 5042 - DNA, 3243 bp, Artificial Sequence
  Description of Artificial Sequence: Synthetic polynucleotide
atgacgacgaagccacaaaatagtaagcagggtttagccgaaggagagatggatgtgagttctcttttcaagagaacggaagttattgggcgtgggaaatttggtgtggtttataagggctataacgtgaagactggaagagtgtatgctatcaaagtcttaaatttagattctgattctgacgaggtggaggatgtgcagagggaaattcagtttttggcctccttgaaacagatttccaatatcacgagatattatgggtcttatttgaaagacacaagcctttggatcataatggaacactgcgctggtggttctttacgttctttgttaaggccaggcaaaatcgatgaaaagtacattggggttattatgagagaattgcttgtagcattaaaatgcattcataaagataacgtcattcatagagatatcaaagcagcaaacgttttgatcactaacgaaggtaatgttaaattatgcgattttggtgtcgctgcacaagtaaaccaaacttctttaagacgtcaaactatggctgggaccccctactggatggctccagaagtgatcatggaaggcgtttattacgacactaaagtagatatatggtctttaggtattacaacgtacgagattgccaccggaaatccgccatactgcgatgtggaggccttaagggcaatgcaattgatcatcaaatctaaaccaccgaggcttgaggacagatcttacagtacatctttgaaagaatttattgcgctttgtcttgatgaggatccaaaggagagattgagtgcagacgatcttttaaaatctaaatttatcagggcccacaaggcgacgccaacgtccattttgaaagaattgatatctagatatttactttttagggacaagaataaaaacaaatataaaatagagggcagtataccggaaaatgagccatctaaacccagtgaagctccaaaaccatctcaaaatggcgggggtgatgaagcacaaaagagtatagcatctaatgataatgaaattaagagagtgaacgaaggcgatgtggaaatgaaatgggattttgattctttgagttcttctgattatattattgaaaataatatcaacctcgatgctttggctgaggacaacaacgagtgggctactgcccaacatgaccttttcaactatgcataccctgacgaagattcttattactttgaccctacaagtcataatactagaccctttgtttatcaagggacaacgataggaaagggctatcctggtacaatagctcaaaattctactttgaatgcaccagtaacaaataactatacgaactccaaatacccttccaaaatggtagctggaactacaaacacctctggaacacatacggccggtccaatgacatcttctaagaggttagaaagtaaggctccaaaacaattacttgaactttttgaagacaatgaaattattactgctgaaaatgatgtcaatacagaagctcctaaaataagcaaatccatttcttctttgaatgctggtaatagttctagagatgatttcattccctccatatccaacgaggtcaacggaaatatcaataataataaaatgagaccacaccttccacctttatccagtgggaacaattattatagccagagtacacctgctttgccgttgctccaaacaaaatttaacaagacgtccaagggccctccaacaagtggattaactactgctccaacgtctattgaaatagaaattcctgaagaattaccgaatagtgctttgccaacgcctgcgagcgcagatccggttttaataccaagcacaaaggccaggtcttctacagtgacggctggcactccttcttcttctagcagtatacaatataaatctccttccaacgtgcccaggagattgacagtcagtaacaataggccagaacattgcccaagcaccataacaaatcaaaaattggggtccgcagttgcttctaattccggaatcagctccactccgaacaacagtaataactataacaacaacactgatagtgagaactctagaggaagcagcggtagtaacactgcaaatagcacacaaatgggcataaccaatccaggtaatgtaacaaagttatctactcataaggcttcttctccctctaggccattatttggagttggaacttctcccaatagaaagcctgccggttccccaacccaaaacattggtcataattctactcacacgaacctcgcgcctcctcctacgatgaaaccaatggccaatagcaaagataacaaggacattctcttgcaacctttgaacagcatacctagttcttctacacttaacactattagtggtaatagcagcaataatttaacctcttccaactacttttccaacgaaaaggaaggctccagggtcaatggtgactttaaacgcaacaacccaaacttaaaattacaaatgccattgcctacacctgttgtgagaaataaacttcttgatccaaatacagcaacctctcagaataacaatggcatgccggggagcgctggcatatccacgaacgaaaatattaatcaatttggatttaacacaagcagtgcgtccaacatccctgtctccatgactccaattagtgagaaacacattgattttgggggcaagatcaagagaagtcaaagcatttctaacaggaagaactcttctgccagtgaacacccattgaatattcttggctcttctgtttccggcaatgtttccggtatcggtaacaacaatgttggctctaacaacaacagcggccctaataacagtgttcctctttctgctaatacaggaaacactactatcaaagccaattctacgactatcgcaacttctagttctgccgcggcaagcacgactgcaccaatttctcaacagactattccatccggaacacaattcaatcatattttaagttccgccgcaacagctgcaaactctgttaattctttaggctttggcatgtgtcctcctccacagagtttacaaatggaaatgttcttggacttagaaagttttttaccaggaaaacagaggcgtgtagacaggaaaccccaggttttgaaagaattggaaaatcttttacaaatgttcgaagaaggtttgccctgcattgaacacgctttaaaggaacaacttatttctacgcctatcaaggataatgagcattga

SEQ ID NO: 5043 - DNA, 2559 bp, Saccharomyces cerevisiae
atgacctcgattcaggagcgaggcacaagcgctcatctgcattcgcttaaagaaggtgaggctagtgatcgttccagcgagatgcttcctaaacaaagaagtatcataggatcccacgtgcaacgtccaccgtctcaaacaactttaggaaggtcaagggctggaagcaatacaatgaataaagtttcaggcttagatattgctcgaagaccaagtgagaatttattatcaaacatgaactgtagcgacaacggcaatgggggaaatatgctaaattcattcgttaactcggctttaccaccgccaaaagtcaaccctgctcaaacaagacgtgaacgtcccgcttcaaatagctcaataggtaccaagactaccgaggtattttcatccacttctgcatcttcctccttgggagataccagcgatgagggagaaggcagtgatgccgacaaatctaaaataaatacttttcccagcatattgatggaaaaggctactcaaggtagaggcgctgatggaaatggaatgagaagcgcaagcaataataccattgtggaagcaactacggacggttccaaaatggcactgcaaaaaagcatgtcgtttgatgatacagccgcagagaaaactatgaataaatctagacattcttaccaagaacagttctcctcgaagaaaagccagtcatctttactgaacagcaagcaaagatcacgtgctaaatcgcaaacatgctcgtctacgggttataacaacagcagcattctgaaaacgtttggcataagctccaaaatttctaattcaagtgatcggatagaggcttcgtcattagaatttaacgttccatctcagaaacctttgaattgcaagccattaactccgtctcagaaatacagacttcgtaaagagcaatcggagatgaatttaagaaatacaatcaaaagaaaagagaaattttatgatagtcaagaacaaattcttgagttacaagagggagacgttgatgattcgttgatttggaacgttcctatggcatcattatctactaattcatttctagcgtctgctaagcccgatgatatgaataacttggctggcaagaatgacttatcagaatataccggaggtttggtaaatgataactctgaaatttcttatacaaaacaaaatcataggtactcgaacatctcttttgcgagtacaacatcaaacgcctcattattggactttaatgagatgcctacgtctccgattccaggtttgaacaaagtaactgattttcagttcattcaagacacaaccaagagtctagcctctgtttatttgcattcttccaataggctttcaagatctaagctgtccgaaagaacaaagtcttccgatttcttgccaattgaactaaaagaagctcaaaatcaaggcatggaagatttgatacttgtctcggagaacaaactagatgtggtcagccattcaagaccgagttggttaccacccaaggatcgccaggaaaaaaagcttcatgaaaggcaaattaacaaaagcatgagtgttgcttcccttgaccaactaggaaaaaataaagacagagaagaaaagttgattagagatgaaacaaataggcaaaaatatgtgttattattggacagagatataactagaaactcctccttacaaagcctaagtaaaatggtttgggacactccatttagtgacgaaactaggtcaacaatttacagcgaaattttacagagcaagactaggtttattaccaaaaactatattcaaccatttcatgagctacaggagcttttaacaaaaatgggagactttcctaaaaacaaggaaattgaaatatcgcagctaatcgaaacaagtttgaggcgaaaagtgagcggtttacatgatatatgtcctgatttgatgcttttattgaagataaaatctatctcatcacagggtatagtcaccggtgatgaactccttttccatcatttcttggtgagtgaatcatttcagaacctggggctaaacgagatttggaatattgttaatttagtacaaatgacgtgttttaatgatctttgtaaagaaaagttcgatgcaaaggttttagaacgtaagggtgtcgtagccggttatttatcgcaaaacgaggagttcaaggatgaatttaatacggagtgtataaactctaccacctggtggaacatcctagaacgtattgatcataagctttttatgtggatcatggatattatagtagtcaacaattcccagagctacaaaaatagcccaatcaacgaagatgagtttgttaacaaggattgggaatattaccgctcgaagaaagtggtaataaactacaagatcttgatttcatttgcattaaatgtattgttaaattaccactttggattcactgatttaagaagtctttgtaacgtgaatgaccagagattttgcattccagtattcatcaatgatgaattcgtagacgcagatactgtaaatgccgtgttcatcaagaaatgggcgcattactacaagaagttttga

SEQ ID NO: 5044 - DNA, 2559 bp, Artificial Sequence
  Description of Artificial Sequence: Synthetic polynucleotide
atgacctctattcaggagagaggcacaagcgctcatttgcattctcttaaagaaggtgaggctagtgatcgttccagcgagatgcttcctaaacaaagaagtatcataggatcccacgtgcaacgtccaccgtctcaaacaactttaggaaggagtagggctggaagcaatacaatgaataaagtttctggcttagatattgctagaagaccaagtgagaatttattatctaacatgaactgtagcgacaacggcaatgggggaaatatgttgaattctttcgttaactctgctttaccaccgccaaaagtcaaccctgctcaaacaagacgtgaacgtcccgcttctaatagcagtataggtaccaagactaccgaggtattttcttccacttctgcatcttcctccttgggagataccagcgatgagggagaaggcagtgatgccgacaaatctaaaataaatacttttcccagcatattgatggaaaaggctactcaaggtagaggcgctgatggaaatggaatgagaagcgcaagcaataataccattgtggaagcaactacggacggttccaaaatggcattacaaaaaagcatgagttttgatgatacagccgcagagaaaactatgaataaatctagacattcttaccaagaacagttctcctccaagaaaagccagtcttctttattaaacagcaagcaaagatctcgtgctaaatctcaaacatgctcttctacgggttataacaacagcagcattttgaaaacgtttggcataagctccaaaatttctaatagtagtgatagaatagaggcttcttctttagaatttaacgttccatctcagaaacctttgaattgcaagccattaactccgtctcagaaatacagacttcgtaaagagcaaagtgagatgaatttaagaaatacaatcaaaagaaaagagaaattttatgatagtcaagaacaaattcttgagttacaagagggagacgttgatgattctttgatttggaacgttcctatggcatctttatctactaattcttttttggcgtctgctaagcccgatgatatgaataacttggctggcaagaatgacttatctgaatataccggaggtttggtaaatgataactctgaaatttcttatacaaaacaaaatcataggtactctaacatctcttttgcgagtacaacaagtaacgcctctttattggactttaatgagatgcctacgtctccgattccaggtttgaacaaagtaactgattttcagttcattcaagacacaaccaagagtttggcctctgtttatttgcattcttccaataggctttctagatctaagttatccgaaagaacaaagtcttccgatttcttgccaattgaattgaaagaagctcaaaatcaaggcatggaagatttgatacttgtcagtgagaacaaattggatgtggtcagccattccagaccgagttggttaccacccaaggatcgccaggaaaaaaagcttcatgaaaggcaaattaacaaaagcatgagtgttgcttcccttgaccaattaggaaaaaataaagacagagaagaaaagttgattagagatgaaacaaataggcaaaaatatgtgttattattggacagagatataactagaaactcctccttacaaagcttaagtaaaatggtttgggacactccatttagtgacgaaactaggtctacaatttacagcgaaattttacagagcaagactaggtttattaccaaaaactatattcaaccatttcatgagttacaggagcttttaacaaaaatgggagactttcctaaaaacaaggaaattgaaatatctcagttaatcgaaacaagtttgaggagaaaagtgagcggtttacatgatatatgtcctgatttgatgcttttattgaagataaaatctatctcttctcagggtatagtcaccggtgatgaactccttttccatcatttcttggtgagtgaaagttttcagaacttggggttgaacgagatttggaatattgttaatttagtacaaatgacgtgttttaatgatctttgtaaagaaaagttcgatgcaaaggttttagaacgtaagggtgtcgtagccggttatttatctcaaaacgaggagttcaaggatgaatttaatacggagtgtataaactctaccacctggtggaacatcttggaacgtattgatcataagctttttatgtggatcatggatattatagtagtcaacaattcccagagctacaaaaatagcccaatcaacgaagatgagtttgttaacaaggattgggaatattaccgctctaagaaagtggtaataaactacaagatcttgatttcctttgcattaaatgtattgttaaattaccactttggattcactgatttaagaagtctttgtaacgtgaatgaccagagattttgcattccagtattcatcaatgatgaattcgtagacgcagatactgtaaatgccgtgttcatcaagaaatgggcgcattactacaagaagttttga

SEQ ID NO: 5045 - DNA, 984 bp, Saccharomyces cerevisiae
atgtcttcactggttactcttaataacggtctgaaaatgcccctagtcggcttagggtgctggaaaattgacaaaaaagtctgtgcgaatcaaatttatgaagctatcaaattaggctaccgtttattcgatggtgcttgcgactacggcaacgaaaaggaagttggtgaaggtatcaggaaagccatctccgaaggtcttgtttctagaaaggatatatttgttgtttcaaagttatggaacaattttcaccatcctgatcatgtaaaattagctttaaagaagaccttaagcgatatgggacttgattatttagacctgtattatattcacttcccaatcgccttcaaatatgttccatttgaagagaaataccctccaggattctatacgggcgcagatgacgagaagaaaggtcacatcaccgaagcacatgtaccaatcatagatacgtaccgggctctggaagaatgtgttgatgaaggcttgattaagtctattggtgtttccaactttcagggaagcttgattcaagatttattacgtggttgtagaatcaagcccgtggctttgcaaattgaacaccatccttatttgactcaagaacacctagttgagttttgtaaattacacgatatccaagtagttgcttactcctccttcggtcctcaatcattcattgagatggacttacagttggcaaaaaccacgccaactctgttcgagaatgatgtaatcaagaaggtctcacaaaaccatccaggcagtaccacttcccaagtattgcttagatgggcaactcagagaggcattgccgtcattccaaaatcttccaagaaggaaaggttacttggcaacctagaaatcgaaaaaaagttcactttaacggagcaagaattgaaggatatttctgcactaaatgccaacatcagatttaatgatccatggacctggttggatggtaaattccccacttttgcctga

SEQ ID NO: 5046 - DNA, 984 bp, Artificial Sequence
  Description of Artificial Sequence: Synthetic polynucleotide
atgtcttctttggttactcttaataacggtttgaaaatgcccttggtcggcttagggtgctggaaaattgacaaaaaagtctgtgcgaatcaaatttatgaagctatcaaattaggctaccgtttattcgatggtgcttgcgactacggcaacgaaaaggaagttggtgaaggtatcaggaaagccatctccgaaggtcttgtttctagaaaggatatatttgttgtttccaagttatggaacaattttcaccatcctgatcatgtaaaattagctttaaagaagaccttaagcgatatgggacttgattatttagacctttattatattcacttcccaatcgccttcaaatatgttccatttgaagagaaataccctccaggattctatacgggcgcagatgacgagaagaaaggtcacatcaccgaagcacatgtaccaatcatagatacgtacagagctttggaagaatgtgttgatgaaggcttgattaagtctattggtgtttccaactttcagggaagcttgattcaagatttattacgtggttgtagaatcaagcccgtggctttgcaaattgaacaccatccttatttgactcaagaacacttggttgagttttgtaaattacacgatatccaagtagttgcttactcctccttcggtcctcaaagtttcattgagatggacttacagttggcaaaaaccacgccaactttattcgagaatgatgtaatcaagaaggtctctcaaaaccatccaggcagtaccacttcccaagtattgcttagatgggcaactcagagaggcattgccgtcattccaaaatcttccaagaaggaaaggttacttggcaacttggaaatcgaaaaaaagttcactttaacggagcaagaattgaaggatatttctgcattgaatgccaacatcagatttaatgatccatggacctggttggatggtaaattccccacttttgcctga

SEQ ID NO: 5047 - DNA, 645 bp, Saccharomyces cerevisiae
atgagcgacaagatatcctttctacctcccgaacccatccaactacttgacgaagactccacggagcctgaactcgacattgactcacaacaagaaaatgagggacccatcagtgcgtcaaacagcaatgatagcactagccatagtaatgattgcggtgccacaattaccagaacaagacctagacgaagcagttctatcaatgcaaactttagttttcaaaaggctcatgtcagcgattgcaccatagtcaatggcgaccatggaacaaagtttgctgtctggagaattaccgtatttcttgaacccaacttgaaggcttttgcggccaagagggaaagctataaaatccaaacctataaacgatactccgatttcgtcagattacgagagaatttgctcacaagaatcaagacagcgaaacctgagaaacttaactgtttgcagattccacaccttcccccttcagtgcagtggtacagttcttggaaatatcaagaagtgaatctgaacaaggactggctggcaaaaagacagagagggctcgagtacttcctcaatcacatcatccttaacagcagcctcgtagaaatgaccaaagatatactcatacagtttctagagccttcaaaacgagttgcatag

SEQ ID NO: 5048 - DNA, 645 bp, Artificial Sequence
  Description of Artificial Sequence: Synthetic polynucleotide
atgagcgacaagatatcctttttacctcccgaacccatccaattacttgacgaagactccacggagcctgaactcgacattgactctcaacaagaaaatgagggacccatcagtgcgtccaacagcaatgatagcactagccatagtaatgattgcggtgccacaattaccagaacaagacctagaagaagcagttctatcaatgcaaactttagttttcaaaaggctcatgtcagcgattgcaccatagtcaatggcgaccatggaacaaagtttgctgtctggagaattaccgtatttcttgaacccaacttgaaggcttttgcggccaagagggaaagctataaaatccaaacctataaaagatactccgatttcgtcagattaagagagaatttgctcacaagaatcaagacagcgaaacctgagaaacttaactgtttgcagattccacaccttcccccttctgtgcagtggtacagttcttggaaatatcaagaagtgaatttgaacaaggactggttggcaaaaagacagagagggctcgagtacttcctcaatcacatcatccttaacagcagcctcgtagaaatgaccaaagatatactcatacagtttttggagccttccaaaagagttgcatga

SEQ ID NO: 5049 - DNA, 1029 bp, Saccharomyces cerevisiae
atgataaaacatatagtttcgccattcaggacgaattttgttggcatcagcaagtccgtgctgtcaaggatgattcatcacaaggttacaatcataggttctggccccgctgcccacaccgctgctatatacttggcaagagcagagatgaagcccacattatatgagggaatgatggccaacggaattgctgctggtggccaattgacaacaaccaccgatatcgaaaatttcccagggtttcctgaatcgttgagtggcagtgaactgatggagaggatgaggaaacaatctgccaagtttggcactaacataattaccgagactgtctctaaagtcgatttatcttcaaaaccattcagattatggaccgaatttaatgaggatgcagagcctgtgaccactgatgctataatcttggccacgggtgcttccgctaagagaatgcatttaccaggggaggaaacctactggcagcagggaatatctgcctgtgctgtatgtgatggtgcagtccctatctttagaaacaagccattggccgttattggtggtggtgactctgcgtgtgaggaagcggaatttcttacgaagtatgcgtcgaaagtatatatattagtaagaaaggatcattttcgtgcatctgtaataatgcagagacgaattgagaaaaatccaaacatcattgttttgttcaacacagttgcattagaagctaagggtgatggtaagttattgaatatgttgagaattaagaatactaaaagtaatgtggagaacgatttagaagtaaatggactattttacgcaataggtcacagccctgccacagatatagttaaaggacaagtagatgaagaagagacggggtatataaaaactgtgcctggatcgtctctgacttctgtgccaggtttttttgctgcaggtgacgttcaggactctaggtatagacaagcagttacttctgctggttccggatgcattgctgctttggatgcagaacggtacctaagtgcccaagagtaa

SEQ ID NO: 5050 - DNA, 1029 bp, Artificial Sequence
  Description of Artificial Sequence: Synthetic polynucleotide
atgataaaacatatagtttctccattcaggacgaattttgttggcatcagcaagtccgtgctttctaggatgattcatcacaaggttacaatcataggttctggccccgctgcccacaccgctgctatatacttggcaagagcagagatgaagcccacattatatgagggaatgatggccaacggaattgctgctggtggccaattgacaacaaccaccgatatcgaaaatttcccagggtttcctgaatctttgagtggcagtgaattgatggagaggatgaggaaacaatctgccaagtttggcactaacataattaccgagactgtctctaaagtcgatttatcttctaaaccattcagattatggaccgaatttaatgaggatgcagagcctgtgaccactgatgctataatcttggccacgggtgcttccgctaagagaatgcatttaccaggggaggaaacctactggcagcagggaatatctgcctgtgctgtatgtgatggtgcagtccctatctttagaaacaagccattggccgttattggtggtggtgactctgcgtgtgaggaagcggaatttcttacgaagtatgcgtccaaagtatatatattagtaagaaaggatcattttcgtgcatctgtaataatgcagagaagaattgagaaaaatccaaacatcattgttttgttcaacacagttgcattagaagctaagggtgatggtaagttattgaatatgttgagaattaagaatactaaaagtaatgtggagaacgatttagaagtaaatggattattttacgcaataggtcacagccctgccacagatatagttaaaggacaagtagatgaagaagagacggggtatataaaaactgtgcctggatcttctttgacttctgtgccaggtttttttgctgcaggtgacgttcaggactctaggtatagacaagcagttacttctgctggttccggatgcattgctgctttggatgcagaaagatacttgagtgcccaagagtga

SEQ ID NO: 5051 - DNA, 1224 bp, Saccharomyces cerevisiae
atgagtgctgccactgcgactgctgcccctgttcctcctcctgtagggatatccaatcttcccaaccagcgttataaaattgttaatgaagaaggtggtacattcaccgtgatgttatgtggtgagagcggattgggtaaaactacatttattaataccttatttcagactgtcttgaaaagggcagatggtcagcaacaccgccaagaacccatcagaaagactgtagaaatcgacatcacaagagctttgctggaagagaagcatttcgaattacgcgttaatgtcatcgacaccccaggttttggagataacgtgaataacaacaaagcctggcaaccattggtggattttattgatgatcaacacgattcttatatgcgtcaagagcagcaaccgtaccgtactaagaaatttgacttgagagttcatgccgttctgtacttcatcaggcccactggacatggtttaaagccaattgacattgagactatgaagagattgtcaaccagagccaatctgattccagttattgcgaaagctgatacattgactgcccaagaattacaacagttcaagtccagaatcaggcaagtaatagaagctcaagaaattcgtattttcacgcctccattagacgctgattctaaggaagatgccaaaagtggcagtaatccagattctgccgctgttgaacatgcaagacagttgatagaagcaatgccatttgccatagtagggtctgaaaaaaaatttgacaatgggcaaggcactcaggtagttgcaaggaagtatccttggggacttgtggaaatcgaaaacgattctcattgtgatttccgtaagctcagagccctgttactgaggacttatctattagatttgatttctaccacccaagaaatgcattacgaaacatacagaagattaagacttgagggtcacgagaacaccggggaggggaatgaagatttcactcttccagcaattgcaccagcaaggaaattgtcacacaatcctagatacaaagaagaagaaaatgcattgaagaagtatttcactgaccaagtcaaagctgaggagcaaagatttagacaatgggagcaaaacattgttaacgaaagaatcagactgaacggtgacttggaagaaattcaaggaaaggtaaaaaaactagaagagcaggtcaaaagcttgcaagtaaaaaaatcccatttaaaatga

SEQ ID NO: 5052 - DNA, 1224 bp, Artificial Sequence
  Description of Artificial Sequence: Synthetic polynucleotide
atgagtgctgccactgcgactgctgcccctgttcctcctcctgtagggatatccaatcttcccaaccagcgttataaaattgttaatgaagaaggtggtacattcaccgtgatgttatgtggtgagagcggattgggtaaaactacatttattaataccttatttcagactgtcttgaaaagggcagatggtcagcaacaccgccaagaacccatcagaaagactgtagaaatcgacatcacaagagctttgttggaagagaagcatttcgaattacgcgttaatgtcatcgacaccccaggttttggagataacgtgaataacaacaaagcctggcaaccattggtggattttattgatgatcaacacgattcttatatgcgtcaagagcagcaaccgtaccgtactaagaaatttgacttgagagttcatgccgttctttacttcatcaggcccactggacatggtttaaagccaattgacattgagactatgaagagattgtccaccagagccaatttaattccagttattgcgaaagctgatacattgactgcccaagaattacaacagttcaagtccagaatcaggcaagtaatagaagctcaagaaattcgtattttcacgcctccattagacgctgattctaaggaagatgccaaaagtggcagtaatccagattctgccgctgttgaacatgcaagacagttgatagaagcaatgccatttgccatagtagggtctgaaaaaaaatttgacaatgggcaaggcactcaggtagttgcaaggaagtatccttggggacttgtggaaatcgaaaacgattctcattgtgatttccgtaagctcagagccttattattgaggacttatcttttagatttgatttctaccacccaagaaatgcattacgaaacatacagaagattaagacttgagggtcacgagaacaccggggaggggaatgaagatttcactcttccagcaattgcaccagcaaggaaattgtctcacaatcctagatacaaagaagaagaaaatgcattgaagaagtatttcactgaccaagtcaaagctgaggagcaaagatttagacaatgggagcaaaacattgttaacgaaagaatcagattgaacggtgacttggaagaaattcaaggaaaggtaaaaaaattagaagagcaggtcaaaagcttgcaagtaaaaaaatcccatttaaaatga

SEQ ID NO: 5053 - DNA, 1758 bp, Saccharomyces cerevisiae
atgtcccatccgcactcacatagcatatatttgtctgagttgcccgtcaggaaacctcaagccttgggcaatcctcttttgaggaagattcaaagagcttgcagaatgtcacttgctgaaccagacttggcgttgaatcttgacattgctgactacattaatgaaaaacagggcgctgcccctagggatgctgccattgcacttgctaaactgatcaacaatagagaatcgcacgtggcaatattcgcgttatctctattagacgtgcttgtcaagaattgtggatacccattccacttgcaaatttctagaaaggaatttttgaatgaactggtcaagagatttccaggtcacccaccattacgttattctaagattcagagattgattttaactgctattgaagaatggtatcaaacaatttgtaaacactcaagctacaagaatgatatgggttatattagagacatgcaccgtttgttgaaatataagggttatgcattccccaaaatcagtgaatccgacctagcagttttgaagcctagtaatcaattgaagaccgctagtgaaattcaaaaggagcaggaaattgctcaagctgcaaaactcgaagaattgatcaggcgtggtaaacctgaagatttgagggaagctaacaaattaatgaaaatcatggcagggttcaaagaagacaatgccgttcaagctaaacaggctatttccagtgaattgaacaaattgaagcgtaaagccgatttgctgaatgaaatgctggaatcacctgactcacaaaactgggataacgaaactacacaagaacttcacagtgcattaaaggtagctcaaccaaaatttcaaaagatcattgaggaagaacaggaagacgatgcgttagtgcaggatctattgaagtttaatgatacagttaatcaactattggaaaaattcaacttattgaaaaacggtgactccaacgctgcttcgcagatacatccaagtcatgtttctgctccgttacaacaatcttctggtgctttaacgaatgaaatcaacttaatcgatttcaatgatttggacgaagcgccctctcaaggcaacaacaataccaacggcacgggtacaccagcagcagcggaaacatctgtcaatgacttattgggcgatttgaccgatttatctatttcgaacccttcaaccgctaaccaagcatcctttggtctgggaggcgatatcgtgttggggtcctctcaacccgcaccaccagttactactactaacaactcgaacaacactttagatcttttgggactttcaactcctcaatcgccaactaattcccaagcagtaaacagtagtgggttcgatcttttgatgggatttaatccaacaacaggtactactactgcgcccgcaagaaccctagtcaatcagtctcctaacttgaagattgagttcgaaatatctagggagtcaaactcagttataaggataaaatcgttctttacaaacttaagttcgtcaccgatctccaacttagtgttcttattagcagtccctaagtcaatgtctttgaaattgcaaccccaatcgagtaactttatgattggcaacgctaaagatggtatctctcaagaaggtacaattgaaaatgcgccagctaacccttcaaaggctttgaaagtcaagtggaaggtcaactattctgtcaactccacccaagctgaagaaactgctgtttttacgttacctaatgtataa

SEQ ID NO: 5054 - DNA, 1758 bp, Artificial Sequence
  Description of Artificial Sequence: Synthetic polynucleotide
atgtcccatccgcactctcatagcatatatttgtctgagttgcccgtcaggaaacctcaagccttgggcaatcctcttttgaggaagattcaaagagcttgcagaatgtctcttgctgaaccagacttggcgttgaatcttgacattgctgactacattaatgaaaaacagggcgctgcccctagggatgctgccattgcacttgctaaattaatcaacaatagagaatctcacgtggcaatattcgcgttatctttattagacgtgcttgtcaagaattgtggatacccattccacttgcaaatttctagaaaggaatttttgaatgaattggtcaagagatttccaggtcacccaccattacgttattctaagattcagagattgattttaactgctattgaagaatggtatcaaacaatttgtaaacacagtagctacaagaatgatatgggttatattagagacatgcaccgtttgttgaaatataagggttatgcattccccaaaatcagtgaatccgacttggcagttttgaagcctagtaatcaattgaagaccgctagtgaaattcaaaaggagcaggaaattgctcaagctgcaaaactcgaagaattgatcaggcgtggtaaacctgaagatttgagggaagctaacaaattaatgaaaatcatggcagggttcaaagaagacaatgccgttcaagctaaacaggctatttccagtgaattgaacaaattgaagcgtaaagccgatttgttgaatgaaatgttggaatctcctgactctcaaaactgggataacgaaactacacaagaacttcacagtgcattaaaggtagctcaaccaaaatttcaaaagatcattgaggaagaacaggaagacgatgcgttagtgcaggatttattgaagtttaatgatacagttaatcaattattggaaaaattcaacttattgaaaaacggtgactccaacgctgcttctcagatacatccaagtcatgtttctgctccgttacaacaatcttctggtgctttaacgaatgaaatcaacttaatcgatttcaatgatttggacgaagcgccctctcaaggcaacaacaataccaacggcacgggtacaccagcagcagcggaaacatctgtcaatgacttattgggcgatttgaccgatttatctatttccaacccttctaccgctaaccaagcatcctttggtttgggaggcgatatcgtgttggggtcctctcaacccgcaccaccagttactactactaacaactccaacaacactttagatcttttgggactttctactcctcaatctccaactaattcccaagcagtaaacagtagtgggttcgatcttttgatgggatttaatccaacaacaggtactactactgcgcccgcaagaaccttggtcaatcagtctcctaacttgaagattgagttcgaaatatctagggagagcaactctgttataaggataaaatctttctttacaaacttaagttcttctccgatctccaacttagtgttcttattagcagtccctaagtctatgtctttgaaattgcaaccccaaagtagtaactttatgattggcaacgctaaagatggtatctctcaagaaggtacaattgaaaatgcgccagctaacccttctaaggctttgaaagtcaagtggaaggtcaactattctgtcaactccacccaagctgaagaaactgctgtttttacgttacctaatgtatga

SEQ ID NO: 5055 - DNA, 1758 bp, Saccharomyces cerevisiae
atggaggaagtgttccgtttttactcgaactctagaaatatcttcattcataaaagcctttcattaaaaccatccaccattgatgaccccaaaagtggatatggccttttcgtagaaccttcgaagttcaagaatgatgaattgaaaagtgaaactatccaattgctccgaatccctaagcgctgcacgtttaatataaacacacttctggctctcttgggagatgaggacgaattttcttcaaaggaagaatttcaaagaactaatgacaaaattaagattgctcttcgtgaaataatggctcatccgaatttcagtgtgttcctgacagaaacaaatttactcataatttatttcatgatatttcaaactattcgtagtcgttatgagattcccgaaaatatccaatattatttagaaaatgttttaatgagcattgaagtagaaacagccatggattctattgaaaacttagctactgattatggacattatccacagatttttggccttcgagagacgctaaatttatttaaagaactgtttcacgacgtcttgaatttaagtgatatcaaacatctttattctgcaataatttcacgttgtttagagataccagaaagggccgataccaaaagtgaagaattcacggtccattctactttagtccctattgtagattttgccaaccatgaaggcacccaaaaaaatgcttattttgacatcgacccttcaaataatgacgttttacttctattggatacaaaagcggtccaaagtgaactcacaaaacctattgaagttttcattagttactcaccaacagaggatttattttccatgcttgtaacatatggattcaccccagattttagagggaattcccaattttggactgtatcctttgacaggtgctttttaagaaactatgatggaccagataaaactacaaatttaagattgttttacaaatggatgcacataaatccagtggtaccactagttaaatacgagcacaacggaaagactcgctggtttctcaatgacaccacgcctgaatttgatatgcttttgctcccattcattccatcgatagatgatggcaaaattgctcggtgggcgtacgattccacatgtcatttgatgttcacgaaaatccattgtctgataaatcccgaggccaacgaacatgcgttaatgattgcagaaaactaccgctctctcattaaagagaaagagtcaaatggtgacgatttcataaatttaccgccactagcttggtcattgcgttacaaagatacagaaaacgattgtgtacggcaaagacatatatgcagtgaagatgcggtcgctgtacttaaacaagaagaaatgcaagactcaaccaaaaccaaatcccagtttaccagtttctttcgtaaatttttagagtttcgtagatccaaaattattaggcctaccagtgattcaaaagttgcaagcatattataccagcaggaactggaaataattgctgacttagcaaaagctatcgatagcagctctaccatttttttcagcgatctgaatgttacattggacaccgaaccagaacggctcccccctctaaggtttttagatgattacatagagatctctgcggataagcaggagccaagcccaatttgtgaggatctttcttattatacacccagcaggtttactgatttttttcaagaagaggtaagccaatatgcggctttctttcaggatgactag

SEQ ID NO: 5056 - DNA, 1758 bp, Artificial Sequence
  Description of Artificial Sequence: Synthetic polynucleotide
atggaggaagtgttccgtttttactctaactctagaaatatcttcattcataaaagcctttctttaaaaccatccaccattgatgaccccaaaagtggatatggccttttcgtagaaccttctaagttcaagaatgatgaattgaaaagtgaaactatccaattgctcagaatccctaagcgctgcacgtttaatataaacacacttttagctctcttgggagatgaggacgaattttcttccaaggaagaatttcaaagaactaatgacaaaattaagattgctcttcgtgaaataatggctcatccgaatttcagtgtgttcttaacagaaacaaatttactcataatttatttcatgatatttcaaactattcgtagtcgttatgagattcccgaaaatatccaatattatttagaaaatgttttaatgagcattgaagtagaaacagccatggattctattgaaaacttagctactgattatggacattatccacagatttttggccttcgtgagacgttgaatttatttaaagaattatttcacgacgtcttgaatttaagtgatatcaaacatctttattctgcaataatttctcgttgtttagagataccagaaagggccgataccaaaagtgaagaattcacggtccattctactttagtccctattgtagattttgccaaccatgaaggcacccaaaaaaatgcttattttgacatcgacccttccaataatgacgttttacttttattggatacaaaagcggtccaaagtgaactcacaaaacctattgaagttttcattagttactctccaacagaggatttattttccatgcttgtaacatatggattcaccccagattttagagggaattcccaattttggactgtatcctttgacaggtgctttttaagaaactatgatggaccagataaaactacaaatttaagattgttttacaaatggatgcacataaatccagtggtaccattagttaaatacgagcacaacggaaagactcgctggtttctcaatgacaccacgcctgaatttgatatgcttttgctcccattcattccaagtatagatgatggcaaaattgctagatgggcgtacgattccacatgtcatttgatgttcacgaaaatccattgtttgataaatcccgaggccaacgaacatgcgttaatgattgcagaaaactaccgctctctcattaaagagaaagagagcaatggtgacgatttcataaatttaccgccattggcttggtctttgcgttacaaagatacagaaaacgattgtgtaaggcaaagacatatatgcagtgaagatgcggtcgctgtacttaaacaagaagaaatgcaagactctaccaaaaccaaatcccagtttaccagtttctttcgtaaatttttagagtttcgtagatccaaaattattaggcctaccagtgattctaaagttgcaagcatattataccagcaggaattggaaataattgctgacttagcaaaagctatcgatagcagctctaccatttttttcagcgatttgaatgttacattggacaccgaaccagaaaggctcccccctttaaggtttttagatgattacatagagatctctgcggataagcaggagccaagcccaatttgtgaggatctttcttattatacacccagcaggtttactgatttttttcaagaagaggtaagccaatatgcggctttctttcaggatgactga

SEQ ID NO: 5057 - DNA, 639 bp, Saccharomyces cerevisiae
atgaaatataatatagtgcatggaatttgcctattatttgctattacccaagctgtaggggctgtccatttttatgcgaagtccggggaaaccaaatgcttctatgaacacttatcccggggaaacctactgattggggatttagacctatatgtagaaaaggatggtctgtttgaagaggaccctgaatccagtctgacaataactgtcgatgaaacattcgataacgaccatcgtgtcctaaatcaaaaaaactcacacacaggtgatgttacttttacagctttagacacaggtgaacatagattttgcttcactccattctacagcaagaaatcagccacactaagagtattcatcgaactagaaattggcaatgttgaagcgcttgacagcaagaaaaaagaagatatgaattcacttaaggggagggtaggccagttgactcaaaggctatcttctattcgtaaggagcaagacgctatcagagaaaaagaggcagaattcagaaatcaaagtgaatcagctaacagcaagataatgacgtggtctgtgttccaacttctcatattgctgggcacctgtgccttccagctacgctatctcaagaatttctttgtcaaacagaaggtagtataa

SEQ ID NO: 5058 - DNA, 639 bp, Artificial Sequence
  Description of Artificial Sequence: Synthetic polynucleotide
atgaaatataatatagtgcatggaatttgccttttatttgctattacccaagctgtaggggctgtccatttttatgcgaagtccggggaaaccaaatgcttctatgaacacttatccagaggaaacttattgattggggatttagacctttatgtagaaaaggatggtttatttgaagaggaccctgaatccagtttgacaataactgtcgatgaaacattcgataacgaccatcgtgtcttgaatcaaaaaaactctcacacaggtgatgttacttttacagctttagacacaggtgaacatagattttgcttcactccattctacagcaagaaaagtgccacattaagagtattcatcgaattggaaattggcaatgttgaagcgcttgacagcaagaaaaaagaagatatgaattctcttaaggggagggtaggccagttgactcaaaggttatcttctattcgtaaggagcaagacgctatcagagaaaaagaggcagaattcagaaatcaaagtgaatctgctaacagcaagataatgacgtggtctgtgttccaacttctcatattgttgggcacctgtgccttccagttgcgctatctcaagaatttctttgtcaaacagaaggtagtatga

SEQ ID NO: 5059 - DNA, 1323 bp, Saccharomyces cerevisiae
atgaatgactaccatctcgaggataccacgtctgaacttgaagcattaagattggagaatgcacaattaagagagcagcttgccaagagagaagacagcagccgcgactacccattatctttggaagaataccaacgttacggaagacaaatgattgttgaagaaacaggtggtgtagcaggtcaagtcaagttgaaaaatacaaaagttttggtagttggtgctggaggtttgggatgtcccgccttgccctacttagcgggcgctggcgtgggccaaataggcatagtagataacgatgtggtggagacttccaatttgcataggcaggttcttcatgattctagcagagttggaatgttgaaatgtgagtcggccaggcaatatatcacgaaactgaacccacacattaacgtcgttacctatcccgttagattgaactccagtaatgcttttgacattttcaaaggttacaattatatattagactgcacagattctccattaacgagatacctggtgtctgatgttgcagttaatctgggaataacagtagtgtctgcatccggtttgggaacagagggccagctaactatattgaattttaacaatatagggccatgctacagatgcttttatccaacacctccgccaccaaatgccgtgacctcttgccaagaaggcggtgtgataggaccttgcattggactagttggaacaatgatggctgtagaaactttgaagcttatcctaggaatctacaccaatgaaaattttagtccctttttgatgttatattcaggtttcccacagcagagcctgcgcactttcaaaatgagaggcagacaagaaaagtgtctatgctgtggtaagaatcgaacgataacaaaagaagccatcgaaaaaggtgagatcaattacgaactgttttgtggcgcacgaaactataatgtatgcgagcctgatgagagaatcagtgtggacgcatttcagcgtatctacaaggatgatgaatttctagcaaaacatatatttcttgatgttaggccatcccatcattacgagatatctcatttccctgaagcagttaatattccaatcaaaaatctaagagatatgaacggtgatcttaagaaactgcaagaaaaacttcccagtgtagaaaaagacagtaatatagtgattctttgccgctacggtaacgactctcagctagctacaagattattgaaggataaatttgggttttctaatgtacgagacgtgagaggaggatacttcaaatacatagacgatattgatcaaaccattcctaaatattag

SEQ ID NO: 5060 - DNA, 1323 bp, Artificial Sequence
  Description of Artificial Sequence: Synthetic polynucleotide
atgaatgactaccatctcgaggataccacgtctgaacttgaagcattaagattggagaatgcacaattaagagagcagcttgccaagagagaagacagcagccgcgactacccattatctttggaagaataccaacgttacggaagacaaatgattgttgaagaaacaggtggtgtagcaggtcaagtcaagttgaaaaatacaaaagttttggtagttggtgctggaggtttgggatgtcccgccttgccctacttagcgggcgctggcgtgggccaaataggcatagtagataacgatgtggtggagacttccaatttgcataggcaggttcttcatgattctagcagagttggaatgttgaaatgtgagtctgccaggcaatatatcacgaaattgaacccacacattaacgtcgttacctatcccgttagattgaactccagtaatgcttttgacattttcaaaggttacaattatatattagactgcacagattctccattaacgagatacttggtgtctgatgttgcagttaatttaggaataacagtagtgtctgcatccggtttgggaacagagggccagttgactatattgaattttaacaatatagggccatgctacagatgcttttatccaacacctccgccaccaaatgccgtgacctcttgccaagaaggcggtgtgataggaccttgcattggattggttggaacaatgatggctgtagaaactttgaagcttatcttgggaatctacaccaatgaaaattttagtccctttttgatgttatattctggtttcccacagcagagcttgcgcactttcaaaatgagaggcagacaagaaaagtgtctttgctgtggtaagaatagaacgataacaaaagaagccatcgaaaaaggtgagatcaattacgaattattttgtggcgcaagaaactataatgtatgcgagcctgatgagagaatcagtgtggacgcatttcagcgtatctacaaggatgatgaatttttggcaaaacatatatttcttgatgttaggccatcccatcattacgagatatctcatttccctgaagcagttaatattccaatcaaaaatttaagagatatgaacggtgatcttaagaaattacaagaaaaacttcccagtgtagaaaaagacagtaatatagtgattctttgccgctacggtaacgactctcagttagctacaagattattgaaggataaatttgggttttctaatgtaagagacgtgagaggaggatacttcaaatacatagacgatattgatcaaaccattcctaaatattga

SEQ ID NO: 5061 - DNA, 1137 bp, Saccharomyces cerevisiae
atggtggacttgtcaacagctttgattcatggcgatgataaagataacagggttactgacgtggcgcccccaattaatgtctctacaaccttccgttacgacgatgacgacctaattccatggacagagcgtgaaaacttggactttatggagaagaagcccgtatattcacggctagcgcatccaaatagcaccagattagagagtatcttctcagagatcctcgatggttatgctgtcatttattcttcagggttagctgcgttctatgcggcaatggtacattacaaccctaagaagatctttatcggacagagctaccatggtgttcgagcaattgctaacatattgacccgtaattacggcattgagcaacaccccttggaagatattgaaaaatgtgcttctgaaggtgacattgtccatctggaatctcctgtaaacccatatggtacctcttctgatatcgagagtttggcccgcagagctcatgcaaaaggcgccctgcttatagtggattccacattcgcatctcctccattgcaatacgcatggaatttcggagccgatattgtcctatactctgctactaagtactttggtggtcattctgacttgttaagtggcgtccttgtagtcaaagaggaagcaacttcccgacaactaaaagacgacagaatctacttgggtacaaacgtggcaaatttggaaagtttcatgttgttgcgatccctgagaacctacgaaatgagaataaccaaacaatcagaaaatgctacgaaattagttagatttttgtcagatcaccaatctgaatttgacaaagtattgaagacgatttaccactcttctttacaaacagaagagttcgttaaaaagcaactggtaggaggatatggtcccgtttttgctatcactttgtacaccaaagagcagtgtaaacaattacccctcaagctgaaatatttccatcatgcgacctcactgggtggaattgaatcccttgtggaatggagagcaatgactgacccatatatcgaccaaactttaataagagtatctgtgggctgtgaatccgctaatgatttgattaaggatttggcttcggccttgaaagaattgcaggatgcagcctga

SEQ ID NO: 5062 - DNA, 1137 bp, Artificial Sequence
  Description of Artificial Sequence: Synthetic polynucleotide
atggtggacttgagtacagctttgattcatggcgatgataaagataacagggttactgacgtggcgcccccaattaatgtctctacaaccttccgttacgacgatgacgacttgattccatggacagagcgtgaaaacttggactttatggagaagaagcccgtatattctagattagcgcatccaaatagcaccagattagagagtatcttcagtgagatcctcgatggttatgctgtcatttattcttctgggttagctgcgttctatgcggcaatggtacattacaaccctaagaagatctttatcggacagagctaccatggtgttagagcaattgctaacatattgacccgtaattacggcattgagcaacaccccttggaagatattgaaaaatgtgcttctgaaggtgacattgtccatttggaatctcctgtaaacccatatggtacctcttctgatatcgagagtttggcccgcagagctcatgcaaaaggcgccttacttatagtggattccacattcgcatctcctccattgcaatacgcatggaatttcggagccgatattgtcttgtactctgctactaagtactttggtggtcattctgacttgttaagtggcgtccttgtagtcaaagaggaagcaacttccagacaattgaaagacgacagaatctacttgggtacaaacgtggcaaatttggaaagtttcatgttgttgcgttccttgagaacctacgaaatgagaataaccaaacaaagtgaaaatgctacgaaattagttagatttttgagtgatcaccaatctgaatttgacaaagtattgaagacgatttaccactcttctttacaaacagaagagttcgttaaaaagcaattggtaggaggatatggtcccgtttttgctatcactttgtacaccaaagagcagtgtaaacaattacccctcaagttgaaatatttccatcatgcgacctccttgggtggaattgaatcccttgtggaatggagagcaatgactgacccatatatcgaccaaactttaataagagtatctgtgggctgtgaatccgctaatgatttgattaaggatttggcttctgccttgaaagaattgcaggatgcagcctga

SEQ ID NO: 5063 - DNA, 1473 bp, Saccharomyces cerevisiae
atgttcaggatacaactgagaactatgtccagcaaaacatgcaagagtgattacccaaaggagtttgtcagtttcttaaatagctcacactctccttaccatacagttcataacatcaaaaagcatctggtgtcaaatggcttcaaagagttgagcgaacgtgactcgtgggctggccacgtcgcacaaaaaggaaagtactttgtgacaagaaatggctcttccattattgcgtttgctgttggtggaaagtgggagcctggtaatccaattgccattacgggtgctcacaccgactcccccgcattaaggattaagcctatttctaaaagagtcagtgagaagtatttacaagtgggcgtggaaacttatggtggcgctatttggcattcatggtttgataaggatttgggcgttgccggaagagttttcgtaaaggatgcgaaaactggcaaatccattgctagattggtggatttgaatagacctctgttaaagattcctactttggctattcatctggacagagacgtaaatcaaaaattcgagtttaatagagaaactcaactgttgccgattggtggtctgcaagaagacaaaactgaagcgaaaactgaaaaggaaattaataacggtgagtttacctccataaaaacgatagtacagaggcatcacgcagaacttttggggctaatagccaaagaactcgccattgatacaattgaagacattgaagacttcgaattgatcctttatgatcataatgcatccactctaggtgggttcaacgatgagtttgtcttctctggtcgattggataatttgacatcttgtttcacatcaatgcacggtttaacgttggcggctgacacagaaattgaccgagaatcaggcattagattgatggcatgctttgatcatgaggagattggctcatcctccgcccaaggggcagattctaacttcttgcctaatatattggaaaggttgtccatcctgaagggggacggttctgatcaaactaaacctttgtttcactcggcaatattggaaacttccgctaagtcgtttttcctttcatctgatgttgctcatgcagttcatccaaactatgcaaacaaatacgaaagccaacacaaacccttattgggtggtggtcccgtaatcaagattaacgcgaatcaacgttacatgaccaattcaccagggttggtcttggtgaaaagactagcagaggctgctaaagtccctttgcaattgtttgtcgtagctaacgactcaccatgcggttctaccatcggccccattttggcctcaaagacaggtattagaactctagacttgggtaatcctgtgttgagtatgcattcgattagagagaccggtggctctgcagacctggagttccaaatcaagttatttaaggaattttttgaacgctacacttccatagaatctgaaattgttgtctaa

SEQ ID NO: 5064 - DNA, 1473 bp, Artificial Sequence
  Description of Artificial Sequence: Synthetic polynucleotide
atgttcaggatacaattgagaactatgtccagcaaaacatgcaagagtgattacccaaaggagtttgtcagtttcttaaatagctctcactctccttaccatacagttcataacatcaaaaagcatttggtgagtaatggcttcaaagagttgagcgaacgtgactcttgggctggccacgtcgcacaaaaaggaaagtactttgtgacaagaaatggctcttccattattgcgtttgctgttggtggaaagtgggagcctggtaatccaattgccattacgggtgctcacaccgactcccccgcattaaggattaagcctatttctaaaagagtcagtgagaagtatttacaagtgggcgtggaaacttatggtggcgctatttggcattcttggtttgataaggatttgggcgttgccggaagagttttcgtaaaggatgcgaaaactggcaaatccattgctagattggtggatttgaatagacctttattaaagattcctactttggctattcatttggacagagacgtaaatcaaaaattcgagtttaatagagaaactcaattattgccgattggtggtttacaagaagacaaaactgaagcgaaaactgaaaaggaaattaataacggtgagtttacctccataaaaacgatagtacagaggcatcacgcagaacttttggggttgatagccaaagaactcgccattgatacaattgaagacattgaagacttcgaattgatcctttatgatcataatgcatccactttaggtgggttcaacgatgagtttgtcttctctggtagattggataatttgacatcttgtttcacatctatgcacggtttaacgttggcggctgacacagaaattgacagagaaagtggcattagattgatggcatgctttgatcatgaggagattggcagctcctccgcccaaggggcagattctaacttcttgcctaatatattggaaaggttgtccatcttgaagggggacggttctgatcaaactaaacctttgtttcactctgcaatattggaaacttccgctaagagctttttcctttcttctgatgttgctcatgcagttcatccaaactatgcaaacaaatacgaaagccaacacaaacccttattgggtggtggtcccgtaatcaagattaacgcgaatcaacgttacatgaccaattctccagggttggtcttggtgaaaagattagcagaggctgctaaagtccctttgcaattgtttgtcgtagctaacgactctccatgcggttctaccatcggccccattttggcctccaagacaggtattagaactttggacttgggtaatcctgtgttgagtatgcattctattagagagaccggtggctctgcagacttggagttccaaatcaagttatttaaggaattttttgaacgctacacttccatagaatctgaaattgttgtctga

SEQ ID NO: 5065 - DNA, 1902 bp, Saccharomyces cerevisiae
atgagtgcagatttatcgattggtaatgaaattaaagattcatttaaggaaacccataaatgggtccaaaataacttaaaatggttgaaggacattgagcaattttatcgggaaagggctaagttagaaaaagactacagcgagagattatctcgcttatcagcagagtactttaataagaagtcttcgacctcagttcctatctcggtaggtgacacacctactaccacgccagggtccattgaagctgcaggtgtggttgcatggaatgaaattctatctcagactgatatgatttccaaggatcatgatcagttatcaaccgactttgaaaatcatgtagcaaatcaattgagtggattattcactaaacttgatatgactttgagcaagataaatggatttaacaatgacatggttaataaaaaggataacatttaccacgaactggaaaaagcgaagaaggactatgatgaagcctgttccactatggaaatggcaagaaataggtataccaaggcatctaatgatagaaataaaaagaagttggatgaaaaagaaatggagatgaacaagtgtaaaaatgaatatttaatcaagatcaaccaggcaaatagaactaaggataaatactattttcaagatgttcctgaagtgctagatcttctacaagacgtaaatgaggcaaagacccttttcttaaatgatctgtggttgaaggcggcttctgtcgagaacgatctgggtgcaaatgtcagcaaaagactccaggcggcaaattctgttgtcaagcagaataaaccctctttaaacacggccatctttatcaagcacaatctaaagaattggaaagaaccacaagactttgtctataagccatctccagtatggcatgatgatgaaaaatttgctgttccctcgtcgttggaagttgaagacttgagaataaaactggcaaaagcagaaaatgattacaattcattgcaagataaaactcaaaatgagttatccaaactgtctactttgaacaagataaagcacgaaatgaaaactaatgaagataatatcaatgccactaagttttatgatacactaaaggaatacttaaatgtcgtttcaccctttacctcacacgaaacattaaaattgcaagccgaagttcaaatcgaaagtattcagaataatgttcctgaagaatacgatttatccacagacaatattgatctttccaaaacaaagaagaaatccgggatattcagtaagttcaaacacaacatcctgaacgtcgactcgaagccttcgagtggagggagcactggtaatggcaacggaggacccttgcatataacaagtctcttcaacacatcaagaagaactaggctaggctctgcccctaacaacgctggtgaagattcagataataattctatacgcaccactagtaccaacaatacaaaaaagaccacacaaaattccagtgatgacggcaagaataaagtgttgtatgcatacgtacaaaaggatgatgacgaaatcaccattacgccaggagacaaaatctctttggttgcacgcgatacgggttctggatggactaagataaataacgacaccactggggaaaccggccttgtacccaccacatatattcgcatatctagcgcggctacagttaaagcaaatgatagaggccctgcaccagaagtaccaccaccaagaaggagtacactacctgttaggacgatggaggccatatatgcctacgaagcacagggagatgatgagatttcaattgatccgggggacataattactgttatcagaggcgatgacggtagcgggtggacatatggtgaatgtgacggattgaaaggtctatttcctacaagttactgtaaatga

SEQ ID NO: 5066 - DNA, 1902 bp, Artificial Sequence
  Description of Artificial Sequence: Synthetic polynucleotide
atgagtgcagatttatccattggtaatgaaattaaagattcttttaaggaaacccataaatgggtccaaaataacttaaaatggttgaaggacattgagcaattttatagagaaagggctaagttagaaaaagactacagcgagagattatctcgcttaagtgcagagtactttaataagaagtcttccacctctgttcctatctctgtaggtgacacacctactaccacgccagggtccattgaagctgcaggtgtggttgcatggaatgaaattttatctcagactgatatgatttccaaggatcatgatcagttatctaccgactttgaaaatcatgtagcaaatcaattgagtggattattcactaaacttgatatgactttgagcaagataaatggatttaacaatgacatggttaataaaaaggataacatttaccacgaattggaaaaagcgaagaaggactatgatgaagcctgttccactatggaaatggcaagaaataggtataccaaggcatctaatgatagaaataaaaagaagttggatgaaaaagaaatggagatgaacaagtgtaaaaatgaatatttaatcaagatcaaccaggcaaatagaactaaggataaatactattttcaagatgttcctgaagtgttggatcttttacaagacgtaaatgaggcaaagacccttttcttaaatgatttatggttgaaggcggcttctgtcgagaacgatttaggtgcaaatgtcagcaaaagactccaggcggcaaattctgttgtcaagcagaataaaccctctttaaacacggccatctttatcaagcacaatttgaagaattggaaagaaccacaagactttgtctataagccatctccagtatggcatgatgatgaaaaatttgctgttccctcttctttggaagttgaagacttgagaataaaattggcaaaagcagaaaatgattacaattctttgcaagataaaactcaaaatgagttatccaaattatctactttgaacaagataaagcacgaaatgaaaactaatgaagataatatcaatgccactaagttttatgatacattgaaggaatacttaaatgtcgtttctccctttacctctcacgaaacattaaaattgcaagccgaagttcaaatcgaaagtattcagaataatgttcctgaagaatacgatttatccacagacaatattgatctttccaaaacaaagaagaaatccgggatattcagtaagttcaaacacaacatcttgaacgtcgactccaagccttctagtggagggagcactggtaatggcaacggaggacccttgcatataacaagtctcttcaacacatctagaagaactaggttgggctctgcccctaacaacgctggtgaagattctgataataattctatacgcaccactagtaccaacaatacaaaaaagaccacacaaaattccagtgatgacggcaagaataaagtgttgtatgcatacgtacaaaaggatgatgacgaaatcaccattacgccaggagacaaaatctctttggttgcacgcgatacgggttctggatggactaagataaataacgacaccactggggaaaccggccttgtacccaccacatatattcgcatatctagcgcggctacagttaaagcaaatgatagaggccctgcaccagaagtaccaccaccaagaaggagtacattgcctgttaggacgatggaggccatatatgcctacgaagcacagggagatgatgagatttccattgatccgggggacataattactgttatcagaggcgatgacggtagcgggtggacatatggtgaatgtgacggattgaaaggtttatttcctacaagttactgtaaatga

SEQ ID NO: 5067 - DNA, 1251 bp, Saccharomyces cerevisiae
atgtctactaatactgttccctcatctcccccaaaccagacgccacctgctgcttctggcatcgctacctctcacgatcacaccaagttcaacaatcccatcagactaccgatatccatctctctcaccattaacgatacgcctaacaataacagcaataataatagcgttagcaatggtttaggtattttgccctcgcgtacggctacttctttagtcgttgcaaataacggtagcgcaaacggcaatgttggtgctactgctgctgctgctgccactgtggagacgaatacagcccccgcggtgaacactacaaagagtatccgccatttcatatatcctccaaaccaagtcaatcagacggagttttcacttgatatacatctcccaccaaatacctcgctaccggaacggatagaccaatctactttgaaacgcagaatggacaagcacgggcttttcagcattaggctaaccccgtttatagatacttcatccacgtctgtggctaaccagggtcttttctttgaccccattatcaggactgcgggcgcaggctcgcaaattatcatcggaagatacaccgaaagagtaagagaggcaatttccaaaattccagatcagtatcatcccgtagtgttcaaatcaaaagtgatatccaggacccatgggtgtttcaaagttgatgaccaaggaaactggtttttgaaagatgtcaagtcttccagtgggacctttttgaaccaccagcgtctatcttctgcgtctaccacttctaaggactaccttttacatgacggagatatcatacagctgggtatggactttcgcggcgggacggaagagatatatcgttgtgttaagatgaaaatagaattgaacaagtcttggaaattaaaggccaatgcatttaataaagaagccttgagccgaataaaaaatctacagaaactaactactggtttagaacaagaagactgttccatttgtctaaacaaaataaaaccttgccaagccatttttatatcaccatgtgcccatagttggcattttcattgtgtaagaagattggttattatgaattatcctcaattcatgtgtccgaactgtaggacaaactgtgatttggagactaccttggaatccgaatctgaatccgaattcgaaaacgaggacgaagatgagccagacattgaaatggatatagacatggaaataaataacaatttaggtgttcgcctagtagattga

SEQ ID NO: 5068 - DNA, 1251 bp, Artificial Sequence
  Description of Artificial Sequence: Synthetic polynucleotide
atgtctactaatactgttccctcttctcccccaaaccagacgccacctgctgcttctggcatcgctacctctcacgatcacaccaagttcaacaatcccatcagattaccgatatccatctctctcaccattaacgatacgcctaacaataacagcaataataatagcgttagcaatggtttaggtattttgccctctcgtacggctacttctttagtcgttgcaaataacggtagcgcaaacggcaatgttggtgctactgctgctgctgctgccactgtggagacgaatacagcccccgcggtgaacactacaaagagtatccgccatttcatatatcctccaaaccaagtcaatcagacggagttttcccttgatatacatctcccaccaaatacctctttaccggaaagaatagaccaatctactttgaaacgcagaatggacaagcacgggcttttcagcattaggttgaccccgtttatagatacttcttccacgtctgtggctaaccagggtcttttctttgaccccattatcaggactgcgggcgcaggctctcaaattatcatcggaagatacaccgaaagagtaagagaggcaatttccaaaattccagatcagtatcatcccgtagtgttcaaatctaaagtgatatccaggacccatgggtgtttcaaagttgatgaccaaggaaactggtttttgaaagatgtcaagtcttccagtgggacctttttgaaccaccagcgtttatcttctgcgtctaccacttctaaggactaccttttacatgacggagatatcatacagttgggtatggactttcgcggcgggacggaagagatatatcgttgtgttaagatgaaaatagaattgaacaagtcttggaaattaaaggccaatgcatttaataaagaagccttgagcagaataaaaaatttacagaaattaactactggtttagaacaagaagactgttccatttgtttgaacaaaataaaaccttgccaagccatttttatatctccatgtgcccatagttggcattttcattgtgtaagaagattggttattatgaattatcctcaattcatgtgtccgaactgtaggacaaactgtgatttggagactaccttggaatccgaatctgaatccgaattcgaaaacgaggacgaagatgagccagacattgaaatggatatagacatggaaataaataacaatttaggtgttcgcttggtagattga

SEQ ID NO: 5069 - DNA, 456 bp, Saccharomyces cerevisiae
atggagaagcccagccccaccaggcggcaaactagtagtctctccactatctccaacggtatgaccatgaccaacgataatagggataccacaaataccaacagtggctctacaagcagcaacaattcacaaccatcttcgtcttccacgccaccagcggccagtggacccgtaacggacagaaccaaagtcaactatgtaccaaagagcgacgatccgtcgtcatttcaatactacccagacgacccggagaacccggtcaataagtataaattcgcgttaaaggctgacagtcagtactatgatccttgtgaggagtcctccaagctcagttttcagtgcctcgagcgcaacgattacgaccgatccaagtgccaagaatattttgacgcataccgcgaatgcaagaaacaatggctgacagccaggaggaaaaacagacagcagtgggaatga

SEQ ID NO: 5070 - DNA, 456 bp, Artificial Sequence
  Description of Artificial Sequence: Synthetic polynucleotide
atggagaagcccagccccaccaggagacaaactagtagtctctccactatctccaacggtatgaccatgaccaacgataatagggataccacaaataccaacagtggctctacaagcagcaacaattctcaaccatcttcttcttccacgccaccagcggccagtggacccgtaacggacagaaccaaagtcaactatgtaccaaagagcgacgatccgtcttcttttcaatactacccagacgacccggagaacccggtcaataagtataaattcgcgttaaaggctgacagtcagtactatgatccttgtgaggagtcctccaagctcagttttcagtgcctcgagcgcaacgattacgacagatccaagtgccaagaatattttgacgcataccgcgaatgcaagaaacaatggttgacagccaggaggaaaaacagacagcagtgggaatga

SEQ ID NO: 5071 - DNA, 1920 bp, Saccharomyces cerevisiae
atggccgaaaactccctcctgaggtttatcaccaagaacaaagtggccatcctagcaacggtctctgcggggactgctgctgtgggtgcttatgtttactaccagcaaattaagcagcagcaacagcagcaattgaagggtacaaaagacaaccgacgtcaaagtgaggcctttgctggtcaaaatgaagacgaggcggacttaaaggacgacggcagcgtcgtaagtggaagtaataagaggaagaagaagaagaataaacgcaagaggaacaataaggcaaaatcgggagaagggtttgactatccctccttgcccaatggcgagcctgatattgcccaattgaaaggcctatcaccctcccagagacaagcgtatgccgtgcaactgaagaacagaggtaaccacttcttcactgctaagaattttaatgaggccatcaaatactaccagtatgccattgagctggacccgaatgaaccagtgttctattccaacatatctgcttgttacatttctacgggcgacttagagaaggttatagagttcactacaaaggcacttgagataaaacctgaccattctaaagccttgctgagacgtgcatctgccaacgagtcactgggcaacttcactgatgctatgtttgatctatctgttttgtcattgaatggtgactttgatggagcctccattgaacctatgctggaaagaaatttaaataagcaagcaatgaaagtactaaatgaaaacctatcgaaggatgaaggcagaggctcgcaggttttgccgtctaacacatctctggcgtcattttttgggatttttgactctcacttagaagtttctagtgtgaacaccagttcaaactacgatactgcatacgctctattgtcagatgctttgcaaagactatattctgcaacagatgaaggttacttagtagcaaacgatcttttaacaaagtccactgacatgtaccactctctactttctgcaaatacagtggacgatcctttaagagagaatgctgccttggcattgtgctacacgggtattttccatttcttaaaaaataacctgttagatgcccaagttcttttacaagaatctataaacctgcatccaacaccaaattcgtacatatttttggcattgaccttggccgataaagaaaactctcaagaatttttcaaatttttccaaaaagctgttgatctaaaccctgagtatccgccaacctattaccaccgtgggcagatgtattttattctacaagattataaaaatgccaaggaagatttccaaaaggcccaaagcttgaaccctgaaaatgtttatccctacattcaattagcctgtttgttgtacaagcaaggtaaatttaccgaatctgaagcttttttcaatgaaacaaagttgaagtttcctaccttacctgaggtgcccacctttttcgctgaaatcttgacagataggggcgattttgatactgcaattaaacaatatgatattgctaaaaggttggaagaagtgcaagaaaaaatacatgtgggtataggacccttgattgggaaagcaactatattagctagacaatcctctcaagatccaacccagttggatgaagagaaattcaacgcagccattaagctgctgacaaaagcctgtgaattagatccacgatctgaacaagcgaagatcgggttagcacaactaaaattacaaatggaaaaaattgacgaggccatagaattgtttgaagattctgcaattttagcaagaactatggatgaaaaacttcaagctactaccttcgcggaagctgcaaagatacaaaagcgtttgagggctgatccaatcataagtgcaaagatggagctaacattagctcgttatagggctaaaggcatgctttag

SEQ ID NO: 5072 - DNA, 1920 bp, Artificial Sequence
  Description of Artificial Sequence: Synthetic polynucleotide
atggccgaaaactccctcttgaggtttatcaccaagaacaaagtggccatcttggcaacggtctctgcggggactgctgctgtgggtgcttatgtttactaccagcaaattaagcagcagcaacagcagcaattgaagggtacaaaagacaaccgtcgtcaaagtgaggcctttgctggtcaaaatgaagacgaggcggacttaaaggacgacggcagcgtcgtaagtggaagtaataagaggaagaagaagaagaataaacgcaagaggaacaataaggcaaaaagtggagaagggtttgactatccctccttgcccaatggcgagcctgatattgcccaattgaaaggcttatctccctcccagagacaagcgtatgccgtgcaattgaagaacagaggtaaccacttcttcactgctaagaattttaatgaggccatcaaatactaccagtatgccattgagttggacccgaatgaaccagtgttctattccaacatatctgcttgttacatttctacgggcgacttagagaaggttatagagttcactacaaaggcacttgagataaaacctgaccattctaaagccttgttaagacgtgcatctgccaacgagtctttaggcaacttcactgatgctatgtttgatttatctgttttgtctttgaatggtgactttgatggagcctccattgaacctatgttggaaagaaatttaaataagcaagcaatgaaagtattgaatgaaaacttatccaaggatgaaggcagaggctctcaggttttgccgtctaacacatctttagcgtctttttttgggatttttgactctcacttagaagtttctagtgtgaacaccagtagtaactacgatactgcatacgctttattgagtgatgctttgcaaagattatattctgcaacagatgaaggttacttagtagcaaacgatcttttaacaaagtccactgacatgtaccactctttactttctgcaaatacagtggacgatcctttaagagagaatgctgccttggcattgtgctacacgggtattttccatttcttaaaaaataacttattagatgcccaagttcttttacaagaatctataaacttacatccaacaccaaattcttacatatttttggcattgaccttggccgataaagaaaactctcaagaatttttcaaatttttccaaaaagctgttgatttgaaccctgagtatccgccaacctattaccaccgtgggcagatgtattttattttacaagattataaaaatgccaaggaagatttccaaaaggcccaaagcttgaaccctgaaaatgtttatccctacattcaattagcctgtttgttgtacaagcaaggtaaatttaccgaatctgaagcttttttcaatgaaacaaagttgaagtttcctaccttacctgaggtgcccacctttttcgctgaaatcttgacagataggggcgattttgatactgcaattaaacaatatgatattgctaaaaggttggaagaagtgcaagaaaaaatacatgtgggtataggacccttgattgggaaagcaactatattagctagacaatcctctcaagatccaacccagttggatgaagagaaattcaacgcagccattaagttattaacaaaagcctgtgaattagatccaagatctgaacaagcgaagatcgggttagcacaattgaaattacaaatggaaaaaattgacgaggccatagaattgtttgaagattctgcaattttagcaagaactatggatgaaaaacttcaagctactaccttcgcggaagctgcaaagatacaaaagcgtttgagggctgatccaatcataagtgcaaagatggagttgacattagctcgttatagggctaaaggcatgctttga

SEQ ID NO: 5073 - DNA, 1308 bp, Saccharomyces cerevisiae
atgtccatgcaacaagtccaacattgtgtcgcagaagtacttcgactagatccacaagaaaaaccggactggtcgagcggatatttgaagaagttgactaatgcgacatcgattttatataatacttcactgaacaaggtaatgctgaaacaagatgaagaggttgctagatgtcacatatgtgcatacatagcgtcacagaaaatgaatgaaaaacacatgcctgacctttgctattatatagacagtattcccttggagccgaaaaaagccaagcatttaatgaaccttttcagacaaagtttatctaattcttcacctatgaaacaatttgcttggacaccgagccccaaaaagaacaaacgcagtccagtaaagaacggtgggaggtttacttcttctgatccgaaagagttgaggaatcaactgtttggtacaccaactaaagttaggaaaagccaaaataatgattcgttcgtaataccagaactaccccccatgcaaaccaatgaatcgccgtctattactaggagaaagttagcatttgaagaggatgaggatgaggatgaagaggaaccaggaaacgacggtttgtctttaaaaagccatagtaataagagcattactggaaccagaaatgtagattctgatgagtatgaaaaccatgaaagtgaccctacaagtgaggaagagccattaggtgtgcaagaaagcagaagcgggagaacgaaacaaaataaggcagttggaaaaccgcaatcagaattgaagacggcaaaagccctgaggaaaaggggcagaataccaaattctttgttagtaaagaagtattgcaaaatgactactgaagaaataatacggctttgcaacgattttgaattaccaagagaagtagcatataaaattgtggatgagtacaacataaacgcgtcaagattggtttgcccatggcaattagtgtgtgggttagtattaaattgtacattcattgtatttaatgaaagaagacgcaaggatccaagaattgaccattttatagtcagtaagatgtgcagcttgatgttgacgtcaaaagtggatgatgttattgaatgtgtaaaattagtgaaggaattaattatcggtgaaaaatggttcagagatttgcaaattaggtatgatgattttgatggcatcagatacgatgaaattatatttaggaaactgggatcgatgttacaaaccaccaatattttggtcacagacgaccagtacaatatttggaagaaaagaattgaaatggatttggcattaacagaacctttataa

SEQ ID NO: 5074 - DNA, 1308 bp, Artificial Sequence
  Description of Artificial Sequence: Synthetic polynucleotide
atgtccatgcaacaagtccaacattgtgtcgcagaagtacttcgtttggatccacaagaaaaaccggactggtctagcggatatttgaagaagttgactaatgcgacatccattttatataatacttctttgaacaaggtaatgttgaaacaagatgaagaggttgctagatgtcacatatgtgcatacatagcgtctcagaaaatgaatgaaaaacacatgcctgacctttgctattatatagacagtattcccttggagccgaaaaaagccaagcatttaatgaaccttttcagacaaagtttatctaattcttctcctatgaaacaatttgcttggacaccgagccccaaaaagaacaaacgcagtccagtaaagaacggtgggaggtttacttcttctgatccgaaagagttgaggaatcaattatttggtacaccaactaaagttaggaaaagccaaaataatgattctttcgtaataccagaattgccccccatgcaaaccaatgaatctccgtctattactaggagaaagttagcatttgaagaggatgaggatgaggatgaagaggaaccaggaaacgacggtttgtctttaaaaagccatagtaataagagcattactggaaccagaaatgtagattctgatgagtatgaaaaccatgaaagtgaccctacaagtgaggaagagccattaggtgtgcaagaaagcagaagcgggagaacgaaacaaaataaggcagttggaaaaccgcaaagtgaattgaagacggcaaaagccttaaggaaaaggggcagaataccaaattctttgttagtaaagaagtattgcaaaatgactactgaagaaataataaggctttgcaacgattttgaattaccaagagaagtagcatataaaattgtggatgagtacaacataaacgcgtccagattggtttgcccatggcaattagtgtgtgggttagtattaaattgtacattcattgtatttaatgaaagaagacgcaaggatccaagaattgaccattttatagtcagtaagatgtgcagcttgatgttgacgtccaaagtggatgatgttattgaatgtgtaaaattagtgaaggaattaattatcggtgaaaaatggttcagagatttgcaaattaggtatgatgattttgatggcatcagatacgatgaaattatatttaggaaattaggatccatgttacaaaccaccaatattttggtcacagacgaccagtacaatatttggaagaaaagaattgaaatggatttggcattaacagaacctttatga

SEQ ID NO: 5075 - DNA, 3243 bp, Saccharomyces cerevisiae
atgtcaaattactatagaagagcacacgcgtcttctggttcatacagacaaccccaggaacagcctcaatattcgcgttctggtcactatcagtattcaaacggccattctcaccaacaatattctagtcaatataatcaacgtcgacgttataaccataatgatggtacaaggcgacgctataatgacgatcgcccacatagttcaaacaatgcaagtacgcgacagtactatgctactaacaacagccaaagcggcccatatgtaaataagaaatctgacatcagtagtcggaggggcatgtctcaatcacggtattcaaatagcaatgttcacaatacattagcgtcttcgagtggatctcttcccacagaatctgctctgcttttgcaacaaagaccaccttcagttttgagatacaacacagataatttgaagtctaagtttcattattttgatcccataaaaggcgagttcttcaataaggataagatgctttcgtggaaggctacagataaagaattttctgaaacaggttattacgtagtcaaagagttacaagatggacagtttaagttcaaaataaaacacagacatccggagataaaagcatccgacccacgtaatgaaaacggtatcatgactagcggaaaagtggcaacccacagaaaatgcaggaactcactaattctattgcctcgcatatcttatgacaggtactccttagggcctcccccttcatgtgaaatagttgtctatccagcgcaagattcaacaacaaccaatatccaagacatatcaataaaaaactattttaaaaagtatggagaaatttctcattttgaagcatttaatgatcctaatagcgctttacctttgcatgtttatcttataaagtatgccagttctgatggaaaaattaatgatgcagcaaaagcagcctttagtgccgttagaaagcacgaatcttcgggttgctttatcatgggcttcaagttcgaagtgattttaaacaagcattccattttgaataatatcatttctaaatttgttgaaataaatgtcaaaaagctacagaagttacaagagaacctgaagaaggctaaagagaaagaagcagaaaacgaaaaagcaaaggaattacagggcaaagatattaccttgcccaaggaacctaaggtagacacattatctcattcgtccggaagtgaaaaaagaattccatatgatctcttgggggtagttaataacagacctgttttacatgtctccaaaatatttgttgccaaacataggttctgcgttgaggactttaaatacaagttaaggggatacagatgtgcgaaatttattgatcatccaactggtatctatattatttttaatgacattgcccatgcgcaaacatgttcgaatgcagagtcaggaaatttaacaataatgtctcggagcagaagaattcctattctaataaagtttcatctcattctccctaggttccaaaacagaactagattcaataaatctagctcatcttcaaattctacaaatgtacctataaaatacgagtccaaagaggagttcattgaagctacagcaaaacaaatattaaaagatttggaaaagactttacatgttgatattaagaagagattgattggtcctacggtatttgatgctttggaccatgcaaattttcctgaattgttagctaaaagagaactaaaggagaaagagaagagacaacagattgcatctaaaattgctgaagatgaattgaaacgtaaagaagaagccaaaagagattttgatttgtttggtttatatggtggctatgcaaaatctaataaaagaaatttaaaaaggcataattcactcgcgttggatcatacttctttaaagaggaaaaagctatccaatggtatcaaaccaatggcacatttactgaacgaagaaaccgattccaaagaaactaccccattgaacgatgaagggatcactcgcgtatcaaaagaacatgatgaagaagacgaaaatatgacatcttcatcttctgaagaagaggaagaagaagctccagataagaaattcaagagtgagtctgagccaaccacccccgaatctgatcaccttcatggtattaagccgttagtacccgatcaaaatgggtcgtctgacgtactggatgcttcttcgatgtataaacctactgctaccgaaattcccgaacctgtatatccacctgaggaatatgacttgaaatatagtcagactttatcttctatggatttgcagaatgctatcaaagatgaggaagatatgctaattttaaagcagttattgagcacatatactcctaccgtcacaccagaaacaagcgcagctctggaatataaaatttggcaatctcgccgaaaagttcttgaagaagagaaggcttccgattggcaaatagagcttaatggaactttatttgatagtgaactacaaccaggtagctcttttaaagctgaagggttcaggaaaattgcggataaattaaaaattaattacctaccccatcgtcgcagagttcaccaacctttaaatacggtgaatattcacaatgaaaggaatgagtacacacctgaactttgtcaaagagaagaatcctcgaataaagaaccttcagactcagttcctcaagaagtttcatcctctagagataatagggcatcaaatagaagatttcagcaggacatagaggcacagaaagccgcaattggtacggaatctgagctgctatcactaaatcaattaaataaaagaaaaaagccagttatgttcgctcgttcagcaattcacaactggggtttatatgctctagactctatcgcagcaaaggaaatgattatcgagtacgttggtgaaaggatcaggcaacctgtagcagaaatgagagagaaaagatatctgaaaaatgggattggatccagttacctttttagggttgatgaaaacacggttattgatgccaccaagaaaggtggtatagcccgtttcattaatcattgttgtgatccaaattgtacggcaaagattataaaggttggcgggagaaggagaattgttatctatgcactgcgtgatatcgcggcaagcgaagagttgacatatgattacaaatttgagagagaaaaggatgacgaggaaagacttccttgtttatgtggagcacctaattgtaaaggtttcttgaactga

SEQ ID NO: 5076 - DNA, 3243 bp, Artificial Sequence
  Description of Artificial Sequence: Synthetic polynucleotide
atgagtaattactatagaagagcacacgcgtcttctggttcttacagacaaccccaggaacagcctcaatattctcgttctggtcactatcagtattccaacggccattctcaccaacaatattctagtcaatataatcaacgtcgtcgttataaccataatgatggtacaaggagacgctataatgacgatcgcccacatagtagtaacaatgcaagtacgaggcagtactatgctactaacaacagccaaagcggcccatatgtaaataagaaatctgacatcagtagtagaaggggcatgtctcaaagtagatattctaatagcaatgttcacaatacattagcgtcttccagtggatctcttcccacagaatctgctttacttttgcaacaaagaccaccttctgttttgagatacaacacagataatttgaagtctaagtttcattattttgatcccataaaaggcgagttcttcaataaggataagatgctttcttggaaggctacagataaagaattttctgaaacaggttattacgtagtcaaagagttacaagatggacagtttaagttcaaaataaaacacagacatccggagataaaagcatccgacccacgtaatgaaaacggtatcatgactagcggaaaagtggcaacccacagaaaatgcaggaactctttgattttattgcctcgcatatcttatgacaggtactccttagggcctcccccttcttgtgaaatagttgtctatccagcgcaagattctacaacaaccaatatccaagacatatccataaaaaactattttaaaaagtatggagaaatttctcattttgaagcatttaatgatcctaatagcgctttacctttgcatgtttatcttataaagtatgccagttctgatggaaaaattaatgatgcagcaaaagcagcctttagtgccgttagaaagcacgaatcttctggttgctttatcatgggcttcaagttcgaagtgattttaaacaagcattccattttgaataatatcatttctaaatttgttgaaataaatgtcaaaaagttacagaagttacaagagaacttgaagaaggctaaagagaaagaagcagaaaacgaaaaagcaaaggaattacagggcaaagatattaccttgcccaaggaacctaaggtagacacattatctcattcttccggaagtgaaaaaagaattccatatgatctcttgggggtagttaataacagacctgttttacatgtctccaaaatatttgttgccaaacataggttctgcgttgaggactttaaatacaagttaaggggatacagatgtgcgaaatttattgatcatccaactggtatctatattatttttaatgacattgcccatgcgcaaacatgttctaatgcagagagtggaaatttaacaataatgtctagaagcagaagaattcctattttaataaagtttcatctcattctccctaggttccaaaacagaactagattcaataaatctagctcttcttccaattctacaaatgtacctataaaatacgagtccaaagaggagttcattgaagctacagcaaaacaaatattaaaagatttggaaaagactttacatgttgatattaagaagagattgattggtcctacggtatttgatgctttggaccatgcaaattttcctgaattgttagctaaaagagaattgaaggagaaagagaagagacaacagattgcatctaaaattgctgaagatgaattgaaacgtaaagaagaagccaaaagagattttgatttgtttggtttatatggtggctatgcaaaatctaataaaagaaatttaaaaaggcataatagtctcgcgttggatcatacttctttaaagaggaaaaagttatccaatggtatcaaaccaatggcacatttattaaacgaagaaaccgattccaaagaaactaccccattgaacgatgaagggatcactcgcgtatccaaagaacatgatgaagaagacgaaaatatgacatcttcttcttctgaagaagaggaagaagaagctccagataagaaattcaagagtgagtctgagccaaccacccccgaatctgatcaccttcatggtattaagccgttagtacccgatcaaaatgggagttctgacgtattggatgcttcttctatgtataaacctactgctaccgaaattcccgaacctgtatatccacctgaggaatatgacttgaaatatagtcagactttatcttctatggatttgcagaatgctatcaaagatgaggaagatatgttgattttaaagcagttattgagcacatatactcctaccgtcacaccagaaacaagcgcagctttggaatataaaatttggcaatctcgccgtaaagttcttgaagaagagaaggcttccgattggcaaatagagcttaatggaactttatttgatagtgaattacaaccaggtagctcttttaaagctgaagggttcaggaaaattgcggataaattaaaaattaattacttgccccatcgtcgcagagttcaccaacctttaaatacggtgaatattcacaatgaaaggaatgagtacacacctgaactttgtcaaagagaagaatcctctaataaagaaccttctgactctgttcctcaagaagtttcttcctctagagataatagggcatctaatagaagatttcagcaggacatagaggcacagaaagccgcaattggtacggaatctgagttattaagtttgaatcaattaaataaaagaaaaaagccagttatgttcgctcgttctgcaattcacaactggggtttatatgctttggactctatcgcagcaaaggaaatgattatcgagtacgttggtgaaaggatcaggcaacctgtagcagaaatgagagagaaaagatatttgaaaaatgggattggatccagttacctttttagggttgatgaaaacacggttattgatgccaccaagaaaggtggtatagcccgtttcattaatcattgttgtgatccaaattgtacggcaaagattataaaggttggcgggagaaggagaattgttatctatgcattgcgtgatatcgcggcaagcgaagagttgacatatgattacaaatttgagagagaaaaggatgacgaggaaagacttccttgtttatgtggagcacctaattgtaaaggtttcttgaactga

SEQ ID NO: 5077 - DNA, 2880 bp, Saccharomyces cerevisiae
atgaagcatttctttaggctaccgacagcattccggcccatttctagggtttccttacgatattctagtactgataccgctcaaccaaaaatatcaaaactcaaaattagttttaataaaatttctgaatcaaatagcgaaaaaaaagataatttgggttcaattgacacacgaaattgtctttcgactcagcaagatgacaaactatcaagcactgagccctcgaaggcttcccttccaccatcattacaatatgttcgtgacttgatggatttgtataaggatcatgtggttttaacacaaatggggtcattttatgaactttactttgaacaagcaattagatacgctccagaattaaatatatcattgacgaatcgagcttatagtcatggcaaagttccatttgctgggtttcctgtacaccagttaagtcgacatttaaaaatgcttgttaacaattgcggatacagtgtaactatcgcagagcaattcaaaaaaaaggacgtggcagataatgaagccaataaattctataggagagtgactagaatcgttactcccggcacttttattgatgaagcatttgaaaatttgagggaaaatacatatctcctgaacatcgaatttcctgaaaactgtatgagtcaagtggcagacacgagtctaaaagttggtatatgttggtgtgatgtgagtactggggagatatttgttcaacaagtgtatcttagagatttggtttctgcaataacaagaattcaacctaaggagattttattagatgaaagattacttgagtttcatatcgagtcagggacgtggtatcctgaacttgttgagcttaaaaaattttttataaaatatcagaaaatgcccagtcaacatcgcactattgaatcattctatgggctgtttaatttgggaggtaaagaagcaacggaaaggcaattgaaaatccaatttcaaacttttactcagaaggagttagctgctttgaggaatacattaatatacgtaagtaatcatctacctgatttctctattaattttcagattcctcagagacaattagcaacggcgataatgcaaattgattcaagaaccagcactgcacttgaattgcattctactgtaagagacaacaataaaaaaggctctctgttatcatctataagaaggacagttacaccttcaggaacaagacttctgtctcaatggttgagtggaccttcccttgatttgaaagaaattaaaaagcgtcagaaaattgtagcatttttcaaagacaaccgtgatatcactgaaacactacggactatgttgaaaaaagtaaatgatctatcccgtatacttcaaaagtttagtttcggaaggggcgaggcattagaacttattcaaatggcacgttcactagaggtttcaagagaaataagaaaatatttactaaataacacgtcgttgatgaaagctacattaaagagtcaaatcacacagctgactgagtctttaaattttgaaaaaaatttgattgatgatattttgaagtttttaaatgaggaagagctagcaaagtcacaagatgctaaacagaatgcagatgtaactagaatgcttgacatagatgtaaaagacaagaaagaaagtaacaaagatgagatttttgaattaagagattttatcgtaaacccttcgttcaataccaaacttaggaaattgcatgacacttatcagggcgtttggcaaaaaaaaactgagtacaatgctttattaaaaggtttttttgttggcgacctaggtgctaagactttcaccttgaaggaaaggcaaaacggtgagtatgccctccatgtgacaggaacagcctctagtttaaagaaaattgatgagttaattagtaaatcgacggagtaccacggaagttgcttccatattttgcaaaaatcaagccaaacacgatggttgagtcacaaaatttggacagacttggggcacgagttggaattattaaatttaaagattaggaatgaagaggctaatattattgatctttttaaaaggaaatttattgatagaagtaacgaggtcagacaagttgcaactacactgggctatcttgataccttatcgtcctttgctgtgttagctaacgagagaaatttagtctgcccaaaagtggatgagagcaataaactagaagtagtgaatgggagacatctaatggttgaagagggtctttccgcgcgctctttggagacattcacggccaataactgcgaattggcgaaggacaatttatgggtaattaccggaccgaatatgggtggtaaatctacattcttaagacagaatgcaattatagtcattctggcgcaaattggatgttttgttccatgcagtaaggcgcgtgtgggtattgtagataagctttttagccgagttggttcagcagatgatctgtacaatgagatgagtacgttcatggttgagatgatagaaacatcgttcatcttgcaaggagctacggaacggtctttagctattctagatgagattggccgtgggactagtggtaaagaaggcattagcatcgcttatgcaactttaaagtatttgttagagaacaatcaatgcagaacgctttttgctacacattttggtcaagaactgaagcaaatcattgataacaaatgttcgaaaggaatgagcgaaaaggtcaagttttaccaaagcggaatcactgatttaggtggaaacaatttttgttacaaccataagttgaagccgggcatctgcacgaaatcagatgccattagagttgcggaattggccggatttccaatggaagcgttaaaagaagcccgcgaaatattgggataa

SEQ ID NO: 5078 - DNA, 2880 bp, Artificial Sequence
  Description of Artificial Sequence: Synthetic polynucleotide
atgaagcatttctttaggttaccgacagcattcaggcccatttctagggtttccttaagatattctagtactgataccgctcaaccaaaaatatccaaactcaaaattagttttaataaaatttctgaaagtaatagcgaaaaaaaagataatttgggttccattgacacaagaaattgtctttctactcagcaagatgacaaattatccagcactgagccctccaaggcttcccttccaccatctttacaatatgttcgtgacttgatggatttgtataaggatcatgtggttttaacacaaatggggtctttttatgaactttactttgaacaagcaattagatacgctccagaattaaatatatctttgacgaatagggcttatagtcatggcaaagttccatttgctgggtttcctgtacaccagttaagtagacatttaaaaatgcttgttaacaattgcggatacagtgtaactatcgcagagcaattcaaaaaaaaggacgtggcagataatgaagccaataaattctataggagagtgactagaatcgttactcccggcacttttattgatgaagcatttgaaaatttgagggaaaatacatatctcttgaacatcgaatttcctgaaaactgtatgagtcaagtggcagacacgagtttgaaagttggtatatgttggtgtgatgtgagtactggggagatatttgttcaacaagtgtatcttagagatttggtttctgcaataacaagaattcaacctaaggagattttattagatgaaagattacttgagtttcatatcgagagtgggacgtggtatcctgaacttgttgagcttaaaaaattttttataaaatatcagaaaatgcccagtcaacatcgcactattgaatctttctatgggttgtttaatttgggaggtaaagaagcaacggaaaggcaattgaaaatccaatttcaaacttttactcagaaggagttagctgctttgaggaatacattaatatacgtaagtaatcatttacctgatttctctattaattttcagattcctcagagacaattagcaacggcgataatgcaaattgattccagaaccagcactgcacttgaattgcattctactgtaagagacaacaataaaaaaggctctttattatcttctataagaaggacagttacaccttctggaacaagacttttatctcaatggttgagtggaccttcccttgatttgaaagaaattaaaaagcgtcagaaaattgtagcatttttcaaagacaaccgtgatatcactgaaacattgagaactatgttgaaaaaagtaaatgatttatcccgtatacttcaaaagtttagtttcggaaggggcgaggcattagaacttattcaaatggcacgttctttggaggtttctagagaaataagaaaatatttattgaataacacgtctttgatgaaagctacattaaagagtcaaatcacacagttgactgagtctttaaattttgaaaaaaatttgattgatgatattttgaagtttttaaatgaggaagagttggcaaagtctcaagatgctaaacagaatgcagatgtaactagaatgcttgacatagatgtaaaagacaagaaagaaagtaacaaagatgagatttttgaattaagagattttatcgtaaacccttctttcaataccaaacttaggaaattgcatgacacttatcagggcgtttggcaaaaaaaaactgagtacaatgctttattaaaaggtttttttgttggcgacttgggtgctaagactttcaccttgaaggaaaggcaaaacggtgagtatgccctccatgtgacaggaacagcctctagtttaaagaaaattgatgagttaattagtaaatctacggagtaccacggaagttgcttccatattttgcaaaaaagtagccaaacaagatggttgagtcacaaaatttggacagacttggggcacgagttggaattattaaatttaaagattaggaatgaagaggctaatattattgatctttttaaaaggaaatttattgatagaagtaacgaggtcagacaagttgcaactacattaggctatcttgataccttatcttcctttgctgtgttagctaacgagagaaatttagtctgcccaaaagtggatgagagcaataaattagaagtagtgaatgggagacatttaatggttgaagagggtctttccgcgcgctctttggagacattcacggccaataactgcgaattggcgaaggacaatttatgggtaattaccggaccgaatatgggtggtaaatctacattcttaagacagaatgcaattatagtcattttggcgcaaattggatgttttgttccatgcagtaaggcgcgtgtgggtattgtagataagctttttagcagagttggttctgcagatgatttatacaatgagatgagtacgttcatggttgagatgatagaaacatctttcatcttgcaaggagctacggaaagatctttagctattttagatgagattggccgtgggactagtggtaaagaaggcattagcatcgcttatgcaactttaaagtatttgttagagaacaatcaatgcagaacgctttttgctacacattttggtcaagaattgaagcaaatcattgataacaaatgttctaaaggaatgagcgaaaaggtcaagttttaccaaagcggaatcactgatttaggtggaaacaatttttgttacaaccataagttgaagccgggcatctgcacgaaatctgatgccattagagttgcggaattggccggatttccaatggaagcgttaaaagaagcccgcgaaatattgggatga

SEQ ID NO: 5079 - DNA, 564 bp, Saccharomyces cerevisiae
atgagtgtcagccttgagcaaacgctcggattcagaataaaagttacgaacgtgttggatgtagttactgaaggaagattgtattcgttcaattcatccaacaacactcttactatccaaacaacaaagaagaatcaatctccacaaaacttcaaggtgataaaatgtacattcatcaagcatttggaagtcattggtgataagccctcgtttaactcattcaaaaagcaacaaatcaaaccctcatatgtcaacgtggaaagagttgagaagcttttgaaagaaagtgtaatagcatctaaaaagaaagaactcttaaggggcaagggtgtgagtgcagagggtcagttcattttcgatcaaatcttcaagaccataggagatactaagtgggtggctaaagacatcattattcttgatgacgttaaggtgcaacctccatacaaggtcgaagatatcaaagtgctacatgagggaagtaaccaatccattacattaattcaaagaatagtggaaagaagctgggagcagctagaacaagacgatggtaggaaaggtggatag

SEQ ID NO: 5080 - DNA, 564 bp, Artificial Sequence
  Description of Artificial Sequence: Synthetic polynucleotide
atgagtgtcagccttgagcaaacgctcggattcagaataaaagttacgaacgtgttggatgtagttactgaaggaagattgtattctttcaattcttccaacaacactcttactatccaaacaacaaagaagaatcaatctccacaaaacttcaaggtgataaaatgtacattcatcaagcatttggaagtcattggtgataagcccagttttaactctttcaaaaagcaacaaatcaaaccctcttatgtcaacgtggaaagagttgagaagcttttgaaagaaagtgtaatagcatctaaaaagaaagaactcttaaggggcaagggtgtgagtgcagagggtcagttcattttcgatcaaatcttcaagaccataggagatactaagtgggtggctaaagacatcattattcttgatgacgttaaggtgcaacctccatacaaggtcgaagatatcaaagtgttacatgagggaagtaaccaatccattacattaattcaaagaatagtggaaagaagctgggagcagttagaacaagacgatggtaggaaaggtggatga

SEQ ID NO: 5081 - DNA, 696 bp, Saccharomyces cerevisiae
atgtctgagtttttgaatgaaaatcccgacattttagaggagaaccaacttcccactagaaaagaagatagtaccaaggaccttttgttaggcgggttcagcaacgaagctacgctggaaaggagaagccttttgctgaaaatagaccattctttaaagtctcaggtattgcaagatatagaggtcttagacaagcttctttccattcgaattccaccagaactgacttccgatgaggatagtttgccagcagaaagcgaggatgaatccgtagcgggtggaggaaaggaggaggaagagcctgatctcattgatgctcaagaaatatatgatttgatagctcatatttccgaccctgagcacccgttaagtctgggacaactctctgttgtaaatttggaagatattgatgttcatgattcaggaaaccagaacgaaatggctgaagtcgtgatcaaaataacaccaacaattacccattgttctctggcaacgttgattggtctggggatacgggtcaggttagaaaggtctcttcccccaagatttagaattactattttgttgaagaaaggtactcatgatagtgagaaccaggtaaataaacaactaaatgataaggaacgtgtagcagctgcatgtgagaatgaacaactgttgggtgtagtctctaagatgttagtgacttgtaagtaa

SEQ ID NO: 5082 - DNA, 696 bp, Artificial Sequence
  Description of Artificial Sequence: Synthetic polynucleotide
atgtctgagtttttgaatgaaaatcccgacattttagaggagaaccaacttcccactagaaaagaagatagtaccaaggaccttttgttaggcgggttcagcaacgaagctacgttagaaaggagaagccttttgttgaaaatagaccattctttaaagtctcaggtattgcaagatatagaggtcttagacaagcttctttccattagaattccaccagaattgacttccgatgaggatagtttgccagcagaaagcgaggatgaatccgtagcgggtggaggaaaggaggaggaagagcctgatctcattgatgctcaagaaatatatgatttgatagctcatatttccgaccctgagcacccgttaagtttgggacaactctctgttgtaaatttggaagatattgatgttcatgattctggaaaccagaacgaaatggctgaagtcgtgatcaaaataacaccaacaattacccattgttctttggcaacgttgattggtttggggataagagtcaggttagaaaggtctcttcccccaagatttagaattactattttgttgaagaaaggtactcatgatagtgagaaccaggtaaataaacaattgaatgataaggaacgtgtagcagctgcatgtgagaatgaacaattattgggtgtagtctctaagatgttagtgacttgtaagtga

SEQ ID NO: 5083 - DNA, 1176 bp, Saccharomyces cerevisiae
atgggatattttgttccggattcacatatcgaaaatctaaagtcatataaatatcaaagtgaagaccgctcgctggtatcgaagtatttcttaaagccattttggcaaagattttgtcacatatttcccacgtggatggcgcccaacatcatcacattatcaggatttgcttttatagttatcaacgtgttgactgtattctattacgatccaaaccttaacacagatacgcctcgctggacatatttttcttacgctttaggtgtattcctatatcaaacgttcgatggatgtgatggtgtacacgctcgccgtatcaatcaatcaggacccttaggagaactattcgatcatagtattgatgccattaattctactctgtctattttcatcttcgcatccgaaactggaatgggattttcgtataacttaatgttatcccaatttgcgatgctgacgaatttttacttaagtacttgggaagagtaccatacacacacattatacttaagtgagttttctggacccgtggaaggcatcctgattgtttgcgtttcattgatactgacaggtatatacggaaaacaggtaatctggcatacctacttatttacaattacagttggtgataaggtaattgatgtagacactctagatattgttttttccctagctgttttcggtttggttatgaacgcattgtctgcgaaaagaaacgtggataagtattatagaaacagcacttcttcggccaacaatatcacgcaaattgagcaagatagtgctataaaaggtcttttgcccttttttgcctattatgcaagcattgctttactagtgtggatgcaaccaagctttattacactctctttcatcctttccgttggtttcacgggagcatttaccgtcggaagaataatcgtttgccatttaactaagcagagctttcccatgttcaatgcacccatgttaattcctttgtgccagatagtattgtacaaaatatgtctatccctttggggaattgagtctaataaaatcgtctttgccctatcttggcttgggttcggtctctcactaggtgttcacattatgtttatgaatgacattatccatgaatttactgagtacctggacgtttatgctttatccatcaagcgctccaagctgacataa

SEQ ID NO: 5084 - DNA, 1176 bp, Artificial Sequence
  Description of Artificial Sequence: Synthetic polynucleotide
atgggatattttgttccggattctcatatcgaaaatttgaagagttataaatatcaaagtgaagaccgctctttagtatccaagtatttcttaaagccattttggcaaagattttgtcacatatttcccacgtggatggcgcccaacatcatcacattatctggatttgcttttatagttatcaacgtgttgactgtattctattacgatccaaaccttaacacagatacgcctcgctggacatatttttcttacgctttaggtgtattcctctatcaaacgttcgatggatgtgatggtgtacacgctcgccgtatcaatcaaagtggacccttaggagaattattcgatcatagtattgatgccattaattctactttatctattttcatcttcgcatccgaaactggaatgggattttcttataacttaatgttatcccaatttgcgatgcttacgaatttttacttaagtacttgggaagagtaccatacacacacattatacttaagtgagttttctggacccgtggaaggcatcttgattgtttgcgtttctttgatattaacaggtatatacggaaaacaggtaatctggcatacctacttatttacaattacagttggtgataaggtaattgatgtagacactttagatattgttttttccttggctgttttcggtttggttatgaacgcattgtctgcgaaaagaaacgtggataagtattatagaaacagcacttcttctgccaacaatatcacgcaaattgagcaagatagtgctataaaaggtcttttgcccttttttgcctattatgcaagcattgctttattggtgtggatgcaaccaagctttattacactctctttcatcctttccgttggtttcacgggagcatttaccgtcggaagaataatcgtttgccatttaactaagcagagctttcccatgttcaatgcacccatgttaattcctttgtgccagatagtattgtacaaaatatgtttatccctttggggaattgagtctaataaaatcgtctttgccttatcttggcttgggttcggtctctccttgggtgttcacattatgtttatgaatgacattatccatgaatttactgagtacttggacgtttatgctttatccatcaagcgctccaagttaacatga

SEQ ID NO: 5085 - DNA, 1884 bp, Saccharomyces cerevisiae
atgaatgaaatggaaaacacagatccagtattacaggatgatctcgtatccaaatatgagagggaattaagcacagaacaggaagaggatacgcctgttatccttacgcagttgaatgaagatggcaccacttcgaattatttcgacaaaaggaaactaaaaattgcccctagatcaacactacagttcaaagtgggacctccatttgaattagtgagagattattgtccagtcgttgagtctcataccggaagaacactagatttacgaattattccaagaattgacagagggttcgaccatattgatgaagagtgggtaggttataaaagaaattattttaccttagtatcaacgtttgaaacggcaaattgtgatttggatacttttttaaagagcagttttgatcttctcgttgaagactcttcagtagaaagcagattaagagtgcaatatttcgctatcaaaataaaagctaagaatgacgacgacgacacggaaatcaatctcgtccagcatacagcgaaacgcgacaaaggtcctcaattttgtccttcagtatgtccgttggtgccttcccctttgccaaaacatcaaatcataagagaagcttcaaatgttcgaaatatcactaaaatgaaaaaatacgattccactttttatttgcacagagaccacgttaattatgaagaatatggagtggactctttattgttttcctatccagaagattctattcagaaagttgcccgttatgaaagagttcaatttgcttcatcaattagcgtgaagaaaccatcccaacaaaataaacactttagcttgcatgtaattttaggtgcagtggtagatccagatacctttcatggggagaatcccggaattccttatgatgaactggctttaaaaaatggatcaaaagggatgtttgtgtatttgcaagaaatgaaaacgcctcctcttattattagaggaagatcaccttctaactatgcgtcatctcagcgaataactgtgagaacaccgtcgagtgtcaattcctcacaaaacagcacaaaaagaaaaatgccatcaatggcgcagccgttaaatgaaagttgcttaaatgcaagaccttcgaaaaggcgatccaaagtggcgctaggtgcaccgaactctggggcctccatctcgcctatcaaatctcgtcaatccacaccaatggaagcttcgaaggaaaatgaggatccgttcttcaggccaaataaaagggtggagactcttgaacatatccagaacaaactgggtgctttgaaaaatcaatgtccagattcctctctgaaatatccgagttcatcttcaagaggtatggaagggtgtttagaaaaggaggatttagtttactcaagtagtttttctgttaatatgaagcaaatcgaactgaaaccggcacgctcttttgaacatgagaatattttcaaagtaggctcattagcattcaaaaaaatcaatgaattacctcatgaaaattatgatataacaatagagaagaaatcaatggaacagaattatctaagaccagagataggctcacgttctgaatgcaaaacaagctatggtaacgaactctccctttcaaatatttctttctctatactacctaactcagcagaaaattttcacttggaaactgcacttttcccagctacggaagaggatgtgccaaggacattttcaagaatattagaaacaggttcgtttcaaaattattatcaaaaaatggatgcagaaaatgcagatagggtatattcgaaaggggtcaagttgattgcaagcggtactctaccatctggtatatttaatagggaagaattgtttgaggaagatagtttctataagtattaa

SEQ ID NO: 5086 - DNA, 1884 bp, Artificial Sequence
  Description of Artificial Sequence: Synthetic polynucleotide
atgaatgaaatggaaaacacagatccagtattacaggatgatctcgtatccaaatatgagagggaattaagcacagaacaggaagaggatacgcctgttatccttacgcagttgaatgaagatggcaccacttccaattatttcgacaaaaggaaattgaaaattgcccctagatctacattacagttcaaagtgggacctccatttgaattagtgagagattattgtccagtcgttgagtctcataccggaagaacattagatttaagaattattccaagaattgacagagggttcgaccatattgatgaagagtgggtaggttataaaagaaattattttaccttagtatctacgtttgaaacggcaaattgtgatttggatacttttttaaagagcagttttgatcttctcgttgaagactcttctgtagaaagcagattaagagtgcaatatttcgctatcaaaataaaagctaagaatgacgacgacgacacggaaatcaatctcgtccagcatacagcgaaacgcgacaaaggtcctcaattttgtccttctgtatgtccgttggtgccttcccctttgccaaaacatcaaatcataagagaagcttctaatgttagaaatatcactaaaatgaaaaaatacgattccactttttatttgcacagagaccacgttaattatgaagaatatggagtggactctttattgttttcctatccagaagattctattcagaaagttgcccgttatgaaagagttcaatttgcttcttccattagcgtgaagaaaccatcccaacaaaataaacactttagcttgcatgtaattttaggtgcagtggtagatccagatacctttcatggggagaatcccggaattccttatgatgaattggctttaaaaaatggatctaaagggatgtttgtgtatttgcaagaaatgaaaacgcctcctcttattattagaggaagatctccttctaactatgcgtcttctcagaggataactgtgagaacaccgtccagtgtcaattcctctcaaaacagcacaaaaagaaaaatgccaagcatggcgcagccgttaaatgaaagttgcttaaatgcaagaccttccaaaaggagatccaaagtggcgcttggtgcaccgaactctggggcctccatctctcctatcaaatctcgtcaatccacaccaatggaagcttccaaggaaaatgaggatccgttcttcaggccaaataaaagggtggagactcttgaacatatccagaacaaattgggtgctttgaaaaatcaatgtccagattcctctttgaaatatccgagttcttcttctagaggtatggaagggtgtttagaaaaggaggatttagtttactctagtagtttttctgttaatatgaagcaaatcgaattgaaaccggcacgctcttttgaacatgagaatattttcaaagtaggctctttagcattcaaaaaaatcaatgaattacctcatgaaaattatgatataacaatagagaagaaatctatggaacagaattatttaagaccagagataggctctcgttctgaatgcaaaacaagctatggtaacgaactctccctttctaatatttctttctctatattacctaactctgcagaaaattttcacttggaaactgcacttttcccagctacggaagaggatgtgccaaggacattttccagaatattagaaacaggttcttttcaaaattattatcaaaaaatggatgcagaaaatgcagatagggtatattctaaaggggtcaagttgattgcaagcggtactttaccatctggtatatttaatagggaagaattgtttgaggaagatagtttctataagtattga

SEQ ID NO: 5087 - DNA, 306 bp, Saccharomyces cerevisiae
atgatcaatgcaataatgattggtagttgccaaacatttaatacgatcctctgtaatatttctatgaataattatcacagcaacgttcaattatcttcaattcggcttcagtactgtatgaaatactcgctaacattttctttattctataatagcacagtgacacttaaacgtcaaacgtggcgcacattaatatacgatgtatgcatttggcttgacactgctgtaataaggaacatcatcatccgtcaactagtagtcacattagtagtgtattatcacatggtgtgtaagaacattacgtaa

SEQ ID NO: 5088 - DNA, 306 bp, Artificial Sequence
  Description of Artificial Sequence: Synthetic polynucleotide
atgatcaatgcaataatgattggtagttgccaaacatttaatacgatcctctgtaatatttctatgaataattatcacagcaacgttcaattatcttccattagacttcagtactgtatgaaatactctttaacattttctttattctataatagcacagtgacacttaaacgtcaaacgtggcgcacattaatatacgatgtatgcatttggcttgacactgctgtaataaggaacatcatcatccgtcaattggtagtcacattagtagtgtattatcacatggtgtgtaagaacattacgtga

SEQ ID NO: 5089 - DNA, 480 bp, Saccharomyces cerevisiae
atgaagtgcactttagtttccacattgtttgccatcaccaatattctagttgcacatgcacaagtaagcaactcctcagacacgttggacgtacaatttgcgaatagtacgaactcgtacatagaaggaaaatttaattcgactgatgaagccttcaacagcagcgcatcttggtccttagcagctcagcagaaaaagatatctaatgcagctgtatatgatgtgggtggttggaatggctcattgtatcgttccaatagaagcgctgttgcagatcatcaacccggcaaaaagcaagatgccgctatttcacagatcagtgatggtcaaatccaagccactgcgtctggacctgagactaccgctgctactaccccaagtagtaccgcaaatgtctctgtctatgaaggtgctggtatgaaggttgaatccaagaacatgggttatatagttggagtagcagcgctattatttttataa

SEQ ID NO: 5090 - DNA, 480 bp, Artificial Sequence
  Description of Artificial Sequence: Synthetic polynucleotide
atgaagtgcactttagtttccacattgtttgccatcaccaatattttggttgcacatgcacaagtaagcaactccagtgacacgttggacgtacaatttgcgaatagtacgaactcttacatagaaggaaaatttaattctactgatgaagccttcaacagcagcgcatcttggtccttagcagctcagcagaaaaagatatctaatgcagctgtatatgatgtgggtggttggaatggctctttgtatcgttccaatagaagcgctgttgcagatcatcaacccggcaaaaagcaagatgccgctatttctcagatcagtgatggtcaaatccaagccactgcgtctggacctgagactaccgctgctactaccccaagtagtaccgcaaatgtctctgtctatgaaggtgctggtatgaaggttgaatccaagaacatgggttatatagttggagtagcagcgttattatttttatga

SEQ ID NO: 5091 - DNA, 732 bp, Saccharomyces cerevisiae
atggctagaaatagaacaacctccaagaaaaatgttcaaagtaaacgcttaatagacagagtggttcccatggacaagattaaaaaagttggcgtagcgaaaaaaaaaaccgtagaacacactaaagaaggatttagcgttgtcaacggtaagctagtaagcagcaatgacgtcggtgtactgttaagagaagcacagggtgctatcgataaaagaactaatgtttcccaaagaaataggaaaaagggaataaagaataataggccccacaaagacataaacagcagtcctgactggggcaatgcccacagaggaaccgattggcagagcgaaaaagcaaacggcatgaacagggccaagaactctcggaattttaccactaatattaaattgcagcgacaacattttggcgaagaaatacaaggtggcagccagcttgtgatatctacaaattcagatgcttcagataaattgttaatgctattcaacctaactttgggagtaaaccaagaaaacttgaaaaatgttctggaaaacatttctcaggtgcagatagctcaaattagggttagagacctgccttcaggatctgccaccgctaaggtccgtctggcatatcctacaacacagtctttggagaaggtaagaaaactgttccatggcgctctagttgatggaaggcgcatccaagtggtgattgcatctgatgaatcgtcccacttgtcgtattag

SEQ ID NO: 5092 - DNA, 732 bp, Artificial Sequence
  Description of Artificial Sequence: Synthetic polynucleotide
atggctagaaatagaacaacctccaagaaaaatgttcaaagtaaacgcttaatagacagagtggttcccatggacaagattaaaaaagttggcgtagcgaaaaaaaaaaccgtagaacacactaaagaaggatttagcgttgtcaacggtaagttggtaagcagcaatgacgtcggtgtattgttaagagaagcacagggtgctatcgataaaagaactaatgtttcccaaagaaataggaaaaagggaataaagaataataggccccacaaagacataaacagcagtcctgactggggcaatgcccacagaggaaccgattggcagagcgaaaaagcaaacggcatgaacagggccaagaactctagaaattttaccactaatattaaattgcagagacaacattttggcgaagaaatacaaggtggcagccagcttgtgatatctacaaattctgatgcttctgataaattgttaatgcttttcaacttgactttgggagtaaaccaagaaaacttgaaaaatgttttggaaaacatttctcaggtgcagatagctcaaattagggttagagacttgccttctggatctgccaccgctaaggtccgtttagcatatcctacaacacagtctttggagaaggtaagaaaattattccatggcgctttggttgatggaaggcgcatccaagtggtgattgcatctgatgaatcttcccacttgagttattga

SEQ ID NO: 5093 - DNA, 651 bp, Saccharomyces cerevisiae
atgtcttcggaaccatttaagaacgtctacttgctacctcaaacaaaccaattgctgggtttgtacaccatcatcagaaataagaatacaactagacctgatttcattttctactccgatagaatcatcagattgttggttgaagaaggtttgaaccatctacctgtgcaaaagcaaattgtggaaactgacaccaacgaaaacttcgaaggtgtctcattcatgggtaaaatctgtggtgtttccattgtcagagctggtgaatcgatggagcaaggattaagagactgttgtaggtctgtgcgtatcggtaaaattttaattcaaagggacgaggagactgctttaccaaagttattctacgaaaaattaccagaggatatatctgaaaggtatgtcttcctattagacccaatgctggccaccggtggtagtgctatcatggctacagaagtcttgattaagagaggtgttaagccagagagaatttacttcttaaacctaatctgtagtaaggaagggattgaaaaataccatgccgccttcccagaggtcagaattgttactggtgccctcgacagaggtctagatgaaaacaagtatctagttccagggttgggtgactttggtgacagatactactgtgtttaa

SEQ ID NO: 5094 - DNA, 651 bp, Artificial Sequence
  Description of Artificial Sequence: Synthetic polynucleotide
atgtcttctgaaccatttaagaacgtctacttgttacctcaaacaaaccaattgttgggtttgtacaccatcatcagaaataagaatacaactagacctgatttcattttctactccgatagaatcatcagattgttggttgaagaaggtttgaaccatttacctgtgcaaaagcaaattgtggaaactgacaccaacgaaaacttcgaaggtgtctctttcatgggtaaaatctgtggtgtttccattgtcagagctggtgaaagtatggagcaaggattaagagactgttgtaggtctgtgcgtatcggtaaaattttaattcaaagggacgaggagactgctttaccaaagttattctacgaaaaattaccagaggatatatctgaaaggtatgtcttcttattagacccaatgttggccaccggtggtagtgctatcatggctacagaagtcttgattaagagaggtgttaagccagagagaatttacttcttaaacttgatctgtagtaaggaagggattgaaaaataccatgccgccttcccagaggtcagaattgttactggtgccctcgacagaggtttggatgaaaacaagtatttggttccagggttgggtgactttggtgacagatactactgtgtttga

SEQ ID NO: 5095 - DNA, 1155 bp, Saccharomyces cerevisiae
atggaccagctaagtgacagctatgctttgtacaatcaaccggtagtgatcgacaatggttctgggatcataaaagcaggatttagtggtgaggaaaggcctaaagcactggaatattgtctcgtaggaaataccaaatatgataaagttatgctcgaaggtctgcaaggagatacatttattggaaacaatgcccaaaaactgcgtggattattaaaattacgataccccataaagcacggcgtggtggaagattgggattctatggaactaatatggtcatatgtgttaaatgaagtcctacagttgcaaaatataggtgagcatcctttattaattacggaagccccgatgaatcctttgaagaatagagagcagatggctcaagtattgttcgagacctttgacgtatcggctttgtacgtttcaaaccctgctgttctgtcattatatgctagtgggagaactacaggttgtgtagttgactgtggtgaaggatactgtagcactgttcccatatatgacggctttgcattacctgcgtctatgatgaggatggatattggaggagcagatatcacagagcagttacaatttcaactacggaaatcagctggtgtttcgttgttttccagcagtgaacgagagattgttcgcacgatgaaagagaaagtttgttatttggccaagaatattaaaaaggaagaggagaaatacttacaaggtactcaagatttaatctcgacattcaaattgcccgacgggaggtgtatagaggtggggaatgatcgatatcgtgctccagaaatattattttcacctcaaatcatcggcttagggtacgatggattatctgatatgtgcatgcaatctatttggaaagtcgatctggatttaaggaaacctttactgtcatcgataatcctaagtggcggaactacaacgcttaaaggctttggagaccgaatgctatgggatttggaggcattaaccaaaggaacatccaagataaagattatagccccttcagaaagaaaatatactacatggattggtggttctattttaacggggttatctacctttcaaagactttggaccaaaaagtcagattggctagaggacagtacccgtgtttattcgaacctaatgtaa

SEQ ID NO: 5096 - DNA, 1155 bp, Artificial Sequence
  Description of Artificial Sequence: Synthetic polynucleotide
atggaccagttgagtgacagctatgctttgtacaatcaaccggtagtgatcgacaatggttctgggatcataaaagcaggatttagtggtgaggaaaggcctaaagcattggaatattgtctcgtaggaaataccaaatatgataaagttatgctcgaaggtttacaaggagatacatttattggaaacaatgcccaaaaattacgtggattattaaaattaagataccccataaagcacggcgtggtggaagattgggattctatggaattgatatggagttatgtgttaaatgaagtcttacagttgcaaaatataggtgagcatcctttattaattacggaagccccgatgaatcctttgaagaatagagagcagatggctcaagtattgttcgagacctttgacgtatccgctttgtacgtttctaaccctgctgttttatctttatatgctagtgggagaactacaggttgtgtagttgactgtggtgaaggatactgtagcactgttcccatatatgacggctttgcattacctgcgtctatgatgaggatggatattggaggagcagatatcacagagcagttacaatttcaattaagaaaatctgctggtgtttctttgttttccagcagtgaaagagagattgttcgcacgatgaaagagaaagtttgttatttggccaagaatattaaaaaggaagaggagaaatacttacaaggtactcaagatttaatcagtacattcaaattgcccgacgggaggtgtatagaggtggggaatgatagatatcgtgctccagaaatattattttctcctcaaatcatcggcttagggtacgatggattatctgatatgtgcatgcaatctatttggaaagtcgatttggatttaaggaaacctttattatcttctataatcttaagtggcggaactacaacgcttaaaggctttggagacagaatgttatgggatttggaggcattaaccaaaggaacatccaagataaagattatagccccttctgaaagaaaatatactacatggattggtggttctattttaacggggttatctacctttcaaagactttggaccaaaaagagtgattggttggaggacagtacccgtgtttattccaacttgatgtga

SEQ ID NO: 5097 - DNA, 336 bp, Saccharomyces cerevisiae
atgactaaaagtatatatattatcatcggatatatgctacatgatgaggagtttttctatttcttttttatttcattctatacactttggatcgtgttttttcttttgcacttgagtttcttttcaacattatcattcggtatatttcacgattttgacaccgatgtttacataaaagtgggtaattatattttgcattttctcgaattgagtaaaaatagtaaccttttaaagaattcttcagaaatgttaaagcatttccgattggcatcattgatgtatatgtacgtatatactcagatgatttgcccctcgttacttggcatcaggaattag

SEQ ID NO: 5098 - DNA, 336 bp, Artificial Sequence
  Description of Artificial Sequence: Synthetic polynucleotide
atgactaaaagtatatatattatcatcggatatatgttgcatgatgaggagtttttctatttcttttttatttctttctatacactttggatcgtgttttttcttttgcacttgagtttcttttctacattatctttcggtatatttcacgattttgacaccgatgtttacataaaagtgggtaattatattttgcattttctcgaattgagtaaaaatagtaaccttttaaagaattcttctgaaatgttaaagcatttcagattggcaagtttgatgtatatgtacgtatatactcagatgatttgcccctctttacttggcatcaggaattga

SEQ ID NO: 5099 - DNA, 2553 bp, Saccharomyces cerevisiae
atggctctgccaatagagggcaaattatccatggcaaataataggatcgaaaggttaaaatcaccctcgtcttcatcaacatgctcaatggacgaggttctcattacttcaagcaataacagcagctctatatgtttagagaccatgcgtcaacttcctcgggaaggtgtttctggtcagataaatattatcaaggaaactgcagcttcgtcctcttctcacgctgctctcttcatcaagcaagatctttacgagcatatagatcccctccctgcttatccaccgagctatgatctagtaaatcccaataaagaggtccgctttcctatatttggtgacacggcaccatgcccaaagtcttctctccctcctttgtatgcacctgcagtatatgaattgacgttgatatccttaaaattggaaaggctttcaccttatgaaatttctagtaacaggagctggaggaatttcatcattgaaattaattcgactcaactaaatttttaccatattgacgaatctttgacgaaacacattaggaattattcaagcggggaaacaaaatctgaaaaagaggatagaattcatagtgacttggtccatcgcagtgatcaatcacaacatctgcatcaccgtctcttcactctaccgacgagatcagcttcggagtttaaaaaagcagatcaagaacggatctcttatagagtgaaacgtgatcgatcgcggtatttaaccgatgaagctctttacaagtctttcactttacaaaatgcaagatttgggataccaacggattataccaagaagagttttgtgttaagaatgtcttgtgaaagcgaacagtttttattacggttctctcatatagatgatatgattgactggtctatgtacctatcaatcgggatatctgtgtctttggacttggaagtcagggagtatccagattatcgaattgttcccagaagaaggagaaggagaaggaggagaaggaggagaagaagacacactcatagaagtgagagttcgatggggtctttttcgcagagattcattcgttcgaattccagaccggacttaatccaaagatatagtaccgggtctagcactaataacaatacaactatcagggaacgctcgaatactttcacagctggtctactagatcattactgcactggcctctcaaagacgcctacagaggcattgatatcttcggctgcatcaggagaatccagtgataacagtaccctgggatcaacaaggtcattatctggttgctcagcttcccgttcgattgcatctagaagtttaaaatttaaaattaagaactttttcaggcctaaaaattcttcacgcacagaaaagcttcacagactcaggtccaactcaagtaacttaaatagtgttattgaaacggaagaagatgatgaacaccatgaatcaagcgggggagatcatccagagcctggtgttccagtaaataccaccattaaagtagagcgtccaatgcacagaaatagagctatttccatgccccaaagacagtcattgaggcgtgcaattagcgaggaggttgtccccatcaaatttccaaatagcacagtgggtgaatcagttcattcaccctctcctattgagcatctttccgttgatggctgcgagattatgctgcaatcacaaaatgcggttatgaaagaggaattacggagtgttgcgtcgaatttggtagccaatgaaagggatgaggcatctattagacctaaacctcaaagctcttcgatatacctatcaggattagctcctaatggggaatccgccacagatttatcccaaagcagtaggtcgttatgtctcacaaaccgtgacgctgaaatcaatgacgatgaaagcgctactgagaccgatgaggacgaaaatgacggtgaaaccgatgaatatgctggcgatgatactaatgatgatactgatgacagtaatattggttatgcttatggcagtgaaagtgattattcatgtttaattgaagaacgaataagaaatcgaaggcgagcatcttctactctaagttgcttctccaatataccttacggaacggatgatattaaatggaaaccagctattaaggaaatttcaagaaggcgttatttgagggattctctgaagtgcatcaaaccatttctagatagtaacgactgtttgggtaaggttatctatattccagtttcgggaccaacctttgaaacaagtaataaaattcactttagcaaccgccagagcttacagaagcagaagaatcattttttaaaaggcttcatcgtgggacctacggcgttgatagaacttaattgtaaaaataagaatgcaattgttggaacaacaaaggacgctgaagatcatggggaggacgacggtgacggtgatgatggtgaggatgatgatgacgacgacgacgatgatgatgatgatgacgacgacgaagacgacgacgatgatgatgatgatgatgatgacgacgacgatgacgatgatgatggacagattactgcataa

SEQ ID NO: 5100 - DNA, 2553 bp, Artificial Sequence
  Description of Artificial Sequence: Synthetic polynucleotide
atggctttgccaatagagggcaaattatccatggcaaataataggatcgaaaggttaaaaagtccctcttcttcttctacatgctctatggacgaggttctcattacttccagcaataacagcagctctatatgtttagagaccatgcgtcaacttcctagagaaggtgtttctggtcagataaatattatcaaggaaactgcagcttcttcctcttctcacgctgctctcttcatcaagcaagatctttacgagcatatagatcccctccctgcttatccaccgagctatgatttagtaaatcccaataaagaggtccgctttcctatatttggtgacacggcaccatgcccaaagtcttctctccctcctttgtatgcacctgcagtatatgaattgacgttgatatccttaaaattggaaaggctttctccttatgaaatttctagtaacaggagctggaggaatttcatcattgaaattaattctactcaattgaatttttaccatattgacgaatctttgacgaaacacattaggaattattctagcggggaaacaaaatctgaaaaagaggatagaattcatagtgacttggtccatcgcagtgatcaatctcaacatttgcatcaccgtctcttcactttaccgacgagatctgcttctgagtttaaaaaagcagatcaagaaagaatctcttatagagtgaaacgtgatagatctagatatttaaccgatgaagctctttacaagtctttcactttacaaaatgcaagatttgggataccaacggattataccaagaagagttttgtgttaagaatgtcttgtgaaagcgaacagtttttattaagattctctcatatagatgatatgattgactggtctatgtacctttctatcgggatatctgtgtctttggacttggaagtcagggagtatccagattatagaattgttcccagaagaaggagaaggagaaggaggagaaggaggagaagaagacacactcatagaagtgagagttctatggggtctttttcccagagattcattcgttccaattccagaccggacttaatccaaagatatagtaccgggtctagcactaataacaatacaactatcagggaacgcagtaatactttcacagctggtttattagatcattactgcactggcctctctaagacgcctacagaggcattgatatcttctgctgcatctggagaatccagtgataacagtaccttaggaagtacaaggtctttatctggttgctctgcttcccgttctattgcatctagaagtttaaaatttaaaattaagaactttttcaggcctaaaaattcttctcgcacagaaaagcttcacagactcaggtccaacagtagtaacttaaatagtgttattgaaacggaagaagatgatgaacaccatgaaagtagcgggggagatcatccagagcctggtgttccagtaaataccaccattaaagtagagcgtccaatgcacagaaatagagctatttccatgccccaaagacagtctttgaggcgtgcaattagcgaggaggttgtccccatcaaatttccaaatagcacagtgggtgaatctgttcattctccctctcctattgagcatctttccgttgatggctgcgagattatgttacaatctcaaaatgcggttatgaaagaggaattaagaagtgttgcgtctaatttggtagccaatgaaagggatgaggcatctattagacctaaacctcaaagctcttctatatacctttctggattagctcctaatggggaatccgccacagatttatcccaaagcagtaggtctttatgtctcacaaaccgtgacgctgaaatcaatgacgatgaaagcgctactgagaccgatgaggacgaaaatgacggtgaaaccgatgaatatgctggcgatgatactaatgatgatactgatgacagtaatattggttatgcttatggcagtgaaagtgattattcttgtttaattgaagaaagaataagaaatagaaggagagcatcttctactttaagttgcttctccaatataccttacggaacggatgatattaaatggaaaccagctattaaggaaatttctagaaggcgttatttgagggattctttgaagtgcatcaaaccatttttggatagtaacgactgtttgggtaaggttatctatattccagtttctggaccaacctttgaaacaagtaataaaattcactttagcaaccgccagagcttacagaagcagaagaatcattttttaaaaggcttcatcgtgggacctacggcgttgatagaacttaattgtaaaaataagaatgcaattgttggaacaacaaaggacgctgaagatcatggggaggacgacggtgacggtgatgatggtgaggatgatgatgacgacgacgacgatgatgatgatgatgacgacgacgaagacgacgacgatgatgatgatgatgatgatgacgacgacgatgacgatgatgatggacagattactgcatga

SEQ ID NO: 5101 - DNA, 1293 bp, Saccharomyces cerevisiae
atgttgcacatgaattcgttgtggggttgttttcttttcgttttactagccgtgacaggtgctgtgcagggtctccaagaggattacagtgaatacgctgtttacaggtttacttcagacaactattctaccctggtaagagatgtgatcgcaccgctgacagatgattatgatgtatggacgagaagcaataatttcattgatattaagttgcctaaagaaataggtgagcagataaatgatgggcaggtgatcatagataacatgaatgaattgatacaaaatacattgcctacaagtcagatgatggcacgtgagcaggctgtttttgaaaatgattacgatttcttctttaacgaatacagggacctggatactatttatatgtggttggatcttctagaaagaagctttcccagtttggttgcagtggaacacttgggcaggacatttgaaggcagagagctaaaagctctgcatatatccggaaacaagccagaatcaaacccggaaaagaagactattgttatcacaggtggtatacatgccagagagtggatcagtgtcagtaccgtctgttgggcactttatcagttgttaaatcgatatggttcgtctaagaaggaaaccaaatacctggacgatttggactttttagtcatacctgtgttcaatccagacggatacgcatatacgtggtcgcatgacagactatggcgtaagaatcgtcaaaggactcatgttcctcaatgtcttggtatcgacattgatcattcctttggtttccagtgggaaaaggcacacacccacgcttgcagcgaagagtatagtggggaaacgcccttcgaagcttgggaagcatctgcttggtacaagtatattaatgaaaccaagggcgattacaaaatttatggctacattgacatgcattcgtattcacaggagattttatatccctacgcatactcgtgtgatgccttgcccagagacttagaaaatttgttggagttatcatatggcttatccaaggccatccgttcaaaatcaggtagaaactacgacgtaatctccgcatgtaaggaccgtggttccgacatattccccggcctcggtgcaggttctgcgttggacttcatgtaccaccacagagcacattgggcattccagttgaaattacgggatacagggaaccatggatttttattgcctccagaaaacatcaagccagttggaaaggaaacttatgctgctttaaagtacttttgtgacttcctactagacccagagatataa

SEQ ID NO: 5102 - DNA, 1293 bp, Artificial Sequence
  Description of Artificial Sequence: Synthetic polynucleotide
atgttgcacatgaattctttgtggggttgttttcttttcgttttattagccgtgacaggtgctgtgcagggtctccaagaggattacagtgaatacgctgtttacaggtttacttctgacaactattctaccttggtaagagatgtgatcgcaccgttaacagatgattatgatgtatggacgagaagcaataatttcattgatattaagttgcctaaagaaataggtgagcagataaatgatgggcaggtgatcatagataacatgaatgaattgatacaaaatacattgcctacaagtcagatgatggcacgtgagcaggctgtttttgaaaatgattacgatttcttctttaacgaatacagggacttggatactatttatatgtggttggatcttttagaaagaagctttcccagtttggttgcagtggaacacttgggcaggacatttgaaggcagagagttgaaagctttacatatatccggaaacaagccagaatctaacccggaaaagaagactattgttatcacaggtggtatacatgccagagagtggatcagtgtcagtaccgtctgttgggcactttatcagttgttaaatagatatggttcttctaagaaggaaaccaaatacttggacgatttggactttttagtcatacctgtgttcaatccagacggatacgcatatacgtggtctcatgacagattatggcgtaagaatcgtcaaaggactcatgttcctcaatgtcttggtatcgacattgatcattcctttggtttccagtgggaaaaggcacacacccacgcttgcagcgaagagtatagtggggaaacgcccttcgaagcttgggaagcatctgcttggtacaagtatattaatgaaaccaagggcgattacaaaatttatggctacattgacatgcattcttattctcaggagattttatatccctacgcatactcttgtgatgccttgcccagagacttagaaaatttgttggagttatcttatggcttatccaaggccatccgttctaaatctggtagaaactacgacgtaatctccgcatgtaaggaccgtggttccgacatattccccggcctcggtgcaggttctgcgttggacttcatgtaccaccacagagcacattgggcattccagttgaaattaagagatacagggaaccatggatttttattgcctccagaaaacatcaagccagttggaaaggaaacttatgctgctttaaagtacttttgtgacttcttattagacccagagatatga

SEQ ID NO: 5103 - DNA, 396 bp, Saccharomyces cerevisiae
atgtcagaggatctttcacctacaagcagcagggtggatttgagcaatcctcatgggtttaccaaagagggagtggatttatcgaagctgtcaccacaagaactaaaattgtataaaatgtatgggaagcttccatccaaaaaagatctgttaagacataagatgcaggatcgtcaatattttgacagcggagattatgcattgaaaaaggccggagtcattaagtcggatgacgttatcgtgaataattctagtaataatctaccagtgaccaatcctagcggtttaagagagtctattattagaagacgtatgagtagtagtagtggtggcgattctatctcgagacaaggaagtatctcaagtggacctccaccaagatctccaaataaatga

SEQ ID NO: 5104 - DNA, 396 bp, Artificial Sequence
  Description of Artificial Sequence: Synthetic polynucleotide
atgtctgaggatctttctcctacaagcagcagggtggatttgagcaatcctcatgggtttaccaaagagggagtggatttatccaagttatctccacaagaattgaaattgtataaaatgtatgggaagcttccatccaaaaaagatttattaagacataagatgcaggatcgtcaatattttgacagcggagattatgcattgaaaaaggccggagtcattaagagtgatgacgttatcgtgaataattctagtaataatttaccagtgaccaatcctagcggtttaagagagtctattattagaagacgtatgagtagtagtagtggtggcgattctatctccagacaaggaagtatctccagtggacctccaccaagatctccaaataaatga

SEQ ID NO: 5105 - DNA, 876 bp, Saccharomyces cerevisiae
atgggcaagaagaagagtaagaaccaattaaacactggaggtgttcctaatggtgtccataataccaagaaagaggcagctttgccacctttgggaaataagctgggaagcgcaagttttacagctataaatacgctgactaagcccgctttgttttcattttatgatgacgatattaccaagaatgaaggtaatgtttatgacaaggctttattgtctaacgcctctcaattggaaatggttccgccatccgcgactgcgagacacgaaaggtcattgtatgcgaaaataatcaatactattgctgcattttttattctattcatagcaggaatactcttccccatgatatcagaatgtttgtttgataatgaccaattggcaaagggagatatcgtatcctttttaaagcatggtatagaaattaagaacaagatcgtcgcggaacctgacatggtgcctgattgggctgtatttggtactgaaggtgttatctttggttccatagtaccattcattgactctttcgttcgttatcaacaccagccaaaaaccaggtcatcagtttacaaaaacaccctaggatcatttataagatgtgccaatactcttttgggcttaatatttggtattaggaaacttgaatggtcctcctctttgcaggcagctggtgcatggagcttattaaacattgttctgtggttgttctttgatggcactttaaccgtttttttcccaggtctagtaattggtgcccttagtgcgttcacttgctcacaatgtttctcgcagttgtcactggcgttgtattttatagatttctatttttttgggtttttgatgttcagcaagttgggcagatatttattcaattaa

SEQ ID NO: 5106 - DNA, 876 bp, Artificial Sequence
  Description of Artificial Sequence: Synthetic polynucleotide
atgggcaagaagaagagtaagaaccaattaaacactggaggtgttcctaatggtgtccataataccaagaaagaggcagctttgccacctttgggaaataagttgggaagcgcaagttttacagctataaatacgttgactaagcccgctttgttttctttttatgatgacgatattaccaagaatgaaggtaatgtttatgacaaggctttattgtctaacgcctctcaattggaaatggttccgccatccgcgactgcgagacacgaaaggtctttgtatgcgaaaataatcaatactattgctgcattttttattcttttcatagcaggaatactcttccccatgatatctgaatgtttgtttgataatgaccaattggcaaagggagatatcgtatcctttttaaagcatggtatagaaattaagaacaagatcgtcgcggaacctgacatggtgcctgattgggctgtatttggtactgaaggtgttatctttggttccatagtaccattcattgactctttcgttcgttatcaacaccagccaaaaaccaggagttctgtttacaaaaacaccttaggaagttttataagatgtgccaatactcttttgggcttaatatttggtattaggaaacttgaatggtcctcctctttgcaggcagctggtgcatggagcttattaaacattgttttatggttgttctttgatggcactttaaccgtttttttcccaggtttagtaattggtgcccttagtgcgttcacttgctctcaatgtttctctcagttgtctttagcgttgtattttatagatttctatttttttgggtttttgatgttcagcaagttgggcagatatttattcaattga

SEQ ID NO: 5107 - DNA, 810 bp, Saccharomyces cerevisiae
atgaagacagaaggaataaaaagcccatcggcaaaataccatgatatggcgggctcccagagaatccctcacaagaacccgcacattcaaaaagtggctgttttgcaaagtaagcccaataaggaagatgcgctaaatttaataaaggaaatcgcacataaagtttcctatctaatgaaggaaaatcacttcaaagtgaccaacttggtggagttttacccacgtgatcaaagactcctgggaatgaacgtcaaccatggatctaagataatgttacggttaagatgctccacggatgagttccaatttttacccatggagtgtataatgggcaccatgctgcacgaattaactcacaatttattcggtccacacgacaaaaagttctacaataagctagatgagttgattggaaggcaatgggttattgaacaaagaggtttgtacgacacatttttggggaacggtcaacgtctcggtggaagagcaaacttacgttcaaatagatatcctatgacaggaataagtactaacacagggatagtgagaaaaaggggcaaaggtgtgaagttagggagtttgcatccagagggtatatcatctatagatagaggtaattccccgagagagttggcggcttttgcagccgaaaggagatatagagatgatcgctggtgcggagagacgaagaataacaaagatcaaataataagtgataatattagcagctccttagaagttgtaatccttgatgatgatgacgaggtactcccgggagatactcttatcgaagttattgatctcacttaa

SEQ ID NO: 5108 - DNA, 810 bp, Artificial Sequence
  Description of Artificial Sequence: Synthetic polynucleotide
atgaagacagaaggaataaaaagcccatctgcaaaataccatgatatggcgggctcccagagaatccctcacaagaacccgcacattcaaaaagtggctgttttgcaaagtaagcccaataaggaagatgcgttgaatttaataaaggaaatcgcacataaagtttcctatttaatgaaggaaaatcacttcaaagtgaccaacttggtggagttttacccacgtgatcaaagactcttgggaatgaacgtcaaccatggatctaagataatgttaagattaagatgctccacggatgagttccaatttttacccatggagtgtataatgggcaccatgttgcacgaattaactcacaatttattcggtccacacgacaaaaagttctacaataagttggatgagttgattggaaggcaatgggttattgaacaaagaggtttgtacgacacatttttggggaacggtcaacgtctcggtggaagagcaaacttacgttccaatagatatcctatgacaggaataagtactaacacagggatagtgagaaaaaggggcaaaggtgtgaagttagggagtttgcatccagagggtatatcttctatagatagaggtaattccccgagagagttggcggcttttgcagccgaaaggagatatagagatgatcgctggtgcggagagacgaagaataacaaagatcaaataataagtgataatattagcagctccttagaagttgtaatccttgatgatgatgacgaggtactcccgggagatactcttatcgaagttattgatctcacttga

SEQ ID NO: 5109 - DNA, 1617 bp, Saccharomyces cerevisiae
atgtccatgcccatagcaagtaccactctagcagttaacaacctcaccaatataaacggaaacgcaaattttaacgtacaagcaaacaaacaactccaccaccaggctgtcgactcgcccgcaagatcttcgatgaccgccacgaccgccgccaactccaacagcaactcttccagagatgactctactattgtcggcctacattacaagatcggcaaaaaaataggggaaggttcctttggtgtgctatttgaaggtactaatatgatcaatggcgtacccgtcgcgatcaaattcgagcccagaaaaacggaggcccctcaattaagagatgaatataaaacatataaaattctgaatggcactcccaatatcccctacgcgtactacttcggccaagaaggtttgcacaatatcttggtcattgatcttttgggtccctctttggaagatttatttgattggtgtggaagaaaattttctgtcaaaacggttgtgcaagttgctgtccaaatgattactttgattgaagacttgcacgcacatgacttgatataccgtgatatcaaaccagacaatttcttgattggaaggcccggccaacctgacgcaaacaacatccatttgatcgacttcggtatggccaaacagtatcgtgatccgaaaactaaacagcacatcccatatagagagaaaaaatcactcagcggcactgccagatatatgtccattaatactcaccttggaagagagcagtccagaagagatgatatggaggccttgggtcacgttttcttttatttcttgagaggccacttaccctggcagggtttaaaagctccaaacaataagcaaaaatacgaaaagattggtgaaaagaaaagatctactaacgtttacgatctagctcaaggcttacctgtgcaatttggcaggtatctagaaatcgtcagaagtctttcctttgaagagtgtcccgattatgaaggctatagaaaactattactatctgtactggatgatttaggtgaaaccgcggacggccaatatgattggatgaaactgaacgatggccgtggttgggatcttaacataaacaagaagccaaatctccacggatacggccatccaaatccaccaaacgaaaaatcgagaaaacatagaaacaaacagctccaaatgcaacagctccaaatgcaacagctccaacaacagcaacagcaacagcaatatgctcaaaaaactgaggcagatatgcgcaattctcaatataaaccaaagttagaccctacttcttatgaagcttaccagcatcaaacccagcagaaatacctgcaagaacaacaaaagagacagcagcaacaaaaacttcaggagcaacaacttcaagagcaacaattgcaacagcagcaacagcaacagcaacagctacgtgcaacaggccaacctccatctcagcctcaagcgcaaactcaatctcagcagtttggcgctcgttatcaaccacaacaacaaccttctgctgctttaagaactcctgaacagcacccaaatgacgataattcaagtctagctgcttctcataagggctttttccaaaaattaggttgttgctaa

SEQ ID NO: 5110 - DNA, 1617 bp, Artificial Sequence
  Description of Artificial Sequence: Synthetic polynucleotide
atgtccatgcccatagcaagtaccactttggcagttaacaacctcaccaatataaacggaaacgcaaattttaacgtacaagcaaacaaacaactccaccaccaggctgtcgactctcccgcaagatcttctatgaccgccacgaccgccgccaactccaacagcaactcttccagagatgactctactattgtcggcttgcattacaagatcggcaaaaaaataggggaaggttcctttggtgtgctttttgaaggtactaatatgatcaatggcgtacccgtcgcgatcaaattcgagcccagaaaaacggaggcccctcaattaagagatgaatataaaacatataaaattttgaatggcactcccaatatcccctacgcgtactacttcggccaagaaggtttgcacaatatcttggtcattgatcttttgggtccctctttggaagatttatttgattggtgtggaagaaaattttctgtcaaaacggttgtgcaagttgctgtccaaatgattactttgattgaagacttgcacgcacatgacttgatataccgtgatatcaaaccagacaatttcttgattggaaggcccggccaacctgacgcaaacaacatccatttgatcgacttcggtatggccaaacagtatcgtgatccgaaaactaaacagcacatcccatatagagagaaaaaatctctcagcggcactgccagatatatgtccattaatactcaccttggaagagagcagtccagaagagatgatatggaggccttgggtcacgttttcttttatttcttgagaggccacttaccctggcagggtttaaaagctccaaacaataagcaaaaatacgaaaagattggtgaaaagaaaagatctactaacgtttacgatttggctcaaggcttacctgtgcaatttggcaggtatttggaaatcgtcagaagtctttcctttgaagagtgtcccgattatgaaggctatagaaaattattattatctgtattggatgatttaggtgaaaccgcggacggccaatatgattggatgaaattgaacgatggccgtggttgggatcttaacataaacaagaagccaaatctccacggatacggccatccaaatccaccaaacgaaaaatctagaaaacatagaaacaaacagctccaaatgcaacagctccaaatgcaacagctccaacaacagcaacagcaacagcaatatgctcaaaaaactgaggcagatatgcgcaattctcaatataaaccaaagttagaccctacttcttatgaagcttaccagcatcaaacccagcagaaatacttacaagaacaacaaaagagacagcagcaacaaaaacttcaggagcaacaacttcaagagcaacaattgcaacagcagcaacagcaacagcaacagttgcgtgcaacaggccaacctccatctcagcctcaagcgcaaactcaatctcagcagtttggcgctcgttatcaaccacaacaacaaccttctgctgctttaagaactcctgaacagcacccaaatgacgataatagtagtttggctgcttctcataagggctttttccaaaaattaggttgttgctga

SEQ ID NO: 5111 - DNA, 447 bp, Saccharomyces cerevisiae
atgggcacatatacgccattaatatacaatatatataacgttcatatatgggtatttacagagagccaggggcaaattggacagatgtctccacgcggcaaaatggaaacagcagtttcacaaggacaacacaaacaacttaaagatggtcaccagcataagggaagaaaactctccgaggagatcgcttctctattgaggctcaaagagtgcaggaggctcaatcctgctagttactatactccacgtagaacatcgcagtcacaatctctcagtggatcaacttttaaagagtataacgagtacattaatgagaaagattcaagtagagcgcagcgtcaaaacgctgccgccgttttaagcaagctcgcccatgacttttgggagaacgactgtgtcattgacgaagacatattcgaagattcgtctgacgaagaacaatcatga

SEQ ID NO: 5112 - DNA, 447 bp, Artificial Sequence
  Description of Artificial Sequence: Synthetic polynucleotide
atgggcacatatacgccattaatatacaatatatataacgttcatatatgggtatttacagagagccaggggcaaattggacagatgtctccacgcggcaaaatggaaacagcagtttctcaaggacaacacaaacaacttaaagatggtcaccagcataagggaagaaaactctccgaggagatcgcttctttgttgaggctcaaagagtgcaggaggctcaatcctgctagttactatactccacgtagaacatctcagtctcaatctctcagtggatctacttttaaagagtataacgagtacattaatgagaaagattctagtagagcgcagcgtcaaaacgctgccgccgttttaagcaagctcgcccatgacttttgggagaacgactgtgtcattgacgaagacatattcgaagattcttctgacgaagaacaatcctga

SEQ ID NO: 5113 - DNA, 1542 bp, Saccharomyces cerevisiae
atgactgctggttctgccccccctgttgattacacttccttaaagaagaacttccaaccgtttctctccagaagagtagaaaatagatctctgaaaagcttttgggatgcttctgatatctcagatgacgtcattgagctagctggtggaatgccaaacgagagattttttcctatcgaatctatggatttgaaaatatcaaaagttccttttaatgataacccaaaatggcataattcgtttaccacggcgcatttggacttgggatcccccagtgagctacccattgcacgttctttccaatatgcagaaaccaagggtttaccccctctcttacattttgttaaagattttgtgtccagaattaatcgcccagccttttccgatgagacggagtctaactgggatgtcatcctttctggcgggtccaacgattcaatgtttaaggtttttgaaacaatttgcgacgaatcgaccactgtgatgattgaagagtttactttcaccccggctatgtccaatgtggaggctacaggagcaaaagtcatccccatcaagatgaacctgaccttcgacagagagtcccagggtattgatgtcgaatatctaacgcagttgctcgataattggtcaactggaccatacaaagacttaaacaagccaagggtcctatataccattgcaacgggccaaaatcctaccgggatgtctgtcccccagtggaaaagagagaaaatttaccagttggcccaaagacacgatttcctcattgttgaagatgatccctacggttatctgtactttccttcctataatccgcaagagccattagaaaacccttaccattctagcgacctgactactgaacggtatttgaatgattttttaatgaaatcattcttgactttggatacagatgcccgtgtcatccgtttggagactttttctaaaatttttgctcctggattaaggttatccttcatcgttgctaataaattccttttgcaaaaaatcttggatttggccgacattactacaagggcccccagtggtacctcacaagctattgtttattctacaataaaggcaatggctgagtccaacttatcgtcctctctttctatgaaagaagcaatgtttgagggttggataagatggataatgcagattgcttctaaatacaatcataggaaaaatcttactttgaaagccttatacgaaacagaatcttaccaagctggtcagtttaccgttatggaaccctccgcgggtatgttcatcattattaaaatcaattgggggaatttcgatagacctgacgatttgccgcaacagatggatattttagataagttcttgctgaagaatggtgttaaagtagtgcttggttataaaatggctgtttgcccaaattattcaaagcagaattcagattttctaagactcaccatcgcctatgcaagggatgatgatcagttgattgaagcttccaaaagaatcggtagtggcataaaagaattttttgacaactataaaagttga

SEQ ID NO: 5114 - DNA, 1542 bp, Artificial Sequence
  Description of Artificial Sequence: Synthetic polynucleotide
atgactgctggttctgccccccctgttgattacacttccttaaagaagaacttccaaccgtttctctccagaagagtagaaaatagatctttgaaaagcttttgggatgcttctgatatcagtgatgacgtcattgagttggctggtggaatgccaaacgagagattttttcctatcgaatctatggatttgaaaatatccaaagttccttttaatgataacccaaaatggcataattcttttaccacggcgcatttggacttgggatcccccagtgagttgcccattgcacgttctttccaatatgcagaaaccaagggtttaccccctctcttacattttgttaaagattttgtgtccagaattaatcgcccagccttttccgatgagacggagtctaactgggatgtcatcctttctggcgggtccaacgattctatgtttaaggtttttgaaacaatttgcgacgaaagtaccactgtgatgattgaagagtttactttcaccccggctatgtccaatgtggaggctacaggagcaaaagtcatccccatcaagatgaacttgaccttcgacagagagtcccagggtattgatgtcgaatatttgacgcagttgctcgataattggtctactggaccatacaaagacttaaacaagccaagggtcctttataccattgcaacgggccaaaatcctaccgggatgtctgtcccccagtggaaaagagagaaaatttaccagttggcccaaagacacgatttcctcattgttgaagatgatccctacggttatttgtactttccttcctataatccgcaagagccattagaaaacccttaccattctagcgacttgactactgaaagatatttgaatgattttttaatgaaatctttcttgactttggatacagatgcccgtgtcatccgtttggagactttttctaaaatttttgctcctggattaaggttatccttcatcgttgctaataaattccttttgcaaaaaatcttggatttggccgacattactacaagggcccccagtggtacctctcaagctattgtttattctacaataaaggcaatggctgagtccaacttatcttcctctctttctatgaaagaagcaatgtttgagggttggataagatggataatgcagattgcttctaaatacaatcataggaaaaatcttactttgaaagccttatacgaaacagaatcttaccaagctggtcagtttaccgttatggaaccctccgcgggtatgttcatcattattaaaatcaattgggggaatttcgatagacctgacgatttgccgcaacagatggatattttagataagttcttgttgaagaatggtgttaaagtagtgcttggttataaaatggctgtttgcccaaattattccaagcagaattctgattttttaagactcaccatcgcctatgcaagggatgatgatcagttgattgaagcttccaaaagaatcggtagtggcataaaagaattttttgacaactataaaagttga

SEQ ID NO: 5115 - DNA, 345 bp, Saccharomyces cerevisiae
atgaaggccagttacttagttttgattttcattagcatattctccatggcacaggcatcttccttatcatcatacatcgtaactttccccaagacggataatatggctacggaccagaatagcattattgaagatgtcaaaaaatatgtggtggacatagggggtaaaataacacacgaatatagcttgataaagggctttacagtggacttacctgatagcgaccaaattttggacggtctgaaagaacgtttgagctatattgaaagcgagtacggtgctaaatgcaatttggaaaaggattcagaagttcatgctctaaaccgtgaccatttagttgcttag

SEQ ID NO: 5116 - DNA, 345 bp, Artificial Sequence
  Description of Artificial Sequence: Synthetic polynucleotide
atgaaggccagttacttagttttgattttcattagcatattctccatggcacaggcatcttccttatcttcctacatcgtaactttccccaagacggataatatggctacggaccagaatagcattattgaagatgtcaaaaaatatgtggtggacatagggggtaaaataacacacgaatatagcttgataaagggctttacagtggacttacctgatagcgaccaaattttggacggtttgaaagaacgtttgagctatattgaaagcgagtacggtgctaaatgcaatttggaaaaggattctgaagttcatgctttgaaccgtgaccatttagttgcttga

SEQ ID NO: 5117 - DNA, 981 bp, Saccharomyces cerevisiae
atgaaattcacatcagtgctagcattttttcttgcaactttaacagcttctgcaacaccactttacaagaggcagaacgttacttctggcggcggtacggtccccgtgatcatcacgggtggacctgctgtatctggtagccagtcaaacgttactaccacaacgctattcaactctacttccaccttaaacatcactcaactttaccaaattgctactcaagttaatcagactttacaaagcgaatcgtcttccggcattataatcgtcacaaactggcgttccattgaaactttgagtttcttctgctcaatcgtttttaatacatcaaagaccattgtcattactgagaatttcttatggggtgtaccaatattgagtagttcggacgcggaaggtagaggcactttggttgccggtagagataaagttgtgtattctggtgttttccctccttacactgttcctgtgggcgttttgtctggtcagaagaatgttcaatggttctttgatgcctgtgagccaactctgattgccagcaactccacaatcagaactcaatactcgaattttacgagcgcacaaatatcttctaatgcctcctccgggaccaatacatcctcatcatcctccagtccattggttccaattatatacgaagaaggatattctcaaagcttaattcaatcactaagttctagtatccaaggtttggttgttgtcagctctggtacaagtcacaacagtaccgtggcatcatggacatcggtcgacttccctgtcgtttatgcaagtgatggatccagtggtcatgatggttcaggaattgggttcataagtaacacaagtattccacaaggtgcaatttctgctgggtacttgtcaccaatccaagcgcaaactttgttgtctattgctatccataatcaagtcacaagtagtagcgagttacaacaaatcttccctgttagtcaacaataa

SEQ ID NO: 5118 - DNA, 981 bp, Artificial Sequence
  Description of Artificial Sequence: Synthetic polynucleotide
atgaaattcacatctgtgttggcattttttcttgcaactttaacagcttctgcaacaccactttacaagaggcagaacgttacttctggcggcggtacggtccccgtgatcatcacgggtggacctgctgtatctggtagccagtccaacgttactaccacaacgcttttcaactctacttccaccttaaacatcactcaactttaccaaattgctactcaagttaatcagactttacaaagcgaaagctcttccggcattataatcgtcacaaactggcgttccattgaaactttgagtttcttctgctccatcgtttttaatacatccaagaccattgtcattactgagaatttcttatggggtgtaccaatattgagtagtagtgacgcggaaggtagaggcactttggttgccggtagagataaagttgtgtattctggtgttttccctccttacactgttcctgtgggcgttttgtctggtcagaagaatgttcaatggttctttgatgcctgtgagccaactttgattgccagcaactccacaatcagaactcaatactctaattttacgagcgcacaaatatcttctaatgcctcctccgggaccaatacatcctcttcttcctccagtccattggttccaattatatacgaagaaggatattctcaaagcttaattcaatctttgagttctagtatccaaggtttggttgttgtcagctctggtacaagtcacaacagtaccgtggcatcttggacatctgtcgacttccctgtcgtttatgcaagtgatggatccagtggtcatgatggttctggaattgggttcataagtaacacaagtattccacaaggtgcaatttctgctgggtacttgtctccaatccaagcgcaaactttgttgtctattgctatccataatcaagtcacaagtagtagcgagttacaacaaatcttccctgttagtcaacaatga

SEQ ID NO: 5119 - DNA, 312 bp, Saccharomyces cerevisiae
atgcgaagcgcagacttctctaatccgcggatcttgtcaaatttaatgagcaagtctgaaaaggaaaagagagcgatcattatttttaattgtcgcttaaacaaaggattatatgtcacttctgcatgcgtttcacgctctgtttttagatgctgcaaacaggaacctcttatagaatttgtatccccaaaaatgatagcatttgttcaaatagatggacgctatttgacaaaaatgttaacatgtgacattcacgtcagaaaagaggccaaagaaggaagagggtaccagcaaatacataaactttcctaa

SEQ ID NO: 5120 - DNA, 312 bp, Artificial Sequence
  Description of Artificial Sequence: Synthetic polynucleotide
atgagaagcgcagacttctctaatccgagaatcttgagcaatttaatgagcaagtctgaaaaggaaaagagagcgatcattatttttaattgtcgcttaaacaaaggattatatgtcacttctgcatgcgtttctcgctctgtttttagatgctgcaaacaggaacctcttatagaatttgtatccccaaaaatgatagcatttgttcaaatagatggacgctatttgacaaaaatgttaacatgtgacattcacgtcagaaaagaggccaaagaaggaagagggtaccagcaaatacataaactttcctga

SEQ ID NO: 5121 - DNA, 720 bp, Saccharomyces cerevisiae
atgatgtcttgtctggtaccaacacgttttactttgacccttaacaccgcgtgtcttttgacgagcacctgggggtttgttagggccacatctgtagtcttacctccaagtttaagtaaagcaggccataaacagtttctaaccattatatctattattgcaacaatcattaataacgcggttaacatttctaattattatatccaaagaaacaataagatgaatctagaaaccaagaaaaaatcagactttattagtagacatgtcactttgccagtttctttagtattagaatctattgttgctaccgtttattggccgcttagattgttttttgtcaacttaataatgcatggagttgaatctactgcaaagacaccttttcctatgacagtggatatggcaatccacttatatcctattttatatttactagccgatcactacttatcgggatctggcacgaaattcaaattatcgaataagcatgcatggctcattgtaaccagtttagcattttcatattttcaatatttagcattcctgatagatgcggggcaaggccaagcctatccatacccgtttctagacgtgaacgagccgtacaagtcgattatatttgttgttgttgctactattacgtgggcttattatgtattttatcaaaagtttccgccaaaatacatcaagaagtcggcaaagaaaggtgataagaattag

SEQ ID NO: 5122 - DNA, 720 bp, Artificial Sequence
  Description of Artificial Sequence: Synthetic polynucleotide
atgatgtcttgtttggtaccaacacgttttactttgacccttaacaccgcgtgtcttttgacgagcacctgggggtttgttagggccacatctgtagtcttacctccaagtttaagtaaagcaggccataaacagtttttaaccattatatctattattgcaacaatcattaataacgcggttaacatttctaattattatatccaaagaaacaataagatgaatttggaaaccaagaaaaaaagtgactttattagtagacatgtcactttgccagtttctttagtattagaatctattgttgctaccgtttattggccgcttagattgttttttgtcaacttaataatgcatggagttgaatctactgcaaagacaccttttcctatgacagtggatatggcaatccacttatatcctattttatatttattagccgatcactacttatctggatctggcacgaaattcaaattatccaataagcatgcatggctcattgtaaccagtttagcattttcttattttcaatatttagcattcttgatagatgcggggcaaggccaagcctatccatacccgtttttggacgtgaacgagccgtacaagtctattatatttgttgttgttgctactattacgtgggcttattatgtattttatcaaaagtttccgccaaaatacatcaagaagtctgcaaagaaaggtgataagaattga

SEQ ID NO: 5123 - DNA, 321 bp, Saccharomyces cerevisiae
atggttaacgtcccaaagaccagaaagacctactgtaagggtaagacctgtcgtaagcacactcaacacaaggttactcaatacaaagctggtaaggcttccttgttcgctcaaggtaagagacgttatgaccgtaaacaatctggtttcggtggtcaaaccaagcctgttttccacaagaaagctaagactaccaagaaggttgttttgagattggaatgtgtcaaatgtaagactagagcccaattaaccttgaagagatgtaagcacttcgaattgggtggtgaaaagaagcaaaagggtcaagctttgcaattctga

SEQ ID NO: 5124 - DNA, 321 bp, Artificial Sequence; identical to SEQ ID NO: 5123
  Description of Artificial Sequence: Synthetic polynucleotide

SEQ ID NO: 5125 - DNA, 951 bp, Saccharomyces cerevisiae
atggcatttagtgattttgctgccatatgctcaaagaccccgttgccattatgttcggtaataaagtctaaaacccatctaatactttcgaactcaacaattatacatgattttgatcctttaaatttgaatgtcggtgtactgccacgctgttatgctcggtcgattgatcttgccaatacagtcatctttgatgtcgggaacgcattcataaatattggtgctctaggtgtcattttaatcatactttataacataagacagaagtatactgctattggcaggtctgaatatctctactttttccaactaacattgctattgataatatttaccttggtggtagactgtggtgtatctccccccggctctgggtcatatccatacttcgtggctatacaaataggactggcgggtgcatgttgctgggccttattgataatcgggtttttaggtttcaatttatgggaagatgggactacaaagtccatgctgttggtccgtggaacgtccatgctaggattcatagccaattttttagcctctattttaaccttcaaagcatggatcaccgaccataaagtagcaacaatgaacgcttcagggatgattgtcgtcgtttacataataaacgccattttcttattcgttttcgttatttgtcaattactggtatccctattggtagttcgaaacttatgggtcacaggagctatctttttggggctatttttctttgtagcaggccaggtattggtttatgccttctctacacaaatttgtgaagggttcaagcactacttagatggcctcttttttggaagcatctgtaatgtgttcacattaatgatggtttacaagacttgggatatgactaccgacgacgacttggaatttggtgtaagtgttagcaaggacggtgacgtggtgtatgataatggatttatgtga

SEQ ID NO: 5126 - DNA, 951 bp, Artificial Sequence
  Description of Artificial Sequence: Synthetic polynucleotide
atggcatttagtgattttgctgccatatgctctaagaccccgttgccattatgttctgtaataaagtctaaaacccatttgatactttccaactccacaattatacatgattttgatcctttaaatttgaatgtcggtgtattgccacgctgttatgctcgttctattgatcttgccaatacagtcatctttgatgtcgggaacgcattcataaatattggtgctttgggtgtcattttaatcatactttataacataagacagaagtatactgctattggcaggtctgaatatctctactttttccaattgacattgttgttgataatatttaccttggtggtagactgtggtgtatctccccccggctctgggtcttatccatacttcgtggctatacaaataggattagcgggtgcatgttgctgggccttattgataatcgggtttttaggtttcaatttatgggaagatgggactacaaagtccatgcttttggtccgtggaacgtccatgcttggattcatagccaattttttagcctctattttaaccttcaaagcatggatcaccgaccataaagtagcaacaatgaacgcttctgggatgattgtcgtcgtttacataataaacgccattttcttattcgttttcgttatttgtcaattattggtatccttattggtagttagaaacttatgggtcacaggagctatctttttggggttgtttttctttgtagcaggccaggtattggtttatgccttctctacacaaatttgtgaagggttcaagcactacttagatggcctcttttttggaagcatctgtaatgtgttcacattaatgatggtttacaagacttgggatatgactaccgacgacgacttggaatttggtgtaagtgttagcaaggacggtgacgtggtgtatgataatggatttatgtga

SEQ ID NO: 5127 - DNA, 978 bp, Saccharomyces cerevisiae
atgaaatttaatttttctacaattttcaatatcttattctttttattcaccttaattgaagccaacagcaatggggaaacagtcaaacttattacttctgatggtattgtttacagttatgctgtctacacaaagactcttgcgccggcaagggttgtggttaaaacgatttcatatactactacaagggtatatccgattactttagctaattccgtcgtttcttccactactgaaaagataacagaggtttcaacggtgtcagcttcagaacaagttagtgctactcaaacaaactcattggtttctacttctactgtttccactatcagtccaacgatttcatctggttcttcaacatcctctagctctacatacgatatcgaatcatctcaaagtatcgaatcgtcaggtacatcttccgctacagccgaaccatctgcgtcttcaggttttcgtttgacttctagttctgcttttgtttcatctactgcacctttctcttcccaactttcttcatcttcatcttctgaaacatcatcctcatcattttcaacatcatcatcatctgcccctctttccttaacttcttcttcttcttcttcttcttctttcgccactattattaccttggcaccatcgagctcaaaaagcggaaactctcaactaactttggcgtcatcgtcttccacttccgcagttgagtcatcccaaacagggtccactatagcaagaactacctctacactggtaccctcttctagcgtagatacaacgtctagagcaacgacatccatgccattagaatcgtcttctacgcaatcgatatccgtctccagctcggatggcacttgttacgttttttatgatgatgatgactactatagtactgtctacttaactaacccgtctcaatccgttgatgccgccaccactataactagtacaaacacaatttatgctacggttaccatttag

SEQ ID NO: 5128 - DNA, 978 bp, Artificial Sequence
  Description of Artificial Sequence: Synthetic polynucleotide
atgaaatttaatttttctacaattttcaatatcttattctttttattcaccttaattgaagccaacagcaatggggaaacagtcaaacttattacttctgatggtattgtttacagttatgctgtctacacaaagactcttgcgccggcaagggttgtggttaaaacgatttcttatactactacaagggtatatccgattactttagctaattccgtcgtttcttccactactgaaaagataacagaggtttccacggtgtctgcttctgaacaagttagtgctactcaaacaaactctttggtttctacttctactgtttccactatcagtccaacgatttcttctggttcttctacatcctctagctctacatacgatatcgaaagctctcaaagtatcgaatcttctggtacatcttccgctacagccgaaccatctgcgtcttctggttttcgtttgacttctagttctgcttttgtttcttctactgcacctttctcttcccaactttcttcttcttcttcttctgaaacatcttcctcttctttttctacatcttcttcttctgcccctctttccttaacttcttcttcttcttcttcttcttctttcgccactattattaccttggcaccatccagcagtaaaagcggaaactctcaattgactttggcgtcttcttcttccacttccgcagttgagtcttcccaaacagggtccactatagcaagaactacctctacattggtaccctcttctagcgtagatacaacgtctagagcaacgacatccatgccattagaaagctcttctacgcaaagtatatccgtctccagcagtgatggcacttgttacgttttttatgatgatgatgactactatagtactgtctacttaactaacccgtctcaatccgttgatgccgccaccactataactagtacaaacacaatttatgctacggttaccatttga

SEQ ID NO: 5129 - DNA, 213 bp, Saccharomyces cerevisiae
atgtctcgcgaagggttccagattccaacaaatttagacgccgcagctgcaggtacttctcaagctagaacggcaactttgaagtatatttgtgctgaatgttctagtaaattatctttatccagaactgatgcagtccgttgtaaggactgtggtcatagaatcctgttgaaggctaggactaagagattggttcaatttgaagctagatga

SEQ ID NO: 5130 - DNA, 213 bp, Artificial Sequence
  Description of Artificial Sequence: Synthetic polynucleotide
atgtctcgcgaagggttccagattccaacaaatttagacgccgcagctgcaggtacttctcaagctagaacggcaactttgaagtatatttgtgctgaatgttctagtaaattatctttatccagaactgatgcagtccgttgtaaggactgtggtcatagaatcttgttgaaggctaggactaagagattggttcaatttgaagctagatga

SEQ ID NO: 5131 - DNA, 939 bp, Saccharomyces cerevisiae
atgttaattggtgtaagtggtacgaaattttgcggatgcgaagatgttattaacatgttggttgatcattttcattttgaattactcaatcacctagataatccagaggagatattagattatgctacgaaaaattacacaaaaaattcagttatattcctagaaaaattatcattactggagaaactggaaaagagaccattttttgttcatctttctatcgacgctcctgtcactacaagggtagcattatacaggaaaacgactcaagcagaaagcttatcattagaacaaataatacaagccattgatcaacatgactttcagcctgaaggcatcaaattaagggagaaatcccatttgagatttaaaatagttaatgaggaccgcagaggaaggagacagagcttgattaataacattaccacacaattaaagattctcgatgacaaagagaaacaaatggctccattaatgaggcctagttgggatagctattttatgaagttagccacactagcagcatctcgttccaattgcatgaaacgtagagttggttgcgtgattgtgagagaatgcagagtgattgctactggctataatgggactcctcgacatttaacaaattgtttcaatggcggttgcccacgttgcaatgacggtgattctagaaatctgcacacttgcttatgcttacatgcagaagagaatgcactactggaagctggcagggatcgtgtaggtcaaaatgcgaccttatactgtgatacttgcccttgcttaacatgttctgtaaagattgttcaaacaggcatcagtgaagtagtttatagccaaagttatagaatggacgaggaaagtttcaaggtcttgaagaatgcgggaataaccgtccggcaattcagctttacggaagaaccaagaattgtgatgatttaa

SEQ ID NO: 5132 - DNA, 939 bp, Artificial Sequence
  Description of Artificial Sequence: Synthetic polynucleotide
atgttaattggtgtaagtggtacgaaattttgcggatgcgaagatgttattaacatgttggttgatcattttcattttgaattactcaatcacttggataatccagaggagatattagattatgctacgaaaaattacacaaaaaattctgttatattcttggaaaaattatctttattggagaaattagaaaagagaccattttttgttcatctttctatcgacgctcctgtcactacaagggtagcattatacaggaaaacgactcaagcagaaagcttatctttagaacaaataatacaagccattgatcaacatgactttcagcctgaaggcatcaaattaagggagaaatcccatttgagatttaaaatagttaatgaggaccgcagaggaaggagacagagcttgattaataacattaccacacaattaaagattctcgatgacaaagagaaacaaatggctccattaatgaggcctagttgggatagctattttatgaagttagccacattagcagcatctcgttccaattgcatgaaacgtagagttggttgcgtgattgtgagagaatgcagagtgattgctactggctataatgggactcctagacatttaacaaattgtttcaatggcggttgcccacgttgcaatgacggtgattctagaaatttacacacttgcttatgcttacatgcagaagagaatgcattattggaagctggcagggatcgtgtaggtcaaaatgcgaccttatactgtgatacttgcccttgcttaacatgttctgtaaagattgttcaaacaggcatcagtgaagtagtttatagccaaagttatagaatggacgaggaaagtttcaaggtcttgaagaatgcgggaataaccgtcagacaattcagctttacggaagaaccaagaattgtgatgatttga

SEQ ID NO: 5133 - DNA, 1398 bp, Saccharomyces cerevisiae
atgagtagtgaactcatgttcaactatacttttagctggcctgctggtccaaaagatgttattttaacaggaacgtttgatgactggaggggcactttacccctcgtgaagaccgccaagggaaatttcgaaattactatgcccgtgaagctagccaacaaggatgatacgtttcagtttaagtttattgtggatggcgtttggtgcgttagtgattcgtataaaaaggagcatgttagtgaaggaatcgaaaacaatttcttacaaattaccgatttagttgaaacgcaggaagttgccggtgccagtagaatcccggaggcaggtggcctattatgtggtaaaccgcctcgttcagcaggtcctccttctacaagtaatagaaagaaaaacaagcgtaacaataagaaaagaagatctaaattgaagaaaaagagtactaagaacaacaagaagtcaaatgaaagtttagacgataatgaagaagaagacggggtgactggaactactactgaagatgttactggaacctctagggaagaaactccattggcggagcctactaatgtttccaaagaagctccgggcaatttccatattctgccaatcgatcaaagtgcagacacaactcaatcaaatggtataattggtggaccaggtcctgttcttgtcccaaaccctggtgaaatcaaggaatttaccgaaattagagacgttgatgctagggaattgaatgaaagacttaacaaaaaagaagaggttccagaacccgttgctggccctattgttgaatcatcagttacggaaaagagtcctgctcttccacaagctgacgacccgattgttgagaccaaggaagtggctcataatgtgcaggaacttactcctcaagtggaagcggttactccgttaataaatgagcccgaaccattaccaactccggaagcacaaatatctatacctgagtcatcgaaagttgaaccagtggaggggtctcttcaatctaagttggtggagaaacgtgagtccactgaaggtgtattagacggttccaaaaaagtagaaaataaggcaaaaaaagatgaagaggtctttacattagaccccatcgttaacaaagctcccaagctacccttgactgacgagcaaacagctgaaggtagaaaatcaccagcagtgtcagaagaaaaagaaaagaaaaagaagcaagaaaaaggctctaaagaggtcaagaggtcagaaaccagtaaagaaaaaaagccttctgccaaagaggttaagaaacaaactgtaaaagccccaaagaaacagacagcttctcctttgtcttcttcgacagaagagcccaagaagaagaaaactggtttcttcggcaaattgaagaagctatttaagtga

SEQ ID NO: 5134 - DNA, 1398 bp, Artificial Sequence
  Description of Artificial Sequence: Synthetic polynucleotide
atgagtagtgaactcatgttcaactatacttttagctggcctgctggtccaaaagatgttattttaacaggaacgtttgatgactggaggggcactttacccctcgtgaagaccgccaagggaaatttcgaaattactatgcccgtgaagttggccaacaaggatgatacgtttcagtttaagtttattgtggatggcgtttggtgcgttagtgattcttataaaaaggagcatgttagtgaaggaatcgaaaacaatttcttacaaattaccgatttagttgaaacgcaggaagttgccggtgccagtagaatcccggaggcaggtggcttattatgtggtaaaccgcctcgttctgcaggtcctccttctacaagtaatagaaagaaaaacaagcgtaacaataagaaaagaagatctaaattgaagaaaaagagtactaagaacaacaagaagagcaatgaaagtttagacgataatgaagaagaagacggggtgactggaactactactgaagatgttactggaacctctagggaagaaactccattggcggagcctactaatgtttccaaagaagctccgggcaatttccatattttaccaatcgatcaaagtgcagacacaactcaaagcaatggtataattggtggaccaggtcctgttcttgtcccaaaccctggtgaaatcaaggaatttaccgaaattagagacgttgatgctagggaattgaatgaaagacttaacaaaaaagaagaggttccagaacccgttgctggccctattgttgaatcttctgttacggaaaagagtcctgctcttccacaagctgacgacccgattgttgagaccaaggaagtggctcataatgtgcaggaacttactcctcaagtggaagcggttactccgttaataaatgagcccgaaccattaccaactccggaagcacaaatatctatacctgagagttctaaagttgaaccagtggaggggtctcttcaatctaagttggtggagaaacgtgagtccactgaaggtgtattagacggttccaaaaaagtagaaaataaggcaaaaaaagatgaagaggtctttacattagaccccatcgttaacaaagctcccaagttgcccttgactgacgagcaaacagctgaaggtagaaaatctccagcagtgtctgaagaaaaagaaaagaaaaagaagcaagaaaaaggctctaaagaggtcaagaggtctgaaaccagtaaagaaaaaaagccttctgccaaagaggttaagaaacaaactgtaaaagccccaaagaaacagacagcttctcctttgtcttcttctacagaagagcccaagaagaagaaaactggtttcttcggcaaattgaagaagttatttaagtga

SEQ ID NO: 5135 - DNA, 645 bp, Saccharomyces cerevisiae
atgtcatttattcagaggaggttattgtcgcaaacactttttctgcgctctcaagtggggtctttaccactttatatatctcctgaagttcaggtttccataaatgcattatccatgcccaggattatcagaaaaggtagaacttcaatgaatatatcacagaatatcacagtaaagggacccaagggtgaattgtccgtggaggtccctgattttttgcacttggacaaggatgaaaagcacggtaaaataaatgttacagttcagaattcagaagataaacatcaacgttcgatgtggggtacagtaagatcacttataaataatcacattataggtgttactgaggggcatcttgctgtccttagatttgtagggacaggttatagagctcaattagaaaatgatggtaaatttgtcaacgttaaggtgggtgcatctatcaaacaaggattggacgttcctgaaggtattgttgtcaaaacacctgctcccacgtctctgattattgaagggtgcaataagcagcaggtccttctttttgctgccaaattgagaaaattccatccaccagagccgtataaaggcaaaggaatatacgttaacgatgaaacaataaagctaaaggacaagaaaatcaaataa

SEQ ID NO: 5136 - DNA, 645 bp, Artificial Sequence
  Description of Artificial Sequence: Synthetic polynucleotide
atgagttttattcagaggaggttattgtctcaaacactttttttacgctctcaagtggggtctttaccactttatatatctcctgaagttcaggtttccataaatgcattatccatgcccaggattatcagaaaaggtagaacttctatgaatatatctcagaatatcacagtaaagggacccaagggtgaattgtccgtggaggtccctgattttttgcacttggacaaggatgaaaagcacggtaaaataaatgttacagttcagaattctgaagataaacatcaacgttccatgtggggtacagtaagatctcttataaataatcacattataggtgttactgaggggcatcttgctgtccttagatttgtagggacaggttatagagctcaattagaaaatgatggtaaatttgtcaacgttaaggtgggtgcatctatcaaacaaggattggacgttcctgaaggtattgttgtcaaaacacctgctcccacgtctttgattattgaagggtgcaataagcagcaggtccttctttttgctgccaaattgagaaaattccatccaccagagccgtataaaggcaaaggaatatacgttaacgatgaaacaataaagttgaaggacaagaaaatcaaatga

SEQ ID NO: 5137 - DNA, 552 bp, Saccharomyces cerevisiae
atggttagaaaactaaagcatcatgagcaaaagttattgaaaaaagtagacttccttgaatggaagcaggaccaaggccaccgggacactcaggtcatgagaacatatcatattcagaatcgtgaagattatcataaatacaataggatatgcggtgatattcgtcgtcttgccaataaattatcattattacctcccactgatccatttcgtcgcaaacatgagcaattattactggacaagctatacgctatgggtgtcctgacaactaaatcaaagatttctgatctggaaaataaagttactgttagtgccatctgtaggaggcgattacctgtaataatgcatagattaaaaatggcggaaactatacaagatgcagtcaagttcattgaacaagggcatgttcgcgtgggtccaaatttgatcaacgatccagcctacctcgtaacgagaaatatggaggactacgttacttgggtggacaactctaagatcaagaaaaccttgttgagatacagaaaccaaatcgacgattttgatttttcataa

SEQ ID NO: 5138 - DNA, 552 bp, Artificial Sequence
  Description of Artificial Sequence: Synthetic polynucleotide
atggttagaaaattgaagcatcatgagcaaaagttattgaaaaaagtagacttccttgaatggaagcaggaccaaggccacagagacactcaggtcatgagaacatatcatattcagaatcgtgaagattatcataaatacaataggatatgcggtgatattcgtcgtcttgccaataaattatctttattacctcccactgatccatttcgtcgcaaacatgagcaattattattagacaagttgtacgctatgggtgtcttaacaactaaatccaagatttctgatttggaaaataaagttactgttagtgccatctgtaggaggagattacctgtaataatgcatagattaaaaatggcggaaactatacaagatgcagtcaagttcattgaacaagggcatgttcgcgtgggtccaaatttgatcaacgatccagcctacctcgtaacgagaaatatggaggactacgttacttgggtggacaactctaagatcaagaaaaccttgttgagatacagaaaccaaatcgacgattttgattttagttga

SEQ ID NO: 5139 - DNA, 2205 bp, Saccharomyces cerevisiae
atgtaccacacccatatgcatgaaagtttaatatctgtgacttcaacggtaagtgtttctgatgcgtcttatgcttatgcaaggctcactagaagagacgatagcgattcatcttcttcctcagcatccagcacgaaaaatagcaaatctgctgaatgtacaggctctaaacagcaatgtcaattacccacagattcgagtcacagcaccagtgtaactgttggtgtggctgttgcggtaccagtaggtgtcattatcattgttctggctgtgatactttgcattgtgtataggagaagcaaaaaggaagctgaggaagataatgatccagatttcgaaggagattctgaatttttaccgacaatgaaggattattcacctggaataaatcatttgtactctagcgactcgcagcaagacttcatggaaaagaccttgcaacagccgccttcagatccctttgttggtagcatgcatagtagtaaatataatgtgagaagcgctaccccacctgcaattggtcggtcatggtacgtagacccgtttcagcttccacaggaatcgaacgactctaacagtttgagagattttgccatgagagtacaagaagatggactaggtggctataaagttgcggccgagtctagaaatgccagtcaaacgtccttgcatcctgataacttttcgaattgtacaccaataagagcgtcttcaagatttcaagagagtgaaagctttcgatctcacggtagcccaatccataataaccagctttcccgtggttctgccacagaaggtgccaacaagcagtttacatttcctaatgaagacaatgattcgtcctcagttagtgaagaggctgaggttttgaatgagtcaaatgagtctgcaagcaatgacgcgttcgaattcgaacttgataatagttcagaaaagacacatgaaaggaatctgcgttttggtaaggatgatgataattatgaacttcaagatatcagagaagctgaacatatgaatgatcgtagtagcagtaaaagtcaagatgatgattactatgtatcactcttatcccctaatgaagaagaagatattaagagaatgaaaagtatttatcaagtttatttggatagagctaaaacaatgaaaaaggaagaggataaagcagataatgcaaatgatatatcgcaggaggagaatagagtggataatatagtccagaatccactgccttctatcaaaattaataataacgacaatatcgacaataatgaggtaccggaagcaaaacacctggtgaaagaagcacttcctctaaacaatactaacttggcagaatatggtccagaaatggcccaaagccagaaacaatatccagtgcaggatacactcaccgtgaacgatacggaagcagcgccttccaatagaattgcttcctcaatttattccgaagcaattcagccgttgaattatcaggatcaatatcaacaacaggaacaatcaccagtatataatggccacacacagtatcctggcaatggatatagcggaaatcctcagcaacaggggtatactgcgcaattcgtgcaaaatccacaatggtacggtgtaccaactcctcaacaacagcaacataatcatcctcagaccctggaaactattggagaattaccaactcccgcatatttagctcaatcagcttcctcgcattcattgacctcttttaaaagaccaaacaagcaacaacttcttcaattacagactgccagactaaacggaactgcgttaaatccggtcgatcatccggaaatgttttattcaccgacaaacgatgcctattatgctccacagcagcaaggccaatatatgaagtttaacgaaaatggggcggttccttcaccttatcaacttagacaaagtgtggtaatgaccaatccttcggatttgacggcaaaaccatcttataagccagcaggttctttcagaagtgtaagcgcaaccaattcaagaaataacagtctgaccacacaaaataatatctatctgcaacagcagcagcagcaactgtataattctcgtgttagtgggatattagaagagacagatgttgtacagccaccaagtgttggtggaattttgccacatagtggttcacaggacgatttaagaaaacaattaggctcttcacataattataccgtcaactga

SEQ ID NO: 5140 - DNA, 2205 bp, Artificial Sequence
  Description of Artificial Sequence: Synthetic polynucleotide
atgtaccacacccatatgcatgaaagtttaatatctgtgacttccacggtaagtgtttctgatgcgtcttatgcttatgcaaggctcactagaagagacgatagcgattcttcttcttcctctgcatccagcacgaaaaatagcaaatctgctgaatgtacaggctctaaacagcaatgtcaattacccacagattctagtcacagcaccagtgtaactgttggtgtggctgttgcggtaccagtaggtgtcattatcattgttttggctgtgatactttgcattgtgtataggagaagcaaaaaggaagctgaggaagataatgatccagatttcgaaggagattctgaatttttaccgacaatgaaggattattctcctggaataaatcatttgtactctagcgactctcagcaagacttcatggaaaagaccttgcaacagccgccttctgatccctttgttggtagcatgcatagtagtaaatataatgtgagaagcgctaccccacctgcaattggtagaagttggtacgtagacccgtttcagcttccacaggaatctaacgactctaacagtttgagagattttgccatgagagtacaagaagatggattaggtggctataaagttgcggccgagtctagaaatgccagtcaaacgtccttgcatcctgataacttttctaattgtacaccaataagagcgtcttctagatttcaagagagtgaaagctttagatctcacggtagcccaatccataataaccagctttcccgtggttctgccacagaaggtgccaacaagcagtttacatttcctaatgaagacaatgattcttcctctgttagtgaagaggctgaggttttgaatgagagcaatgagtctgcaagcaatgacgcgttcgaattcgaacttgataatagttctgaaaagacacatgaaaggaatttacgttttggtaaggatgatgataattatgaacttcaagatatcagagaagctgaacatatgaatgatcgtagtagcagtaaaagtcaagatgatgattactatgtatctctcttatcccctaatgaagaagaagatattaagagaatgaaaagtatttatcaagtttatttggatagagctaaaacaatgaaaaaggaagaggataaagcagataatgcaaatgatatatctcaggaggagaatagagtggataatatagtccagaatccattgccttctatcaaaattaataataacgacaatatcgacaataatgaggtaccggaagcaaaacacttggtgaaagaagcacttcctttgaacaatactaacttggcagaatatggtccagaaatggcccaaagccagaaacaatatccagtgcaggatacactcaccgtgaacgatacggaagcagcgccttccaatagaattgcttccagtatttattccgaagcaattcagccgttgaattatcaggatcaatatcaacaacaggaacaatctccagtatataatggccacacacagtatcctggcaatggatatagcggaaatcctcagcaacaggggtatactgcgcaattcgtgcaaaatccacaatggtacggtgtaccaactcctcaacaacagcaacataatcatcctcagaccttagaaactattggagaattaccaactcccgcatatttagctcaatctgcttcctctcattctttgacctcttttaaaagaccaaacaagcaacaacttcttcaattacagactgccagattgaacggaactgcgttaaatccggtcgatcatccggaaatgttttattctccgacaaacgatgcctattatgctccacagcagcaaggccaatatatgaagtttaacgaaaatggggcggttccttctccttatcaacttagacaaagtgtggtaatgaccaatccttctgatttgacggcaaaaccatcttataagccagcaggttctttcagaagtgtaagcgcaaccaattctagaaataacagtttaaccacacaaaataatatctatttacaacagcagcagcagcaattatataattctcgtgttagtgggatattagaagagacagatgttgtacagccaccaagtgttggtggaattttgccacatagtggttctcaggacgatttaagaaaacaattaggctcttctcataattataccgtcaactga

SEQ ID NO: 5141 - DNA, 1740 bp, Saccharomyces cerevisiae
atgagtgagaccagctcaagtcgcaggagcgcgagtaaagacgctgtcaaatcttacttcgcaggcaaatacaataaagtgttggattctatactggaggcagaagcagcaatatcaaaatcgccaactgtagcagaagatctatcaggaagctcctccagcggaaattctgagatgagccatccttcgctaaccgcctcctccgcaacaagccaaggcattagcaaaaaggaactactccaacaaattgctggttcattattcagtacgtccattgagcgcctgaagactgcccactcatcagaagtatcaagtactccggaatattcagtaaatgattcgtatggagagcaagagtgcagggagtgcgatggtgttttcaagtgttcagcgcactttgagggcgcgcccgaatattatgacgatgaaaccgaatcagggccagctctagaacctatgacttccaatagtgaaaaagatccttttatcgatgtatttttggataaactaatatcgaggttggtccctgaaaagctaccagaaagagagcattttagtagcaaaaccaccattgagcatgatctagacacaggaagggttcccgtgttttcagcaactacattgggtagtaatttcaaaaaattgtctaagaaaatgggctcaatatttgaactccaggactccatagttcgactgctgacttggagaaaccctaccgggacggtgacgtcgttaatattattcactttgatatgttttaatccaatgtacttggtaattttgcctatattccgctttgtctatggtattgtagttcctggctatgtgcgtaaacatcctttacaaaggagtatatatcctctgaaacggaatcacggatcatcattgttatatgatgtgtgctatgagggaaaaaatgagtacagctacggtcaacagtttttctccaaatcttttatggacactttggaatcaagaaatcaagaaatagacgaaatatcagaattagataaaagaaccgaaaacacaggggaattgaaacaaggaatgaaagtactaattaatttacgcgatatgcaaaacatgacctctggtacccttcatgttattgaggcaatcaatagttttcttcgtaagtcttctagttttcaaaacgaagagtgctccactaaacgtttttttacaggatttcttttgattgttttcttaaaaatattatcaccatttgtgaattggagctatgtatgtagcatattcgcctggtgcttactgatatatatgcatccaagagctcatccaaaaataataagttttttcaaaacaggaacaatgggaaaagaatacaaaaacttgaaaaaaagagaacaccaggcgcttaacatgatattcgatgaacaaccggaaactaaattcatcgagatttttgaaatatataaaaaggccttactgccgaacgactggaagtttttccgatattcaaatagaattttcgatcctcaagatccgtatagaagagcacagcaattcccaccgggagtagattctttggctgatgttattccccccacaggctggtcatttgatcctaattttgagtggaaaattgacaatgatgtggataggtgggtggtagaacgtgggttgaatctgccaattaccggcgaattcttatttgatccaatgttcaagaggaggagactgatacatcgtgttattaagaatgcaacaccagtagcataa

SEQ ID NO: 5142 - DNA, 1740 bp, Artificial Sequence
  Description of Artificial Sequence: Synthetic polynucleotide
atgagtgagaccagcagtagtcgcaggagcgcgagtaaagacgctgtcaaatcttacttcgcaggcaaatacaataaagtgttggattctatattggaggcagaagcagcaatatccaaatctccaactgtagcagaagatttatctggaagctcctccagcggaaattctgagatgagccatccttctttaaccgcctcctccgcaacaagccaaggcattagcaaaaaggaattactccaacaaattgctggttctttattcagtacgtccattgagcgcttgaagactgcccactcttctgaagtatctagtactccggaatattctgtaaatgattcttatggagagcaagagtgcagggagtgcgatggtgttttcaagtgttctgcgcactttgagggcgcgcccgaatattatgacgatgaaaccgaatctgggccagctttggaacctatgacttccaatagtgaaaaagatccttttatcgatgtatttttggataaattgatatctaggttggtccctgaaaagttaccagaaagagagcattttagtagcaaaaccaccattgagcatgatttggacacaggaagggttcccgtgttttctgcaactacattgggtagtaatttcaaaaaattgtctaagaaaatgggctctatatttgaactccaggactccatagttagattattaacttggagaaaccctaccgggacggtgacgtctttaatattattcactttgatatgttttaatccaatgtacttggtaattttgcctatattccgctttgtctatggtattgtagttcctggctatgtgcgtaaacatcctttacaaaggagtatatatcctttgaaaagaaatcacggaagttctttgttatatgatgtgtgctatgagggaaaaaatgagtacagctacggtcaacagtttttctccaaatcttttatggacactttggaatctagaaatcaagaaatagacgaaatatctgaattagataaaagaaccgaaaacacaggggaattgaaacaaggaatgaaagtacttattaatttacgcgatatgcaaaacatgacctctggtacccttcatgttattgaggcaatcaatagttttcttcgtaagtcttctagttttcaaaacgaagagtgctccactaaacgtttttttacaggatttcttttgattgttttcttaaaaatattatctccatttgtgaattggagctatgtatgtagcatattcgcctggtgcttattgatatatatgcatccaagagctcatccaaaaataataagttttttcaaaacaggaacaatgggaaaagaatacaaaaacttgaaaaaaagagaacaccaggcgcttaacatgatattcgatgaacaaccggaaactaaattcatcgagatttttgaaatatataaaaaggccttattaccgaacgactggaagtttttcagatattctaatagaattttcgatcctcaagatccgtatagaagagcacagcaattcccaccgggagtagattctttggctgatgttattccccccacaggctggtcttttgatcctaattttgagtggaaaattgacaatgatgtggataggtgggtggtagaacgtgggttgaatttaccaattaccggcgaattcttatttgatccaatgttcaagaggaggagattaatacatcgtgttattaagaatgcaacaccagtagcatga

SEQ ID NO: 5143 - DNA, 1581 bp, Saccharomyces cerevisiae
atgtggatactcatatacctatttatcatatggtcctcactgcgaacgtgggttactgctgttgactctactacgacagttggcgatgatctgaatgagaccgtttcagcatctgtctggccgacgatgtcccctcaaatgacggtggcctttaggtcccaaagagatgtcatgggaaacttaactatagaccagctgccgtatgttggtttgaatctacgacgggttctgttgaacaatgagactagcatggtaaatgaaggtaataatacaagattactgactttgttcaaatctatgctatcctccgaagcaaatgcttttgtcctcgacttggaacaatataataatgatttgagagtggtagatacgacattgttatttagcgacgttctaactgctttacagtcattcatcttcagcacacaaaacaacctctatgcgaatatcattgtactgttgctgaatatatcagctcctgaactggattccacagaataccgccaccaaaaccaaactttgaacactacttatatactggacaaaaatttaggaaatagtttcatttacaagcctacggatttacaaagtgatagagcaaagaataatacctggaacatctacggaaaatcgtccattgacggttggcccactctgggctctgtgctatatgaacaaaagaagagactggttataggtgagctgaccgatttttttaatgaaactactgctccatatatttttcctcatgacgtctttcattatgagcaggggaactctacattagattgcccctctactgtagagggtctgactgatttatcatctatccattggagattcttagattcgctgttcaattccgtggacatcaaagagtatatttcgtgtggtttatcaccaataataagcaattcagcgtacgtcaataatgtgacgcagttagcagatataattcatgaaggcagcgtttggtcatgggatagtgaccaaccttcagttactcagtcaacttctaaatctggcagctcatccgggaccttagaggcttacaattgcgttctcttgtactactttgctaacaatgagacagtaacatggcgagtaggtaactgttacaattctaatattgggctctgtagatatgaaaatatggcattccgatggttggtgagatcaaataaggctacgtactttgattttgatagttaccagggatctaaatgtcccgatcagtattcatttaatattcctagaagcccattggagcagagatcgtttattgcatatatgaggaattcctccttctctgacacacaaatatggatagatttgaactctatatcagtaagcaattgttgggtaagtggtggtccttatgctagttgcccatatgaaaaagtcatttctaggagaaatttcgtaacaatgatggtccctgcgtcagtctgttcctttgccctactgtgtattgtcgtttacttgagtgtattgagggtccccatttatgataatagaaaaaattggagaagagttatcaataaaatctctaaatccgagctagaaggtgtcccttcttaa

SEQ ID NO: 5144 - DNA, 1581 bp, Artificial Sequence
  Description of Artificial Sequence: Synthetic polynucleotide
atgtggatactcatatacttgtttatcatatggtcctctttaagaacgtgggttactgctgttgactctactacgacagttggcgatgatttgaatgagaccgtttctgcatctgtctggccgacgatgtcccctcaaatgacggtggcctttaggtcccaaagagatgtcatgggaaacttaactatagaccagttaccgtatgttggtttgaatttaaggagagttttattgaacaatgagactagcatggtaaatgaaggtaataatacaagattattaactttgttcaaatctatgctttcctccgaagcaaatgcttttgtcctcgacttggaacaatataataatgatttgagagtggtagatacgacattgttatttagcgacgttttaactgctttacagtctttcatcttcagcacacaaaacaacctctatgcgaatatcattgtacttttgttgaatatatctgctcctgaattagattccacagaataccgccaccaaaaccaaactttgaacactacttatatattggacaaaaatttaggaaatagtttcatttacaagcctacggatttacaaagtgatagagcaaagaataatacctggaacatctacggaaaatcttccattgacggttggcccactttgggctctgtgctttatgaacaaaagaagagattggttataggtgagttgaccgatttttttaatgaaactactgctccatatatttttcctcatgacgtctttcattatgagcaggggaactctacattagattgcccctctactgtagagggtttgactgatttatcttctatccattggagattcttagattctttattcaattccgtggacatcaaagagtatattagttgtggtttatctccaataataagcaattctgcgtacgtcaataatgtgacgcagttagcagatataattcatgaaggcagcgtttggtcctgggatagtgaccaaccttctgttactcagtctacttctaaatctggcagctcttccgggaccttagaggcttacaattgcgttctcttgtactactttgctaacaatgagacagtaacatggagagtaggtaactgttacaattctaatattgggctctgtagatatgaaaatatggcattccgttggttggtgagatctaataaggctacgtactttgattttgatagttaccagggatctaaatgtcccgatcagtattcttttaatattcctagaagcccattggagcagagatcttttattgcatatatgaggaattcctccttctctgacacacaaatatggatagatttgaactctatatctgtaagcaattgttgggtaagtggtggtccttatgctagttgcccatatgaaaaagtcatttctaggagaaatttcgtaacaatgatggtccctgcgtctgtctgttcctttgccttattatgtattgtcgtttacttgagtgtattgagggtccccatttatgataatagaaaaaattggagaagagttatcaataaaatctctaaatccgagttagaaggtgtcccttcttga

SEQ ID NO: 5145 - DNA, 522 bp, Saccharomyces cerevisiae
atgtccaacaaggcaagtgaccaatcagcacgcacggcttccatcctcaagactgatattaccagagaaaacacaatcaccagaagcagcagcagcaacaacgacaactaccatcaccacaataacatcaataattacaatgaatcggcgaagacaggagaggacgccaataaagagaatatacctaatttagaggaggagattgcggcctttcgaatttttaggaaaaaaagcacttcaaacttgaagtcgtcacacaccactagcaatttggtaaaaaagacaatgttcaaaagggatcttttaaaacaggatccgaagaggaaactccaactacaacaaagatttgcatcaccgactgacaggctggtatcaccatgctcattgaaattgaatgagcacaaagttaagatgttcggaaagaaaaagaaagtcaatcctatgaaactgaactttaaaggcaaccttgctgccgattcagaggatgtagaaatcgatgaagatgaggagtatttctactaa

SEQ ID NO: 5146 - DNA, 522 bp, Artificial Sequence
  Description of Artificial Sequence: Synthetic polynucleotide
atgtccaacaaggcaagtgaccaaagtgcacgcacggcttccatcctcaagactgatattaccagagaaaacacaatcaccagaagcagcagcagcaacaacgacaactaccatcaccacaataacatcaataattacaatgaaagtgcgaagacaggagaggacgccaataaagagaatatacctaatttagaggaggagattgcggcctttagaatttttaggaaaaaaagcacttctaacttgaagagttctcacaccactagcaatttggtaaaaaagacaatgttcaaaagggatcttttaaaacaggatccgaagaggaaactccaattacaacaaagatttgcaagtccgactgacaggttagtatctccatgctctttgaaattgaatgagcacaaagttaagatgttcggaaagaaaaagaaagtcaatcctatgaaattgaactttaaaggcaaccttgctgccgattctgaggatgtagaaatcgatgaagatgaggagtatttctactga

SEQ ID NO: 5147 - DNA, 597 bp, Saccharomyces cerevisiae
atgtctgaattcttttgggatgtacaaaaaatacaagagatttctaatgtcgaagaacattctgtggttaagtgtgttactgtgaatacgagcaggttaatttcgcagcttaacgaggagctacaagacgaagaaagtggcgtcaattttattgttacacagctgcaattactgataaataatgtctatgagaaaatacagaaaagccctggagttcccgcacatcgttctctgatgataaatttgaatttcacgcgcttgaaattctcaatagcttattgggatatcttattggagaggtcactagatctaataaatggaccatcgaaaacgggtgcccgctactttattacagaggttacaccagtagacagaagtcgatatgttgaaaacaatcaatattttctagcttttaaagctaaccagcgtttgacacggaacagcgtggatatggacgagtttattgattttgaaattctaatcaagcaaataattttcgacctcttcaaaaaaaacggaattccagatcaagattttgaagccattttatcaaggtttcataatttggaaagcttggtggttgcttttaatgaataa

SEQ ID NO: 5148 - DNA, 597 bp, Artificial Sequence
  Description of Artificial Sequence: Synthetic polynucleotide
atgtctgaattcttttgggatgtacaaaaaatacaagagatttctaatgtcgaagaacattctgtggttaagtgtgttactgtgaatacgagcaggttaatttctcagcttaacgaggagttacaagacgaagaaagtggcgtcaattttattgttacacagttacaattattgataaataatgtctatgagaaaatacagaaaagccctggagttcccgcacatcgttctttgatgataaatttgaatttcacgcgcttgaaattctctatagcttattgggatatcttattggagaggtccttggatttgataaatggaccatctaaaacgggtgcccgctactttattacagaggttacaccagtagacagaagtagatatgttgaaaacaatcaatattttttggcttttaaagctaaccagcgtttgacaagaaacagcgtggatatggacgagtttattgattttgaaattttgatcaagcaaataattttcgacctcttcaaaaaaaacggaattccagatcaagattttgaagccattttatctaggtttcataatttggaaagcttggtggttgcttttaatgaatga

SEQ ID NO: 5149 - DNA, 3213 bp, Saccharomyces cerevisiae
atgagcacatcacttctgtttgagcagctaaattttttaattttagtggcagcagaggctgagcttcccatcgctcactctactagaaagcttttgatggataattcatgcaataactgtcaaatatacgagctttataacgaaaatttgaaagatgtcaagacggataaagattggttcatgaacaaattcggcccgcaaacagtacattttgtcattagtaatacaatcaactttcctttttataagatagtttatttcgatcttttgatcccggtggtatcacacacttgggtccaggattcggtcaagacgaagagacatttgaggacaaatatgtattcacctaacccatttcatttgctccgagactgtcaagtatatatttccaaaagctcgtttaataagtgtgaatacatattatactctgatttgcttcatttattaggaggcactttagtcaattacatctcaaatagaacgacgcatgtgattgttcaaagtccccaggacccgatcatagcaacggtcagtaaattgacatttggctctttttcctcttcatcgaccaacaagcacaccgaaaagcctttgagagagtggaaatttgtctatccaatatggatattatatcatttcaaaatggcgaagcccttgaagggcgagcttgctactttgtgtgagcttgatatgcaggacaccagtgaggaacagttattcgcaaaatgggaagaggttattggcgataagcagacatcatcatcgcagcttactcttcatccaaacaaaactttattcaaaaatcaccactttgctatctcaccagatttaaactttttcacacctttgtattggtttttgaaaggatttatcgaggatttggacggcaaagtaactccgttgagtttttctgacgatctgaagtctgtttaccaagcttttcctgatattgactgttatatcggccactctgctaactcaccgatactagaaaaaaccaaaagcattaaaccggaaattcatgttgggaacgtaagttggttgttttatatgtttgcgctgcaaaaatttacacctgtatcgcaatgtaaacttattcaccaaccatttcatgcgaaattatttacttctaaggaattaacagtcgcgtacactaattatttcggctcccaaaggttttatattcagaggttagtagaaatattaggaggacttagcacacctgaactaacaagaaaaaacacacacttgatcacgaagagtacaattggcaaaaaattcaaagtcgcaaaaaaatggtcactggacccgcaaaatgccattattgtgacaaatcatatgtggttagagcaatgttatatgaataattccaagttaaaccccaaagacagtagatttcaaaattttaaattggatgataacatgggatggaatatcggccaaataggaatggatcattcatctctcccaactccaaaaaacctatcgatggtgacttacgacacgcaatccatatcagagaagccgcctcccacaaatgatcaaatggatcaaattaacgataacaccaatgtattatcaaagaaagatggtacgcccattagtagttttgagaactcaattgatgaaaagattgacaaattacaaaaaatatcaggagaggtggctgtaacccattctggagatttagaacggagttttgtttccagaccttcaagggcaagttttccagtagttgacagtaaaaaatctaatttacaaaagaaagactcaaactcagatattagtatggaaacagaggttttctgtgaaggacatgaaaaaagagaagaaaaggagtttacgaaacctattacggagtatgatgcacctaagaaacaagaaataagggaacagtcacgcaagaagaatgacatagattataaaaaagaagaggaagaaacggagctgcaagttcagctaggacaacgaactaaacgagagatcaaaacttcgaagaaaaatgaaaaggagaaagaaaccaatgaatgtcacattgaagtagatcaaatgacgaatgaaaagcaaggggaggaaagtacaggaaaactgatttctacggaagacgtcacttctaaaaaagatacagataaattctcgcatttgtttgaaggattatctgataatgatgatcacattaatgacgaaaaaccggcagttaattccaaatataccacacccaagacgtctcaaaatattacgagtggcgttgatactccaaccaccgcgcaaacgcaagtttttatgccatcaagtggcaattcaaggttagcaaagacacaagctgcgaagagattgcatacagatattgaatcattaaatgaatttcagaaaaactttaaaaggaagagaattgatagcgaggagatttcattgtcccaagatgttgaaaggtcaaataataacaaagaactggctactaaagcggaaaagatattagctagatttaatgaactaccaaattatgacctaaaagcggtttgcaccggttgtttccatgatggatttaatgaggttgacatcgaaatattgaaccaactaggtataaaaatttttgacaatattaaagaaacggataaattgaattgtatttttgctccaaagattttgagaaccgagaaatttttaaaaagcttaagttttgaaccgttaaaattcgcattgaaacctgaatttattattgatttactgaaacaaattcattctaaaaaagataaactttctcaaataaatataaacttgtttgattatgagataaatggaattaatgagagtataatatcaaaaaccaaactacctactaaggtgttcgaaagagcgaatattagatgcattaacttagtcaatgatataccgggtggtgtagatacaataggctctgttctaaaggcacatggtatcgaaaaaatcaacgttttacgtagtaagaaatgcacatttgaagacataatcccaaatgacgtttctaagcaggaaaacggaggcatttttaaatacgtacttatcgtcaccaaagcttcacaggttaaaaaatttaccaaactgattaatgatcgtgataaaaacgaaacaattttgattgttgaatggaattggtgtgttgaatcaatttttcatctcaatgttgattttacatcaaagaaaaatgttttgtatcaaaagaaaaataactaa

SEQ ID NO: 5150 - DNA, 3213 bp, Artificial Sequence
  Description of Artificial Sequence: Synthetic polynucleotide
atgagcacatctcttttatttgagcagttgaattttttaattttagtggcagcagaggctgagcttcccatcgctcactctactagaaagcttttgatggataattcttgcaataactgtcaaatatacgagctttataacgaaaatttgaaagatgtcaagacggataaagattggttcatgaacaaattcggcccgcaaacagtacattttgtcattagtaatacaatcaactttcctttttataagatagtttatttcgatcttttgatcccggtggtaagccacacttgggtccaggattctgtcaagacgaagagacatttgaggacaaatatgtattctcctaacccatttcatttgctcagagactgtcaagtatatatttccaaaagctcctttaataagtgtgaatacatattatactctgatttgcttcatttattaggaggcactttagtcaattacatctctaatagaacgacgcatgtgattgttcaaagtccccaggacccgatcatagcaacggtcagtaaattgacatttggctctttttcctcttcttccaccaacaagcacaccgaaaagcctttgagagagtggaaatttgtctatccaatatggatattatatcatttcaaaatggcgaagcccttgaagggcgagcttgctactttgtgtgagcttgatatgcaggacaccagtgaggaacagttattcgcaaaatgggaagaggttattggcgataagcagacatcttcttctcagcttactcttcatccaaacaaaactttattcaaaaatcaccactttgctatctctccagatttaaactttttcacacctttgtattggtttttgaaaggatttatcgaggatttggacggcaaagtaactccgttgagtttttctgacgatttgaagtctgtttaccaagcttttcctgatattgactgttatatcggccactctgctaactctccgatattggaaaaaaccaaaagcattaaaccggaaattcatgttgggaacgtaagttggttgttttatatgtttgcgttgcaaaaatttacacctgtatctcaatgtaaacttattcaccaaccatttcatgcgaaattatttacttctaaggaattaacagtcgcgtacactaattatttcggctcccaaaggttttatattcagaggttagtagaaatattaggaggacttagcacacctgaattaacaagaaaaaacacacacttgatcacgaagagtacaattggcaaaaaattcaaagtcgcaaaaaaatggtctttggacccgcaaaatgccattattgtgacaaatcatatgtggttagagcaatgttatatgaataattccaagttaaaccccaaagacagtagatttcaaaattttaaattggatgataacatgggatggaatatcggccaaataggaatggatcattcttctctcccaactccaaaaaacttatctatggtgacttacgacacgcaatccatatctgagaagccgcctcccacaaatgatcaaatggatcaaattaacgataacaccaatgtattatccaagaaagatggtacgcccattagtagttttgagaactctattgatgaaaagattgacaaattacaaaaaatatctggagaggtggctgtaacccattctggagatttagaaagaagttttgtttccagaccttctagggcaagttttccagtagttgacagtaaaaaatctaatttacaaaagaaagactccaacagtgatattagtatggaaacagaggttttctgtgaaggacatgaaaaaagagaagaaaaggagtttacgaaacctattacggagtatgatgcacctaagaaacaagaaataagggaacagtcccgcaagaagaatgacatagattataaaaaagaagaggaagaaacggagttacaagttcagttaggacaaagaactaaaagagagatcaaaacttctaagaaaaatgaaaaggagaaagaaaccaatgaatgtcacattgaagtagatcaaatgacgaatgaaaagcaaggggaggaaagtacaggaaaattgatttctacggaagacgtcacttctaaaaaagatacagataaattctctcatttgtttgaaggattatctgataatgatgatcacattaatgacgaaaaaccggcagttaattccaaatataccacacccaagacgtctcaaaatattacgagtggcgttgatactccaaccaccgcgcaaacgcaagtttttatgccatctagtggcaattctaggttagcaaagacacaagctgcgaagagattgcatacagatattgaatctttaaatgaatttcagaaaaactttaaaaggaagagaattgatagcgaggagatttctttgtcccaagatgttgaaaggtctaataataacaaagaattggctactaaagcggaaaagatattagctagatttaatgaattaccaaattatgacttgaaagcggtttgcaccggttgtttccatgatggatttaatgaggttgacatcgaaatattgaaccaattgggtataaaaatttttgacaatattaaagaaacggataaattgaattgtatttttgctccaaagattttgagaaccgagaaatttttaaaaagcttaagttttgaaccgttaaaattcgcattgaaacctgaatttattattgatttattgaaacaaattcattctaaaaaagataaactttctcaaataaatataaacttgtttgattatgagataaatggaattaatgagagtataatatccaaaaccaaattacctactaaggtgttcgaaagagcgaatattagatgcattaacttagtcaatgatataccgggtggtgtagatacaataggctctgttttgaaggcacatggtatcgaaaaaatcaacgttttacgtagtaagaaatgcacatttgaagacataatcccaaatgacgtttctaagcaggaaaacggaggcatttttaaatacgtacttatcgtcaccaaagcttctcaggttaaaaaatttaccaaattgattaatgatcgtgataaaaacgaaacaattttgattgttgaatggaattggtgtgttgaaagtatttttcatctcaatgttgattttacatccaagaaaaatgttttgtatcaaaagaaaaataactga

SEQ ID NO: 5151 - DNA, 3687 bp, Saccharomyces cerevisiae
atgcatgaacacaaagcggagctacggctaataaccgttgcacttaacgaagcatccaccgattccccctcttttagagcttctgtcaattatttccataccagaatggaatctctgagtagttggatgcacagtactgtggattatgtagaaaatacgtacaagccttcgttccaagacttccaaagaataaaggaaacactattttcacagctgctcccttctcctatattactctccaatggatttgtcagtaaccagccatatactcccttgcttgtaagagactttactagagatgtcagtgacctttcaaatacggttatgaaaataattttaggtgatgaaaactcacaatacactgcggcattgtctgctttgagctctgatgctattaacccttacttcaacaagagaaaaacttttgaatactaccaaaggaagtatgattcgtttttaactgactttttagcggccactaatgatggcaatactttaattccacaaaatctgcaaaatgaaacattcaaattagtcgatattaaacacaaatatatagaagcttccttggatttgactgaggctatttcgttaatgaaagttaatttggataaattcctgatagagacaatagacattgtgcgcaaaaataacgttattactaccaaggacaccaaggacgttatcgacattactcccgaacttacggaaacattaaaggattggaccgattggatagaaagtaaccttcagactttacaagcattgtcatccaagctatctgaagctaagtatgccattctgaagctcagcttggcaagaatgaagccatctcgcctgatacaagactatgatttgaaaagcatacaaaatttgaagtttaaccttccaaaatcgataagtaacggaaataattctgaggaaaaagggctatcgggttggttgtacatgaaaactacagttggtcatgatccgaaaagagttgtgtgggtaagaagatggtgctttctacagaacaatgtttttggagttttttcactgtcgcctagcaaaacttatgtcgaagaaaccgataaattcggtatattatggataactgtagaatatctgcccaaagaacctagaaatttttgtttcaaattgaggattcaaaatccaaattgcaaaacagaagaagaaaatacatacatagatatcatcctgcaagctgaaagtattgacgagttaaaatcgtggataaacaccttaacttctcacaaaagaatcgcattgtcgataaaggaggaaaacgatcctcgttatcaattggcgagaaaaaaaattgaacctcaatttttcgagtttgcttcaagtagctcaacgtcaacagataaattattaacttcattttccagtaaaactttgacattggtagaagagctaaaaaaaaattatatgtcagaggatgatatatactctatcattgataataaggcataccatctgagagtaatttctacaccgatagccacgcagttgactcatttggctttattctctacatttctatctgtatcaaattattatccgtgtgctacccaggcaaacacctggggtacggcaaattggaatgatttgtcctatttagtcaatccactcaaaggaagttcagtacacaagccagccacagtatcgaattcttccaggttttccgttagctaccccgactattatccatacagcctgaaagtcgatgatatacaatttagatcaattttcttttcagtgaatcatgattttttacaagtcccaaaagaacttgttcttttaagatattcatcggtgtggtgcccgaacaataaacaaaaatttgcatctatggcttttgttacccttaaccacatttatgtctatttaaatatttcaggcttttcatatttgagaagaatagatttactagatatcgactcaatcgaatatgataaaagcccaaaacatgtttcttcaagaatgctgcacatgcaaagaggcgatggactcaggtttaatatgtccgtcttttttacagatcgaagagcagttgcctcaaagttacaatttctgatagaaaataaggcaatgcatatcccaaagggcgaaaaagaggttttagaaattttccaggaattagacgaagagattgagaacgaaaaaaaaatcatcaaagataatttgtcagaatcagaacattattcaaaagattatgattatctattgaagagcacgtatgaccatcattttgagaatactaacgaaacgcctatggaattaatgagcaggaaactccgtttagaaagggaagcctggtgctactttcaagacaattttaaagtcggaagcaagacgctattccacgttctttttggagacaaatctcaagtttttccaagttcactatttctttgtaagaagggcagtaacttgaataacaattcatactgggagcgcattaggcgcgcgaaagaagatgcaagttgtcaatttgaactttgccgtaagttacagtttcaactgaatcgaacttctaattttatcaaagatctattatggttgaaggatgacaatgacaacttcaaattagttcttcagcagcgtgtgacaaaaataaaacaaggttattattttgaggtggaagaaggtcccattattgtgaaatttccgctatgccatcccttactccttcgtgtgaggttcataattgcagaatgtatcacctctcaaggagagtccctcaaaaaatgtgacctggcaatactatatgacttcaactatgttgaatctattgataagttgaataccaaagttgaaaaactatggctttttgaaagaatacacctcaactgggcattgagatattgtaaacttgaacattctgaaattaacagaaagacgagggaatatctaaaaaaattcaacgatagagaaaaaatgagtgatgttattaaattgtgtggattccttggtgttttaccaaaggaaagaatagaaaacgatgaaaaggccggcgatttcatgcaacctgtatatatcaattatgattttctgtctctttcaaaaatttttacaaaattgaccgtgttttatttaagcagtgtcatcattaagaccatgaaagttttactggcaatggtaatggttatcttcaaatgtttttcaaaagttaacaaaactttatactattgtcttttgatatctgcggtaaccaatttgttctttgttggtaaatctattcattcatatttctccgtaaagtcagccgaaaccctatttcagaactatgccaatggtgatcagcgaggacttcaaatcatgcatcggtctttgacagtgcctgatttgaacctacttacaagaaaaatgatggataatgaccaggaaaatccagtattcaagagatttgacgaagacaaaaatgcataccagtacaaaggaacaaggcaagaaattgcaattaaacgaaaccaagtgctgacggaattaaaaattctacaaaatacggaaaaggaactcgtacagggaagttacagaaaattcataataacagaaagagacaaatgcatcaccactcagaatgaaatctttgatttatggataaacgataccaaactacaagattattgtatggcatgttttgcagagtacaacagattatctgccattccagtctga

SEQ ID NO: 5152 - DNA, 3687 bp, Artificial Sequence
  Description of Artificial Sequence: Synthetic polynucleotide
atgcatgaacacaaagcggagttaaggttgataaccgttgcacttaacgaagcatccaccgattccccctcttttagagcttctgtcaattatttccataccagaatggaatctttgagtagttggatgcacagtactgtggattatgtagaaaatacgtacaagccttctttccaagacttccaaagaataaaggaaacattattttcccagttgctcccttctcctatattactctccaatggatttgtcagtaaccagccatatactcccttgcttgtaagagactttactagagatgtcagtgacctttctaatacggttatgaaaataattttaggtgatgaaaactctcaatacactgcggcattgtctgctttgagctctgatgctattaacccttacttcaacaagagaaaaacttttgaatactaccaaaggaagtatgattcttttttaactgactttttagcggccactaatgatggcaatactttaattccacaaaatttacaaaatgaaacattcaaattagtcgatattaaacacaaatatatagaagcttccttggatttgactgaggctatttctttaatgaaagttaatttggataaattcttgatagagacaatagacattgtgcgcaaaaataacgttattactaccaaggacaccaaggacgttatcgacattactcccgaacttacggaaacattaaaggattggaccgattggatagaaagtaaccttcagactttacaagcattgtcttccaagttatctgaagctaagtatgccattttgaagctcagcttggcaagaatgaagccatctcgcttaatacaagactatgatttgaaaagcatacaaaatttgaagtttaaccttccaaaatctataagtaacggaaataattctgaggaaaaagggctttctggttggttgtacatgaaaactacagttggtcatgatccgaaaagagttgtgtgggtaagaagatggtgctttttgcagaacaatgtttttggagttttttctttatctcctagcaaaacttatgtcgaagaaaccgataaattcggtatattatggataactgtagaatatttacccaaagaacctagaaatttttgtttcaaattgaggattcaaaatccaaattgcaaaacagaagaagaaaatacatacatagatatcatcttgcaagctgaaagtattgacgagttaaaaagttggataaacaccttaacttctcacaaaagaatcgcattgagcataaaggaggaaaacgatcctcgttatcaattggcgagaaaaaaaattgaacctcaatttttcgagtttgcttccagtagctctacgagtacagataaattattaacttctttttccagtaaaactttgacattggtagaagagttgaaaaaaaattatatgtctgaggatgatatatactctatcattgataataaggcataccatttaagagtaatttctacaccgatagccacgcagttgactcatttggctttattctctacatttttatctgtatctaattattatccgtgtgctacccaggcaaacacctggggtacggcaaattggaatgatttgtcctatttagtcaatccactcaaaggaagttctgtacacaagccagccacagtatctaattcttccaggttttccgttagctaccccgactattatccatacagcttgaaagtcgatgatatacaatttagatctattttcttttctgtgaatcatgattttttacaagtcccaaaagaacttgttcttttaagatattcttctgtgtggtgcccgaacaataaacaaaaatttgcatctatggcttttgttacccttaaccacatttatgtctatttaaatatttctggcttttcttatttgagaagaatagatttattagatatcgactctatcgaatatgataaaagcccaaaacatgtttcttctagaatgttgcacatgcaaagaggcgatggactcaggtttaatatgtccgtcttttttacagatagaagagcagttgcctccaagttacaatttttaatagaaaataaggcaatgcatatcccaaagggcgaaaaagaggttttagaaattttccaggaattagacgaagagattgagaacgaaaaaaaaatcatcaaagataatttgagtgaaagtgaacattattctaaagattatgattatcttttgaagagcacgtatgaccatcattttgagaatactaacgaaacgcctatggaattaatgagcaggaaactccgtttagaaagggaagcctggtgctactttcaagacaattttaaagtcggaagcaagacgcttttccacgttctttttggagacaaatctcaagtttttccaagttctttatttctttgtaagaagggcagtaacttgaataacaattcttactgggagcgcattaggcgcgcgaaagaagatgcaagttgtcaatttgaactttgccgtaagttacagtttcaattgaatagaacttctaattttatcaaagatttattatggttgaaggatgacaatgacaacttcaaattagttcttcagcagcgtgtgacaaaaataaaacaaggttattattttgaggtggaagaaggtcccattattgtgaaatttccgttatgccatcccttactccttcgtgtgaggttcataattgcagaatgtatcacctctcaaggagagtccctcaaaaaatgtgacttggcaatactttatgacttcaactatgttgaatctattgataagttgaataccaaagttgaaaaattatggctttttgaaagaatacacctcaactgggcattgagatattgtaaacttgaacattctgaaattaacagaaagacgagggaatatttgaaaaaattcaacgatagagaaaaaatgagtgatgttattaaattgtgtggattccttggtgttttaccaaaggaaagaatagaaaacgatgaaaaggccggcgatttcatgcaacctgtatatatcaattatgattttttatctctttctaaaatttttacaaaattgaccgtgttttatttaagcagtgtcatcattaagaccatgaaagttttattggcaatggtaatggttatcttcaaatgtttttccaaagttaacaaaactttatactattgtcttttgatatctgcggtaaccaatttgttctttgttggtaaatctattcattcttatttctccgtaaagtctgccgaaaccttatttcagaactatgccaatggtgatcagaggggacttcaaatcatgcatagatctttgacagtgcctgatttgaacttacttacaagaaaaatgatggataatgaccaggaaaatccagtattcaagagatttgacgaagacaaaaatgcataccagtacaaaggaacaaggcaagaaattgcaattaaaagaaaccaagtgttaacggaattaaaaattttacaaaatacggaaaaggaactcgtacagggaagttacagaaaattcataataacagaaagagacaaatgcatcaccactcagaatgaaatctttgatttatggataaacgataccaaattacaagattattgtatggcatgttttgcagagtacaacagattatctgccattccagtctga

SEQ ID NO: 5153 - DNA, 1023 bp, Saccharomyces cerevisiae
atgaaatatacgcaatacccgaacagctcaaaactgaaaagaaatagtgatcgacgtgaacacgacgaaaagcttagcgatgagttacataatcaaagtacgatatatgaagatgaagagctaagcagggcagaatatgattctgattctgattctagcgttgaagattctacagataatgaaaatagtgggaaagaaatggatgaaaaatcctatgaaaaaaatgaagatcacgtcgaagaccatagaaagcgaaagaaatcgaaaattcagcttttggatattgcagagttcaagaaagaaaacttagccgacttagattatcagatcggtaattcagagagcaaggtagaaaaaggtgtgaatatagagccatttaatatagatgacgaaataaaacatggggtattcgataaagatgggaattatattaagacagaaaacgccacagaaaatgatcaacaagataatgaggaatggatgaatgatgtcataaatacagaggaggtaaatcgcttagaaaaggaacaaagtgtcaaaacgcagaattcgagacattatatggtccacgaagcattaaatcttttgaaattttttcttgttgatgagaatgaaacagtactggaatccttgggcaggttaaacaagctgcgaaaaattgccatttcaaaaaagaacaaatcattgaaatatgttattcacggaatcgagctattatctgatttgatcaatatactagaaaaaaagggattcagtgaagtatatgaatataaccgcttaaaagttcaggatgctatagaagaggaaattttcgatgactcctccagaatagttaaccataaaacaaagttatggggcttcaagtggttgaacaaattagatgaatatcacggcctgtacacgaactatgaaatgtcttattggcaaaaatcctacttcaaaaacagtgttatagtaaaatttcacagcgaaccagatcgagatgaaaactggatacatgtatcgtgtttaagtttcatgtaa

SEQ ID NO: 5154 - DNA, 1023 bp, Artificial Sequence
  Description of Artificial Sequence: Synthetic polynucleotide
atgaaatatacgcaatacccgaacagcagtaaattgaaaagaaatagtgataggcgtgaacacgacgaaaagcttagcgatgagttacataatcaaagtacgatatatgaagatgaagagttgagcagggcagaatatgattctgattctgattctagcgttgaagattctacagataatgaaaatagtgggaaagaaatggatgaaaaatcctatgaaaaaaatgaagatcacgtcgaagaccatagaaagagaaagaaatctaaaattcagcttttggatattgcagagttcaagaaagaaaacttagccgacttagattatcagatcggtaattctgagagcaaggtagaaaaaggtgtgaatatagagccatttaatatagatgacgaaataaaacatggggtattcgataaagatgggaattatattaagacagaaaacgccacagaaaatgatcaacaagataatgaggaatggatgaatgatgtcataaatacagaggaggtaaatcgcttagaaaaggaacaaagtgtcaaaacgcagaattctagacattatatggtccacgaagcattaaatcttttgaaattttttcttgttgatgagaatgaaacagtattggaatccttgggcaggttaaacaagttaagaaaaattgccatttccaaaaagaacaaatctttgaaatatgttattcacggaatcgagttattatctgatttgatcaatatattggaaaaaaagggattcagtgaagtatatgaatataaccgcttaaaagttcaggatgctatagaagaggaaattttcgatgactcctccagaatagttaaccataaaacaaagttatggggcttcaagtggttgaacaaattagatgaatatcacggcctttacacgaactatgaaatgtcttattggcaaaaatcctacttcaaaaacagtgttatagtaaaatttcacagcgaaccagatagagatgaaaactggatacatgtatcttgtttaagtttcatgtga

SEQ ID NO: 5155 - DNA, 549 bp, Saccharomyces cerevisiae
atgtccatcgaggaggaagatacaaataagatcacatgtacgcaagactttcttcaccaatactttgtaactgaaagggttagcattcaatttgggttaaataacaagaccgtaaaaaggataaataaagatgaatttgataaggcagtaaattgtatcatgtcatggacaaactatcctaagcctgggttaaaacgaacagcttcaacgtacctcttaagcaattcctttaagaaatctgcaacagtatctcttccgtttatcttaggcgacccagtatgcatgccgaagagggtggaaagcaataataatgatacctgtcttctgtatagtgacacattatatgacgatcctttaatacagaggaatgatcaagcaggagatgaaatagaggatgaatttagctttacattgctacgaagtgaagtaaatgaaatcagacccatatcttcgtccagcaccgcccaaatactgcaatcggactattctgcgctgatgtatgagagacaggcttcaaatgggagcatatttcagtttagtagtccctga

SEQ ID NO: 5156 - DNA, 549 bp, Artificial Sequence
  Description of Artificial Sequence: Synthetic polynucleotide
atgtccatcgaggaggaagatacaaataagatcacatgtacgcaagactttcttcaccaatactttgtaactgaaagggttagcattcaatttgggttaaataacaagaccgtaaaaaggataaataaagatgaatttgataaggcagtaaattgtatcatgtcttggacaaactatcctaagcctgggttaaaaagaacagcttccacgtacctcttaagcaattcctttaagaaatctgcaacagtatctcttccgtttatcttaggcgacccagtatgcatgccgaagagggtggaaagcaataataatgatacctgtcttttatatagtgacacattatatgacgatcctttaatacagaggaatgatcaagcaggagatgaaatagaggatgaatttagctttacattgttaagaagtgaagtaaatgaaatcagacccatatcttcttccagcaccgcccaaatattgcaatctgactattctgcgttaatgtatgagagacaggcttctaatgggagcatatttcagtttagtagtccctga

SEQ ID NO: 5157 - DNA, 3495 bp, Saccharomyces cerevisiae
atggctggattcagcttcgccaagaaattcactcacaagaaacatggaaagacgccttctgatgcttctatctctgaccaatctagagaagcttcactgtcaactcctccaaatgaaaaatttttcacaaaacaagaaacgcctcagaaagggcgtcaattttcacaaggttaccattctaatgttaataaaactagttcaccacctatgtttgccagaaaacaggtatccgaatcaaggattcaaccgagcgcagtaccaccgcaacagcgaaatgtctcaggaccgtccactactctccataagcagctttcaaaacagagagaatataccgtatggaatagaatcaagttacagaattctccttttccacgttatagacatgttgcttcagcatatgttacagacaagaaccagatatatgttattgggggacttcatgaccaatctgtgtacggcgatacatggatattaacggccttcgataatgccaccagattttccactacaacgatagacataagtgaagctacaccaccaccaagggtaggccacgctgctgtattatgcgggaatgcctttgttgtatttggcggtgacacacacaaagtcaataaggaaggtttgatggacgatgacatataccttttgaatattaattcctataaatggacagtcccggcacccgtgggaccacgtccattgggaaggtacggtcataaaatttcgattatcgccacaactcaaatgaaaacaaaactgtacgtgtttggtggtcaatttgatgacacctacttcaacgacttggctgtttacgacttatcttcttttagaagaccggactctcattgggaatttttgaaaccaaggacctttacaccaccacctattaccaattttactatgatatcatacgattctaaactatgggtatttggtggcgataccttacaaggtttagtaaatgatgtgtttatgtacgaccctgcaataaatgattggtttatcattgataccacgggtgaaaagcctcctccagttcaagaacatgctactgtagtctacaacgatctgatgtgtgttgtaggcgggaaagatgagcatgatgcttatttgaactccgtgtatttcctaaacttgaaatcgcgtaaatggtttaaattacctgtatttacggctggaattccgcaaggccgttctgggcattctttaacattattaaaaaatgataaaattttgattatgggaggagataaatttgattacgctagagtcgaggagtacgacttgcatacctctgatattgatatgcaaagaggtacaattgtttatacgctagacttggcccgcataaaggacctttgtccaggcgtaatggatgttccaactgatacgccaactccgagaaatggtaatcttgacctggcgacgcccgttaccccaacctctcatcaaactaaaaatatgaacgtaccaatttcagcagctcctctagcttccgctccatcacctgcaccaaaagatttttcagatgctgatcgcctcaacagggaggtacacaatcgaaatgtgtcaacagaacaccaaaatcagagccacccagtaaattctgaatctcacttgattgctgagcctaacattttgactccatatgttccatctgaaagctcacaaacgccggttatgaaaataacttccaacaaaccatttgatacgcctactatccagaaagaacctgatctttctgaaactatggatccaacagttggaaatcagcgcatcccatcttcaatctatggagataatctcacccctgcaaaccaaataaagaataactccccaatattagagacgcttccaagtaatgagataaaaacgccccaaaatggtaatatagaggaaataaaacatcttcctgacgctgatgaaaaaatagattccacgacgaccttcgaccaagagataaacggggacaaactaggcacatcttcgatgtccaaggttgaagaggacggcaatgttgctgacgaagacgacgaaatcggtgtggctcaaatggcgagctccccatccaaagatcagttcaaaataaagcattataatgaatcttcagaattatcacagaataatacggagatcgacaaactgtccgagcctgtggatattacaataaagaaaagcgacaccgcgggccatgatagtgctaaccatgttattgatgcaagtgatgaaaaaaacgtgtccccaatgggagacgttccaactgatacgaaaaatgaagaagctagcgttcctataaatagagatgctactaccgaagtcgtagatagggcactatttgagaaattaagatcggaattgcaaagtttgaaagaattgacgcacgaaaaggcgcttgaagccggagctcacataaaggaattagagacggagctatggcagttaaaatcccagaagaattctgggacaacgaaagaaatagatgaattggattccgtcagactgcaatcaaaatgtgaaatactagaggcagataatcattccttggaagataaagttaatgagctagaagagttggtgaatagcaaattcttagacatagagaatctaaatgaagttatacaatttcagaacgaaaaaattaaatccttagaactagagcctaattacaaagaaaaacttgaagaactacagatagaacatgagaatttgagtagagaaaatgaaaggttgaaaaatgaaagcaaacaacataacgaagatataatcaataatgttgcgaattactcgtcacagttaggctcattgatcagtcattggaaagaaaacagagccaactcttcgtttcttgaatcttcttcttctttgatatctgtatcggatgaaaatggcgagaaaactgtcggtgaaccctatggtgatcaaagtcgtcaccaccgtgtagtgattaacaaactaacgaatagattggacgatttgctggagagaagtcaagagctaacaatatctaaagaaaaactatcttctgaataccatgctttaaagatggaacacagctcattaagtcaagatgtattagtaaaagagaatgaaatcaaaaaaatacagaatgattacaaagaaagtatcagttctatggacagtgcaagtaaggcactaatggtttcacaaagagagctagagaagtacaagagtttgaataaaaagttaatcgacgagttagatgaattgaagttcaaaaatggcgtctgcagtgaaaatttcgaaaatggtctcagaagcaccgaggagagttccaataatgtaaaaaatagcaacagcataagagaaaatcaattcaacatcaaaataaatgatctgaaagcggaactcttcatcactaatcaagaaagagatgacttgaaaagtgaagtgttagagttgaaaaagagattattgaatttggaaaataacaccaaacaagttaatgaagatgctgacagcgatctactataa

SEQ ID NO: 5158 - DNA, 3495 bp, Artificial Sequence
  Description of Artificial Sequence: Synthetic polynucleotide
atggctggattcagcttcgccaagaaattcactcacaagaaacatggaaagacgccttctgatgcttctatctctgaccaatctagagaagcttctttatctactcctccaaatgaaaaatttttcacaaaacaagaaacgcctcagaaagggcgtcaattttctcaaggttaccattctaatgttaataaaactagttctccacctatgtttgccagaaaacaggtatccgaaagtaggattcaaccgagcgcagtaccaccgcaacagagaaatgtcagtggaccgtccactactctccataagcagctttctaaacagagagaatataccgtatggaatagaatcaagttacagaattctccttttccacgttatagacatgttgcttctgcatatgttacagacaagaaccagatatatgttattgggggacttcatgaccaatctgtgtacggcgatacatggatattaacggccttcgataatgccaccagattttccactacaacgatagacataagtgaagctacaccaccaccaagggtaggccacgctgctgtattatgcgggaatgcctttgttgtatttggcggtgacacacacaaagtcaataaggaaggtttgatggacgatgacatataccttttgaatattaattcctataaatggacagtcccggcacccgtgggaccacgtccattgggaaggtacggtcataaaatttccattatcgccacaactcaaatgaaaacaaaactttacgtgtttggtggtcaatttgatgacacctacttcaacgacttggctgtttacgacttatcttcttttagaagaccggactctcattgggaatttttgaaaccaaggacctttacaccaccacctattaccaattttactatgatatcttacgattctaaattatgggtatttggtggcgataccttacaaggtttagtaaatgatgtgtttatgtacgaccctgcaataaatgattggtttatcattgataccacgggtgaaaagcctcctccagttcaagaacatgctactgtagtctacaacgatttgatgtgtgttgtaggcgggaaagatgagcatgatgcttatttgaactccgtgtatttcttgaacttgaaatctcgtaaatggtttaaattacctgtatttacggctggaattccgcaaggccgttctgggcattctttaacattattaaaaaatgataaaattttgattatgggaggagataaatttgattacgctagagtcgaggagtacgacttgcatacctctgatattgatatgcaaagaggtacaattgtttatacgcttgacttggcccgcataaaggacctttgtccaggcgtaatggatgttccaactgatacgccaactccgagaaatggtaatcttgacttggcgacgcccgttaccccaacctctcatcaaactaaaaatatgaacgtaccaatttctgcagctcctttggcttccgctccatctcctgcaccaaaagatttttctgatgctgatcgcctcaacagggaggtacacaatagaaatgtgtctacagaacaccaaaatcagagccacccagtaaattctgaatctcacttgattgctgagcctaacattttgactccatatgttccatctgaaagctctcaaacgccggttatgaaaataacttccaacaaaccatttgatacgcctactatccagaaagaacctgatctttctgaaactatggatccaacagttggaaatcagcgcatcccatcttctatctatggagataatctcacccctgcaaaccaaataaagaataactccccaatattagagacgcttccaagtaatgagataaaaacgccccaaaatggtaatatagaggaaataaaacatcttcctgacgctgatgaaaaaatagattccacgacgaccttcgaccaagagataaacggggacaaattgggcacatcttctatgtccaaggttgaagaggacggcaatgttgctgacgaagacgacgaaatcggtgtggctcaaatggcgagctccccatccaaagatcagttcaaaataaagcattataatgaatcttctgaattatctcagaataatacggagatcgacaaactttccgagcctgtggatattacaataaagaaaagcgacaccgcgggccatgatagtgctaaccatgttattgatgcaagtgatgaaaaaaacgtgtccccaatgggagacgttccaactgatacgaaaaatgaagaagctagcgttcctataaatagagatgctactaccgaagtcgtagatagggcattatttgagaaattaagaagtgaattgcaaagtttgaaagaattgacgcacgaaaaggcgcttgaagccggagctcacataaaggaattagagacggagttatggcagttaaaatcccagaagaattctgggacaacgaaagaaatagatgaattggattccgtcagattacaaagtaaatgtgaaatattggaggcagataatcattccttggaagataaagttaatgagttagaagagttggtgaatagcaaattcttagacatagagaatttgaatgaagttatacaatttcagaacgaaaaaattaaatccttagaattagagcctaattacaaagaaaaacttgaagaattacagatagaacatgagaatttgagtagagaaaatgaaaggttgaaaaatgaaagcaaacaacataacgaagatataatcaataatgttgcgaattactcttctcagttaggctctttgatcagtcattggaaagaaaacagagccaactcttcttttcttgaatcttcttcttctttgatatctgtatctgatgaaaatggcgagaaaactgtcggtgaaccctatggtgatcaaagtcgtcaccaccgtgtagtgattaacaaattaacgaatagattggacgatttgttggagagaagtcaagagttgacaatatctaaagaaaaattatcttctgaataccatgctttaaagatggaacacagctctttaagtcaagatgtattagtaaaagagaatgaaatcaaaaaaatacagaatgattacaaagaaagtatcagttctatggacagtgcaagtaaggcattaatggtttctcaaagagagttagagaagtacaagagtttgaataaaaagttaatcgacgagttagatgaattgaagttcaaaaatggcgtctgcagtgaaaatttcgaaaatggtctcagaagcaccgaggagagttccaataatgtaaaaaatagcaacagcataagagaaaatcaattcaacatcaaaataaatgatttgaaagcggaactcttcatcactaatcaagaaagagatgacttgaaaagtgaagtgttagagttgaaaaagagattattgaatttggaaaataacaccaaacaagttaatgaagatgctgacagcgatttattatga

SEQ ID NO: 5159 - DNA, 1515 bp, Saccharomyces cerevisiae
atgaataaatttgacgagtttatagagtctaatgagaaggatttggatgtggacaccagtacccgaaatagtataatttcgatgtcacctgtgaggaaaactggacgaaagattcgttctgctagttccaatggatataggctagaacaccatcgtacgtccagtgcgggaagcatgcattcgcaaagactaatgacgcctaccagattaaatgaccaggaccatcccttacaagccaagccagatgctaggagggtggtaactcgtcattcttctgtctcagttccaaatgcaatgagcaagagaagatcacttattcaacccatggttgttcccactacaccagaatctcaaaacaacttaccttcagtaagtcattctgagggatcctatggaatcccattagagtcaaccactgtactttctagtgagcaagcgatggccagcggacttcgacggtctagaaatgggagttcgcagtcggttaatagtatgatagcgaccaccataccaacaaatggggtcgatgtaagtgcgcttctacaatctctcgctacaaaagagttagaacttctggaatgcaaacaaaagattgaagatttgaaaaagcaaacccagcatgaagagcaaaactatactcgtcgggcacgtgaactgcatgaactcaaggagcaagtgagtaaacatttggatccctctctaaatacacctgttaaaaaccgggctttttcaccggtttaccagaatatacctttggaatcacgaactgaaaatgctggtaacagcagccttcctagttctgtcagtaaaccaaagaacatgggtcatcaaagtactaatcagtcaagatctgtgtctccgcaagatattcaagaaaggcgccaaagggacgactcgtcagattcatccaaacagtcactttggagcaaaccattagctctgtttaatcagtttgataaaatcattcagcatgaaattgaaagaactctgaattgggatgactctctttcaggtacgcctgaggtacaggaagggacaccgactagtaatagcgagtcgtccgcgcaacagtacgataatgaagcacctggagctcgccaaaaatctccttcgcaaggatcagtctccaggtcgctttggagctttgttagcgatgtcaaggccggattactcggtatagaagaagaaaacgataatgatgttattactgataacagatgtgatcctgtatataaaagcgatagacagcatgaacagaaaaaaagtacacataaaattacgaaccgggggcaagcagaagatagtggcgacgattctagtttaaacatgaggaaatttaaaacgacaactaagttccagaaagacaatgctgggaataatagtctcacagatgaaagtggacatcgaacacgagaaaaaaaaagtaaaagaagtagtaacaagctaagttttattggagaacccgataatgataattcctccgtcaaaaactcagttgaaatgacagacttctaa

SEQ ID NO: 5160 - DNA, 1515 bp, Artificial Sequence
  Description of Artificial Sequence: Synthetic polynucleotide
atgaataaatttgacgagtttatagagtctaatgagaaggatttggatgtggacaccagtaccagaaatagtataatttccatgtctcctgtgaggaaaactggaagaaagattcgttctgctagttccaatggatataggttagaacaccatcgtacgtccagtgcgggaagcatgcattctcaaagattaatgacgcctaccagattaaatgaccaggaccatcccttacaagccaagccagatgctaggagggtggtaactcgtcattcttctgtctctgttccaaatgcaatgagcaagagaagatctcttattcaacccatggttgttcccactacaccagaatctcaaaacaacttaccttctgtaagtcattctgagggatcctatggaatcccattagagtctaccactgtactttctagtgagcaagcgatggccagcggacttcgtcgttctagaaatgggagttctcagtctgttaatagtatgatagcgaccaccataccaacaaatggggtcgatgtaagtgcgcttttacaatctctcgctacaaaagagttagaacttttagaatgcaaacaaaagattgaagatttgaaaaagcaaacccagcatgaagagcaaaactatactcgtagagcacgtgaattacatgaactcaaggagcaagtgagtaaacatttggatccctctttgaatacacctgttaaaaacagagctttttctccggtttaccagaatatacctttggaatctagaactgaaaatgctggtaacagcagccttcctagttctgtcagtaaaccaaagaacatgggtcatcaaagtactaatcagtctagatctgtgtctccgcaagatattcaagaaaggcgccaaagggacgactcttctgattcttccaaacagtctctttggagcaaaccattagctttgtttaatcagtttgataaaatcattcagcatgaaattgaaagaactttgaattgggatgactctctttctggtacgcctgaggtacaggaagggacaccgactagtaatagcgagtcttccgcgcaacagtacgataatgaagcacctggagctcgccaaaaatctccttctcaaggatctgtctccaggagtctttggagctttgttagcgatgtcaaggccggattactcggtatagaagaagaaaacgataatgatgttattactgataacagatgtgatcctgtatataaaagcgatagacagcatgaacagaaaaaaagtacacataaaattacgaacagagggcaagcagaagatagtggcgacgattctagtttaaacatgaggaaatttaaaacgacaactaagttccagaaagacaatgctgggaataatagtctcacagatgaaagtggacatagaacaagagaaaaaaaaagtaaaagaagtagtaacaagttgagttttattggagaacccgataatgataattcctccgtcaaaaactctgttgaaatgacagacttctga

SEQ ID NO: 5161 - DNA, 852 bp, Saccharomyces cerevisiae
atgaatagtaaccgatgccaaacgaatgaggtgaataaatttattagtagtacagaaaaggggccttttacgggcagggacaatacgctctcttttaacaaaatcgggagcagactgaattcaccaccgattctgaaggataaaattgagctgaaatttctacaacactcagaagatttgaatcaatcacggtcctacgtaaatattcgtcctagaaccttagaggatcaaagttacaaatttgaagcgccaaatctaaatgacaatgaaacttcttgggccaaggattttagatataacttccctaagaatgttgaaccgcccatcgaaaatcaaatcgcgaatcttaatataaacaacgggctacggacatctcagacagattttcccttaggcttttattcacagaaaaactttaacattgcttccttccctgtggttgaccatcagatattcaagacaacaggtttagaacatcctatcaacagccacattgattctttaattaatgctgaattttcggaactggaagccagtagtttggaagaagatgtccatacagaagaggaaaattcaggtacgagtctggaagatgaagaaactgccatgaaaggtttggcttccgatataattgagttttgcgataataatagtgccaataaagatgtaaaagaaagactaaacagttcaaagtttatggggctgatgggcagcattagtgatggttctatagttttaaagaaggataacggtacagaaagaaaccttcaaaaacacgtaggtttttgttttcagaattcaggaaactgggctggtcttgagttccatgatgttgaagacagaattgcttaa

SEQ ID NO: 5162 - DNA, 852 bp, Artificial Sequence
  Description of Artificial Sequence: Synthetic polynucleotide
atgaatagtaacagatgccaaacgaatgaggtgaataaatttattagtagtacagaaaaggggccttttacgggcagggacaatacgctctcttttaacaaaatcgggagcagattgaattctccaccgattttgaaggataaaattgagttgaaatttttgcaacacagtgaagatttgaatcaaagtagatcctacgtaaatattcgtcctagaaccttagaggatcaaagttacaaatttgaagcgccaaatttgaatgacaatgaaacttcttgggccaaggattttagatataacttccctaagaatgttgaaccgcccatcgaaaatcaaatcgcgaatcttaatataaacaacgggcttagaacatctcagacagattttcccttaggcttttattctcagaaaaactttaacattgcttccttccctgtggttgaccatcagatattcaagacaacaggtttagaacatcctatcaacagccacattgattctttaattaatgctgaattttctgaattggaagccagtagtttggaagaagatgtccatacagaagaggaaaattctggtacgagtttagaagatgaagaaactgccatgaaaggtttggcttccgatataattgagttttgcgataataatagtgccaataaagatgtaaaagaaagattgaacagttccaagtttatggggttgatgggcagcattagtgatggttctatagttttaaagaaggataacggtacagaaagaaaccttcaaaaacacgtaggtttttgttttcagaattctggaaactgggctggtcttgagttccatgatgttgaagacagaattgcttga

SEQ ID NO: 5163 - DNA, 1914 bp, Saccharomyces cerevisiae
atgacaacatatttcaagttggtaaaaggtgctaccaagatcaagtcagccccgcccaaacagaagtatctggatccgatactgttggggaccagcaatgaagaggatttctatgagatcgtgaagggtttggattcccgaattaatgacacggcgtggactattgtgtataaatcgctgttggtggttcatttgatgataagggagggttccaaagatgttgcattgcggtactactctaggaacctggagttttttgacattgaaaacatacgtggctccaatggcagtgcgtctggagacatgagggcacttgatagatacgataattatctgaaggtgagatgcagggagtttggtaaaatcaaaaaggactatgtgagagacggctatcgaacactgaagctgaacagtggcaattacggaagctccagaaacaagcaacactctatcaatatagcactagatcatgtggagtccctagaggtacaaatacaagccctgattaaaaacaagtatacacaatatgatttgagtaacgaattgatcatatttggtttcaagctgcttattcaagacctgctagcgctatataatgctctcaacgaaggtatcataactctgctggagtcttttttcgaactatctcatcataatgcagagagaactctagacctgtacaagacgtttgttgatttgaccgagcacgttgtcaggtacttgaagagcgggaagactgcgggcttgaaaatacccgtcatcaagcatatcactaccaaactggtcagatcgctagaagaacatctgatagaggatgataagacgcacaacacttttgtgcccgttgacagttctcaaggaagtgctggggccgtagtagccaaatctactgcacaggaaaggttggagcaaatccgggaacaaaaaaggatactagaggcacaattgaaaaacgaacaagtagcgatttcccctgctctaactactgtcacggcggctcaatcttacaacccgtttggaacagactcttctatgcatactaacattccaatggctgtggctaatcaaacgcaacagatcgcaaataacccatttgtatctcaaactcagccacaggtgatgaatacaccaaccgctcatacagagcccgcaaatttaaacgttcctgaatatgcagcggtccaacacacagtgaacttcaaccctgtacaagatgctggcgtaagtgcccaacaaacggggtactattcgattaacaaccatttaacacccacatttacaggtgcagggtttggaggatactccgtttcacaggatacaactgccgcttctaatcaacaagtctctcattcacaaactggttctaacaacccgttcgcattgcacaacgccgcgacgatcgcaacagggaatcctgcacacgaaaatgtcttaaataacccattttcacgaccaaactttgatgaacaaaataccaatatgccgctacaacaacagataataagtaacccttttcaaaaccaaacgtacaatcaacaacaatttcaacaacaaaaaatgcctttgagctcgatcaatagcgttatgacaacccctactagcatgcagggatcgatgaatattcctcagcgttttgataaaatggaatttcaggctcactacactcagaatcatctccaacaacagcaacaacagcaacagcaacaacagcaacagcaacaacagcaaccacaacagggttattatgtgcctgcaactgcaggagccaaccctgttacaaatataactgggacagttcaacctcaaaatttccctttctatccacaacagcaaccacaaccggaacagtctcaaacacagcaaccagttttaggaaaccaatatgctaacaacctcaatttaattgatatgtaa

SEQ ID NO: 5164 - DNA, 1914 bp, Artificial Sequence
  Description of Artificial Sequence: Synthetic polynucleotide
atgacaacatatttcaagttggtaaaaggtgctaccaagatcaagtctgccccgcccaaacagaagtatttggatccgatattattggggaccagcaatgaagaggatttctatgagatcgtgaagggtttggattccagaattaatgacacggcgtggactattgtgtataaatctttgttggtggttcatttgatgataagggagggttccaaagatgttgcattgagatactactctaggaacttggagttttttgacattgaaaacatacgtggctccaatggcagtgcgtctggagacatgagggcacttgatagatacgataattatttgaaggtgagatgcagggagtttggtaaaatcaaaaaggactatgtgagagacggctatagaacattgaagttgaacagtggcaattacggaagctccagaaacaagcaacactctatcaatatagcattggatcatgtggagtccttggaggtacaaatacaagccttaattaaaaacaagtatacacaatatgatttgagtaacgaattgatcatatttggtttcaagcttcttattcaagacttattggcgttatataatgctctcaacgaaggtatcataactttattggagtcttttttcgaattatctcatcataatgcagagagaactttggacttgtacaagacgtttgttgatttgaccgagcacgttgtcaggtacttgaagagcgggaagactgcgggcttgaaaatacccgtcatcaagcatatcactaccaaattggtcagatccttagaagaacatttgatagaggatgataagacgcacaacacttttgtgcccgttgacagttctcaaggaagtgctggggccgtagtagccaaatctactgcacaggaaaggttggagcaaatcagagaacaaaaaaggatattggaggcacaattgaaaaacgaacaagtagcgatttcccctgctttgactactgtcacggcggctcaatcttacaacccgtttggaacagactcttctatgcatactaacattccaatggctgtggctaatcaaacgcaacagatcgcaaataacccatttgtatctcaaactcagccacaggtgatgaatacaccaaccgctcatacagagcccgcaaatttaaacgttcctgaatatgcagcggtccaacacacagtgaacttcaaccctgtacaagatgctggcgtaagtgcccaacaaacggggtactattctattaacaaccatttaacacccacatttacaggtgcagggtttggaggatactccgtttctcaggatacaactgccgcttctaatcaacaagtctctcattctcaaactggttctaacaacccgttcgcattgcacaacgccgcgacgatcgcaacagggaatcctgcacacgaaaatgtcttaaataacccattttctagaccaaactttgatgaacaaaataccaatatgccgttacaacaacagataataagtaacccttttcaaaaccaaacgtacaatcaacaacaatttcaacaacaaaaaatgcctttgagctctatcaatagcgttatgacaacccctactagcatgcagggatccatgaatattcctcagcgttttgataaaatggaatttcaggctcactacactcagaatcatctccaacaacagcaacaacagcaacagcaacaacagcaacagcaacaacagcaaccacaacagggttattatgtgcctgcaactgcaggagccaaccctgttacaaatataactgggacagttcaacctcaaaatttccctttctatccacaacagcaaccacaaccggaacagtctcaaacacagcaaccagttttaggaaaccaatatgctaacaacctcaatttaattgatatgtga

SEQ ID NO: 5165 - DNA, 390 bp, Saccharomyces cerevisiae
atgtctacatcatccgtacgttttgcatttaggcggttctggcaaagtgagacaggccccaagacggtgcatttctgggctcctactttgaaatggggtctggttttcgctggattcagcgatatgaagagaccggtggaaaaaatttctggtgctcaaaatttgtcgctgctatctactgcgctgatttggactcgttggtcctttgtcatcaagccaagaaacatcttgttggcttctgtcaactcgtttctttgtctgaccgctggctatcaattgggtagaattgccaactacaggatacggaatggcgactctatatcgcaattgtgtagctatattctcagcggcgccgacgaaagcaaaaaggaaattactacgggcagataa

SEQ ID NO: 5166 - DNA, 390 bp, Artificial Sequence
  Description of Artificial Sequence: Synthetic polynucleotide
atgtctacatcttccgtacgttttgcatttaggagattctggcaaagtgagacaggccccaagacggtgcatttctgggctcctactttgaaatggggtttagttttcgctggattcagcgatatgaagagaccggtggaaaaaatttctggtgctcaaaatttgtctttattatctactgcgttaatttggactcgttggtcctttgtcatcaagccaagaaacatcttgttggcttctgtcaactcttttctttgtttgaccgctggctatcaattgggtagaattgccaactacaggataagaaatggcgactctatatctcaattgtgtagctatattctcagcggcgccgacgaaagcaaaaaggaaattactacgggcagatga

SEQ ID NO: 5167 - DNA, 750 bp, Saccharomyces cerevisiae
atggtgacagtcggtgtgttttctgagagggctagtttgacccatcaattgggggaattcatcgtcaagaaacaagatgaggcgctgcaaaagaagtcagactttaaagtttccgttagcggtggctctttgatcgatgctctgtatgaaagtttagtagcggacgaatcactatcttctcgagtgcaatggtctaaatggcaaatctacttctctgatgaaagaattgtgccactgacggacgctgacagcaattatggtgccttcaagagagctgttctagataaattaccctcgactagtcagccaaacgtttatcccatggacgagtccttgattggcagcgatgctgaatctaacaacaaaattgctgcagagtacgagcgtatcgtacctcaagtgcttgatttggtactgttgggctgtggtcctgatggacacacttgttccttattccctggagaaacacataggtacttgctgaacgaaacaaccaaaagagttgcttggtgccacgattctcccaagcctccaagtgacagaatcaccttcactctgcctgtgttgaaagacgccaaagccctgtgttttgtggctgagggcagttccaaacaaaatataatgcatgagatctttgacttgaaaaacgatcaattgccaaccgcattggttaacaaattatttggtgaaaaaacatcctggttcgttaatgaggaagcttttggaaaagttcaaacgaaaactttttag

SEQ ID NO: 5168 - DNA, 750 bp, Artificial Sequence
  Description of Artificial Sequence: Synthetic polynucleotide
atggtgacagtcggtgtgttttctgagagggctagtttgacccatcaattgggggaattcatcgtcaagaaacaagatgaggcgttgcaaaagaagagtgactttaaagtttccgttagcggtggctctttgatcgatgctttgtatgaaagtttagtagcggacgaatctttatcttctcgtgtgcaatggtctaaatggcaaatctacttctctgatgaaagaattgtgccattaacggacgctgacagcaattatggtgccttcaagagagctgttttggataaattaccctccactagtcagccaaacgtttatcccatggacgagtccttgattggcagcgatgctgaatctaacaacaaaattgctgcagagtacgagcgtatcgtacctcaagtgcttgatttggtacttttgggctgtggtcctgatggacacacttgttccttattccctggagaaacacataggtacttgttgaacgaaacaaccaaaagagttgcttggtgccacgattctcccaagcctccaagtgacagaatcaccttcactttacctgtgttgaaagacgccaaagccctttgttttgtggctgagggcagttccaaacaaaatataatgcatgagatctttgacttgaaaaacgatcaattgccaaccgcattggttaacaaattatttggtgaaaaaacatcctggttcgttaatgaggaagcttttggaaaagttcaaacgaaaactttttga

SEQ ID NO: 5169 - DNA, 4569 bp, Saccharomyces cerevisiae
atgcccggaacgccacagaagaacaagaggtctgcgagtatatctgtttcacctgcgaagaagacagaggaaaaagaaataatacaaaatgattcaaaggcgatattatctaagcaaactaagaggaaaaaaaagtatgcttttgctcctataaataacttaaatgggaagaacaccaaggtatccaatgcaagtgtcctaaagtcaatagccgtttcacaagtacgaaatacatcaagaacaaaagatataaacaaagcagttagcaagagcgtaaagcaattaccaaattcacaagttaaaccgaaacgggaaatgtctaatttgagtaggcatcacgatttcactcaagacgaggacggccccatggaagaagtaatatggaaatattcacctttacaacgagatatgtccgacaaaacaacaagcgctgccgaatactctgatgactacgaagatgtccaaaatccctcttctacacctatagtccctaatcgactgaaaactgttcttagtttcacaaatatccaagtacccaacgctgacgtaaatcaactcattcaagaaaatggaaatgagcaagtgcgtcctaaaccagcagaaatatctaccagggagtctctccgtaatatagatgatattctcgatgatatagagggcgatttaactataaaaccgacgataacgaaattcagcgatttgccatcttcacccatcaaggcacccaacgttgaaaaaaaagcagaggtgaatgcagaagaagtagataaaatggattcaacaggagatagcaacgatggcgatgactctttgatagatattttaactcaaaagtatgttgagaaacgcaagagtgagagtcagataacaattcaaggcaacaccaatcaaaaaagtggagcccaggaaagttgtgggaagaatgataacacaaaatcgagaggagaaattgaagatcatgaaaatgtagacaatcaagccaaaacaggcaatgcattttatgagaatgaagaagacagtaattgccaaagaattaaaaaaaatgaaaaaatagaatacaattcttcagacgaattttcagacgattcactaattgaactattgaacgaaactcaaacacaagtggaacctaacactattgaacaagatttagacaaagtggagaaaatggtctctgacgatttgagaattgctactgattccactttatccgcatatgctctcagagctaagtctggtgctccaagagacggcgtagtacgattagtaatagtaagcttacgtagtgttgaattgccaaaaattggaacgcaaaaaatactagagtgtatagacggcaaaggcgaacaaagttctgttgtcgttcgacatccttgggtatatttggaatttgaggttggggatgtaatacatattatagaagggaaaaatattgaaaacaaacggcttctttctgacgacaaaaaccctaaaactcaactggctaacgacaacctgttggtgctaaaccctgatgtattattttcggcaacatcagtcggaagttcagtaggttgtttaagacgttcaattctgcaaatgcaatttcaagatccccgcggagaaccaagccttgtcatgactttaggcaatatcgtacacgagttattgcaagactcaatcaaatacaagctctcgcataataaaatttctatggaaatcataatacaaaagctggattctttgttagaaacttattctttttcaattatcatttgtaatgaagaaatccagtacgttaaagaattagttatgaaagaacatgctgaaaacattttgtacttcgtcaataaatttgtttcgaaaagtaactatggttgctacacatcaatttccggaacaagaagaacacagccaatttctatatccaatgtgattgatattgaagaaaacatttggtctccaatatatggtcttaaagggttcctagatgcaactgttgaagctaatgttgaaaacaataaaaaacacatcgttcctttagaagtgaaaactggaaaatccagaagcgtttcatacgaggttcaaggccttatttatacacttctgttaaatgatcgctatgagataccgatagagttttttcttctttattttacgagggataaaaatatgacaaagttcccttctgttctgcactccattaaacatattctcatgtcccgaaatagaatgagtatgaattttaagcatcaactccaagaggttttcggacaggctcaatcaaggtttgaattaccacccttactgcgcgattcatcttgtgattcatgtttcatcaaagaatcatgcatggtgttgaataagctactagaggacgggacaccagaagaaagtggcctggtagaaggtgagtttgaaattttgacaaaccatttgtcgcaaaatctcgccaactacaaagagttttttacaaaatataatgatctaataactaaggaggagtcaagtataacatgtgtaaataaagaacttttcttattggatggttccacaagagaatccagaagtggaaggtgcctttctggcttggttgtgtcagaggtggttgaacatgaaaaaacagagggagcgtatatatattgcttctcaagacgtagaaatgataataactcgcagtcgatgttatcatctcaaattgctgctaatgactttgttattattagtgatgaggagggtcatttttgcttgtgccaaggtcgtgtacaatttataaatcccgctaaaattggtatctccgtaaaacgaaagttattaaacaataggcttctagataaggaaaaaggagtcactaccatccaaagtgtggtcgaatcagagctagaacaatccagtctcatagctacccaaaatttggtcacatatagaatcgacaaaaatgatatccaacagagtttgtctttagcgcgatttaatcttttaagcttgtttttaccagctgtttcacctggcgtggatattgttgacgaaaggagtaaattatgtcggaagacaaagagatctgatggaggtaatgaaatactgcgatcacttttagttgataatagagcacctaagtttagagatgcaaatgatgatcccgtcattccgtataagctttcaaaggatacaacattgaacttgaatcaaaaagaagcaatagacaaagtaatgagggccgaagattatgcattgatattgggaatgccagggactggtaagactactgttatcgcagaaattattaaaattctcgtttccgaggggaaacgcgtgcttttgacatcatacacacattcagcagtggataatattttaataaaattgaggaacaccaacattagcataatgagattgggaatgaaacataaggtccatcctgacacgcaaaaatatgtcccgaattacgcgtcagtgaaaagttataacgattatttgtccaaaattaacagcacctctgttgttgctaccacctgcttaggaattaacgatatactatttacactaaatgaaaaggattttgattatgtgattttggacgaggcaagtcaaatttcaatgcctgtcgctttgggacctctgcggtatggaaataggtttattatggtaggagatcattaccagctaccgccattagttaaaaatgacgcagctcgattaggtgggttagaagagtcactgttcaagactttctgtgaaaagcatccggaaagcgttgcagaactgactttacagtaccgtatgtgcggcgatattgtaactttgtctaatttcctaatttatgataataaattaaaatgcgggaataacgaagtttttgctcaatctttagagttaccaatgcctgaggccttgtcgcgctataggaatgaatcggctaactctaagcagtggcttgaggatatactagagcctacaagaaaagtggtatttttaaattacgataactgcccggatattatcgaacaaagcgaaaaggataacattacgaatcacggggaggcagaattgactctacaatgtgtggaaggaatgttattgagcggcgtaccatgcgaagatattggtgtaatgacgttatacagagcacagttaagattactgaagaagatattcaacaaaaatgtgtatgacgggctagagatcttgactgctgatcagtttcaaggtcgtgacaaaaagtgcattattatttccatggttagaagaaattctcaattaaatggaggagcgctgctgaaagagctaagaagagtcaatgttgccatgacaagggccaaatccaagctgatcattataggttcaaaaagtacaatcggctctgttcctgaaataaaatcgttcgtgaacctgttagaagagcgtaattgggtctatacaatgtgcaaggatgcactctacaaatacaaatttcccgacagatcaaacgctattgatgaggcacgcaaaggttgtggaaaaagaacaggtgccaaacccatcacatcaaagtctaaattcgtaagcgataaacctatcataaaggaaattctacaagagtatgaaagttga

SEQ ID NO: 5170 - DNA, 4569 bp, Artificial Sequence
  Description of Artificial Sequence: Synthetic polynucleotide
atgcccggaacgccacagaagaacaagaggtctgcgagtatatctgtttctcctgcgaagaagacagaggaaaaagaaataatacaaaatgattctaaggcgatattatctaagcaaactaagaggaaaaaaaagtatgcttttgctcctataaataacttaaatgggaagaacaccaaggtatccaatgcaagtgtcttgaagagtatagccgtttctcaagtaagaaatacatctagaacaaaagatataaacaaagcagttagcaagagcgtaaagcaattaccaaattctcaagttaaaccgaaaagagaaatgtctaatttgagtaggcatcacgatttcactcaagacgaggacggccccatggaagaagtaatatggaaatattctcctttacaaagagatatgtccgacaaaacaacaagcgctgccgaatactctgatgactacgaagatgtccaaaatccctcttctacacctatagtccctaatagattgaaaactgttcttagtttcacaaatatccaagtacccaacgctgacgtaaatcaactcattcaagaaaatggaaatgagcaagtgcgtcctaaaccagcagaaatatctaccagggagtctctccgtaatatagatgatattctcgatgatatagagggcgatttaactataaaaccgacgataacgaaattcagcgatttgccatcttctcccatcaaggcacccaacgttgaaaaaaaagcagaggtgaatgcagaagaagtagataaaatggattctacaggagatagcaacgatggcgatgactctttgatagatattttaactcaaaagtatgttgagaaacgcaagagtgagagtcagataacaattcaaggcaacaccaatcaaaaaagtggagcccaggaaagttgtgggaagaatgataacacaaaatctagaggagaaattgaagatcatgaaaatgtagacaatcaagccaaaacaggcaatgcattttatgagaatgaagaagacagtaattgccaaagaattaaaaaaaatgaaaaaatagaatacaattcttctgacgaattttctgacgattctttgattgaattattgaacgaaactcaaacacaagtggaacctaacactattgaacaagatttagacaaagtggagaaaatggtctctgacgatttgagaattgctactgattccactttatccgcatatgctctcagagctaagtctggtgctccaagagacggcgtagtaaggttagtaatagtaagcttacgtagtgttgaattgccaaaaattggaacgcaaaaaatattggagtgtatagacggcaaaggcgaacaaagttctgttgtcgttcgccatccttgggtatatttggaatttgaggttggggatgtaatacatattatagaagggaaaaatattgaaaacaaaagacttctttctgacgacaaaaaccctaaaactcaattggctaacgacaaccttttggtgttgaaccctgatgtattattttctgcaacatctgtcggaagttctgtaggttgtttaagacgttctattttacaaatgcaatttcaagatccccgcggagaaccaagccttgtcatgactttaggcaatatcgtacacgagttattgcaagactctatcaaatacaagctctctcataataaaatttctatggaaatcataatacaaaagttggattctttgttagaaacttattctttttctattatcatttgtaatgaagaaatccagtacgttaaagaattagttatgaaagaacatgctgaaaacattttgtacttcgtcaataaatttgtttccaaaagtaactatggttgctacacatccatttccggaacaagaagaacacagccaatttctatatccaatgtgattgatattgaagaaaacatttggtctccaatatatggtcttaaagggttcttggatgcaactgttgaagctaatgttgaaaacaataaaaaacacatcgttcctttagaagtgaaaactggaaaatccagaagcgtttcttacgaggttcaaggccttatttatacacttttattaaatgatcgctatgagataccgatagagttttttcttctttattttacgagggataaaaatatgacaaagttcccttctgttttgcactccattaaacatattctcatgtccagaaatagaatgagtatgaattttaagcatcaactccaagaggttttcggacaggctcaatccaggtttgaattaccacccttacttcgcgattcttcttgtgattcttgtttcatcaaagaaagttgcatggtgttgaataagttattggaggacgggacaccagaagaaagtggcttagtagaaggtgagtttgaaattttgacaaaccatttgtctcaaaatctcgccaactacaaagagttttttacaaaatataatgatttgataactaaggaggagagcagtataacatgtgtaaataaagaacttttcttattggatggttccacaagagaatccagaagtggaaggtgcctttctggcttggttgtgtctgaggtggttgaacatgaaaaaacagagggagcgtatatatattgcttcagtagacgtagaaatgataataactctcagtccatgttatcttctcaaattgctgctaatgactttgttattattagtgatgaggagggtcatttttgcttgtgccaaggtcgtgtacaatttataaatcccgctaaaattggtatctccgtaaaaagaaagttattaaacaataggcttttagataaggaaaaaggagtcactaccatccaaagtgtggtcgaaagtgagttagaacaatccagtctcatagctacccaaaatttggtcacatatagaatcgacaaaaatgatatccaacagagtttgtctttagcgaggtttaatcttttaagcttgtttttaccagctgtttctcctggcgtggatattgttgacgaaaggagtaaattatgtagaaagacaaagagatctgatggaggtaatgaaatattaagatctcttttagttgataatagagcacctaagtttagagatgcaaatgatgatcccgtcattccgtataagctttccaaggatacaacattgaacttgaatcaaaaagaagcaatagacaaagtaatgagggccgaagattatgcattgatattgggaatgccagggactggtaagactactgttatcgcagaaattattaaaattctcgtttccgaggggaaacgcgtgcttttgacatcttacacacattctgcagtggataatattttaataaaattgaggaacaccaacattagcataatgagattgggaatgaaacataaggtccatcctgacacgcaaaaatatgtcccgaattacgcgtctgtgaaaagttataacgattatttgtccaaaattaacagcacctctgttgttgctaccacctgcttaggaattaacgatatattgtttacattaaatgaaaaggattttgattatgtgattttggacgaggcaagtcaaatttccatgcctgtcgctttgggacctttaagatatggaaataggtttattatggtaggagatcattaccagttaccgccattagttaaaaatgacgcagctagattaggtgggttagaagagtctttattcaagactttctgtgaaaagcatccggaaagcgttgcagaattgactttacagtaccgtatgtgcggcgatattgtaactttgtctaatttcttgatttatgataataaattaaaatgcgggaataacgaagtttttgctcaatctttagagttaccaatgcctgaggccttgtcccgctataggaatgaatctgctaactctaagcagtggcttgaggatatattggagcctacaagaaaagtggtatttttaaattacgataactgcccggatattatcgaacaaagcgaaaaggataacattacgaatcacggggaggcagaattgactttacaatgtgtggaaggaatgttattgagcggcgtaccatgcgaagatattggtgtaatgacgttatacagagcacagttaagattattgaagaagatattcaacaaaaatgtgtatgacgggttagagatcttgactgctgatcagtttcaaggtcgtgacaaaaagtgcattattatttccatggttagaagaaattctcaattaaatggaggagcgttattgaaagagttaagaagagtcaatgttgccatgacaagggccaaatccaagttaatcattataggttccaaaagtacaatcggctctgttcctgaaataaaatctttcgtgaacttattagaagagcgtaattgggtctatacaatgtgcaaggatgcactctacaaatacaaatttcccgacagatctaacgctattgatgaggcacgcaaaggttgtggaaaaagaacaggtgccaaacccatcacatccaagtctaaattcgtaagcgataaacctatcataaaggaaattttacaagagtatgaaagttga

SEQ ID NO: 5171 - DNA, 7242 bp, Saccharomyces cerevisiae
atgagtggactaccgcccccacctcctggttttgaagaggacagcgacttagcacttccaccaccaccaccaccaccgcctggatacgaaatcgaagaactggataatccgatggtgccatcatcggtaaatgaggatacattccttccgcctccaccacctcctccaagcaacttcgaaataaacgctgaagaaattgtggacttcacattaccaccgccaccaccccctccaggtctagatgaattagagactaaagcagaaaagaaagtagaattacatggaaagagaaaattggacataggaaaagatactttcgtcactcgaaaatcaagaaagcgtgcaaaaaaaatgaccaaaaaggcaaagagaagcaatttatatactcctaaagccgagatgccaccggaacatctgcgaaagattattaatactcacagtgacatggcctccaaaatgtacaatactgataaaaaggcttttctaggcgctctaaagtatttaccgcacgcgattttaaaattgttagagaacatgcctcatccatgggagcaagccaaagaagttaaagttttatatcacacttcaggagccataacatttgtgaatgaaacaccaagagtaatagagcctgtatatactgcccaatggtcagctacttggatagcaatgaggagagaaaaacgagatagaacacattttaaaagaatgagatttccacctttcgatgatgacgaaccacctctgtcatatgaacagcacatagaaaatatcgagccactggatcctataaatcttcccttagactctcaagatgatgaatatgttaaagattggctctacgattcccggcccttggaggaggatagtaaaaaggtcaatggtacatcttataaaaagtggagttttgatttacctgaaatgtcgaacttatataggttatcaacgccacttagagatgaagtaactgacaaaaattactattatcttttcgataaaaaatctttttttaacggtaaagcccttaataacgcaatccctggaggtcctaaatttgaacctttatacccaagagaagaggaggaagattataacgaattcaactctatagatagagtaatatttagggttcctattagaagcgaatataaggtagcgtttcctcatctatataattcccggccccgttcagtgcgcataccatggtataataatccagtgtcgtgtattatccagaacgatgaggagtacgacacgcctgcacttttttttgatccatcgctgaacccaatacctcactttattgataataattcatccctcaacgtatcaaatacaaaggaaaacggtgatttcactttacctgaagattttgcacctcttttggctgaagaagaagaacttattttgccaaatacaaaagatgcgatgtcgttatatcattcaccttttccatttaatagaactaaaggaaaaatggtgagagcacaagatgttgccctggctaaaaaatggtttttgcaacatcctgacgaggagtatcccgttaaagttaaggtctcttaccaaaagctcttgaagaactacgtgctaaatgaattgcaccctactttgccaacaaaccacaacaaaactaagttattgaagagtttaaaaaataccaagtattttcaacaaactacaattgattgggtagaggcaggactccagctatgtcgacaaggacacaatatgttaaatttattaatccacagaaagggcctaacttatttacatctcgactacaatttcaatttaaaaccaactaaaaccttaaccacaaaagaacgtaaaaagtcaagacttggaaactcatttcatttgatgcgtgaattgctaaaaatgatgaaactgattgtagatacacatgtgcagtttaggttaggaaatgtagatgccttccagttagcagatggtatacattatattttgaaccacataggacaattgaccggtatttatcgttataaatataaagtaatgcatcaaatccgcgcatgtaaagatctgaaacatatcatatattataagtttaataaaaatttgggaaaaggacctggttgtggattttggcaacctgcgtggagagtgtggctaaatttcttaagaggcactataccactactcgaaagatatattggaaaccttatcacacgtcaatttgaaggccgttctaatgaaattgtcaaaactacaactaaacaaagacttgacgcctactacgatcttgagttacgaaactcggtcatggatgacattttagaaatgatgcctgagagtattcgacagaaaaaggcaagaactatactgcaacatttaagtgaggcttggagatgttggaaggctaatattccatgggatgttcctggtatgccagccccaatcaaaaaaataattgaacggtatataaaatccaaagctgatgcctgggtatctgcagctcattacaatcgagaacgtataaagcgtggagctcacgtcgaaaagactatggttaaaaaaaatctggggcgtttaacgagactttggatcaaaaatgagcaggaacgtcaaaggcaaatacagaaaaacggtcccgaaattactcccgaagaggctacgaccatattttctgttatggttgagtggcttgaatcaaggagcttttcaccaataccatttccacctttaacttacaaaaatgatactaagatattagttcttgccctcgaagacctaaaagatgtctacgcatcaaaagtacgtttaaatgcatctgaaagggaagaacttgcgttgatagaggaggcttatgataatcctcacgatactttgaacagaatcaaaaagtacttgttgacccagcgagtttttaagcctgttgatataaccatgatggaaaactatcaaaacatttcccctgtttattcagttgatcccttggaaaagattaccgatgcatatcttgatcagtatttatggtacgaagctgaccaacgaaagcttttcccaaactggattaaaccaagtgattcagagataccacctcttctggtatacaagtggactcagggtataaacaacctatctgaaatttgggatgtatccagaggccaatctgcagttttgcttgagactactttgggtgaaatggccgaaaaaattgactttactttacttaatagattacttcgcctgattgtagatcctaatattgctgactatatcactgcaaaaaataatgttgttatcaactttaaagatatgagtcacgtcaacaaatatggcttaatacgcgggttgaagttcgcttctttcatattccaatattacggactagttatagatcttttactattgggtcaggaaagggctacagatttggctggtccagctaacaatccaaatgaatttatgcaattcaagagcaaagaagtagaaaaggcacatccgatcagactttacaccagatatttagatcgtatatatatgctttttcactttgaagaagatgagggagaggaattgactgatgaatacttggcagagaatccagatccaaactttgaaaacagcatcggatacaataatagaaaatgctggcccaaagattcgcgcatgaggctaatacgtcaggacgttaacctagggcgagcagtgttttgggaaattcaaagtagggtgccaacttcgttaacgtcaattaaatgggaaaatgcttttgtttccgtatacagtaaaaacaatccgaacttactcttctctatgtgtggttttgaagtcagaatattaccaagacaaagaatggaagaggtggtttctaacgatgaaggtgtttgggatttagttgacgaaagaaccaagcaaagaactgcaaaagcatatttaaaggtatctgaagaagaaatcaaaaaatttgacagcagaataagaggcatattgatggcctccggttcaaccacttttactaaagtggccgctaaatggaacacttcactgatatcccttttcacatactttagagaagccattgttgccacggagccgttattagatatcctggtgaaaggagaaacaagaattcaaaaccgtgtcaaacttggtttaaattcgaaaatgccaacaagatttccacctgctgttttttatacaccaaaagaacttggtgggttgggtatgattagtgcttctcatattttaattcctgcatctgacttaagttggtcaaaacagaccgatactggaattacgcattttcgtgctggtatgacgcacgaggatgaaaaattaatcccaactatcttccgttacatcactacttgggaaaatgaatttttagactctcaaagggtgtgggccgagtatgcaacgaaaaggcaggaagctattcagcagaataggaggttagcttttgaagaacttgaaggatcgtgggatcgtggtatacctcgtattagcactttatttcaaagagatcgacatactctagcgtatgacagaggtcacagaatccgtagggaatttaaacagtactctctagagagaaacagccccttttggtggacaaactcccaccatgacggtaaattatggaatttaaatgcctatagaactgatgtgattcaagccctaggaggtattgaaacaattttggaacacactttatttaaggggactggttttaattcatgggaaggtttgttttgggaaaaggcgtccgggtttgaggattccatgcaatttaagaagctaactcatgctcaaagaactggtttaagccaaattccaaatcgtagatttaccttatggtggtcaccaactattaacagagcaaatgtctatgtcggtttcttggtgcaattggatctgactggtatcttcctccatggtaaaattcctacgttaaaaatatctttaattcaaatattccgtgctcatttgtggcaaaaaatacatgaaagtatagtttttgatatttgtcaaattctcgatggtgagctagatgttttgcaaattgaatctgtgactaaagaaacagtgcatccccgcaaatcgtacaagatgaattcatctgccgctgacataactatggaaagtgttcatgaatgggaagtttcaaaaccctccctattacatgaaacaaatgactcatttaagggattgattaccaacaaaatgtggtttgatgtacaattgagatacggtgattatgattctcatgatatatctcgttatgtgagggcaaaattcctcgattatacaacagataatgtcagcatgtatccctccccaacaggtgttatgatcggtatcgatttggcttataacatgtatgatgcctatggtaattggttcaacggattaaaacctttgatacaaaatagtatgagaacaattatgaaagctaacccagcattatatgtccttcgtgaacgtattagaaaaggtcttcaaatatatcaatctagtgtacaggaaccatttttaaactcctcaaactatgccgagttattcaataacgacattaaactcttcgttgacgacactaatgtgtatagagttactgtccacaagacttttgaagggaacgttgctacaaaagcaattaatggttgcattttcactttaaatccaaagactgggcatctgtttctgaaaattatccatacctctgtatgggccggtcaaaaacgtttaagccaattggccaaatggaaaacagctgaggaagttagtgctcttgtgagatctttgcccaaagaagagcagccaaaacaaattatcgtcacaagaaaggcaatgcttgatcctttagaggttcacatgcttgactttcctaacatagcaatcaggccaacagagctgcgactaccattttcagctgcaatgtcaatagataaactttctgatgttgtgatgaaagctactgaacctcagatggttctgtttaacatttatgatgattggttagaccgtatttcatcgtacactgcattttctagacttacactacttttaagagctttaaagacgaacgaggaaagtgccaaaatgattctactcagtgaccccacgatcactatcaaatcgtaccatttatggccttcattcactgatgaacaatggatcactatcgaatctcaaatgagagatttgattttgactgagtacggcagaaaatacaatgtcaatatatctgccttaactcaaacggaaattaaagatattatattgggtcaaaatatcaaggcaccatctgtgaagagacaaaaaatggctgaattagaagctgccaggtcagaaaagcagaacgacgaagaagctgcaggtgcatcaactgttatgaaaactaaaactatcaatgcgcaaggtgaggagatagttgtagtagcttccgctgattacgaaagtcaaacgtttagttcaaagaatgaatggagaaaatctgcaattgctaatacactattatatttgaggttaaaaaacatttatgtttcggctgatgatttcgtggaggaacagaatgtttacgtccttccaaaaaatttattaaagaagtttattgagatatccgatgtgaaaatccaggtggcggcctttatttatggtatgtcagcaaaagatcatccgaaggtgaaagaaatcaagactgttgtgctggtacctcaattaggccacgtaggatccgttcagataagcaacatccctgacatcggagaccttccggatactgaaggccttgaactactcggttggatccatacccagacagaagaacttaaattcatggctgcgtctgaagtagcaactcattctaaactttttgcggataagaaaagagactgcattgatatttcaattttttccaccccgggatcagtatcattaagcgcttataacctgaccgacgaaggttaccaatggggtgaagaaaataaggatataatgaacgtgctatcggaagggtttgagcctactttcagcacgcatgcccaattacttctctctgaccgtatcacaggtaattttataattccatctggaaacgtttggaactacacatttatgggaacagcatttaaccaagaaggtgactacaattttaaatacggcattcctttggaattctataatgagatgcatcgtccagtacactttttacagtttagcgaattggcgggggacgaagagttagaggccgaacaaatcgatgtatttagctga

SEQ ID NO: 5172 - DNA, 7242 bp, Artificial Sequence
  Description of Artificial Sequence: Synthetic polynucleotide
atgagtggattaccgcccccacctcctggttttgaagaggacagcgacttagcacttccaccaccaccaccaccaccgcctggatacgaaatcgaagaattagataatccgatggtgccatcttctgtaaatgaggatacattccttccgcctccaccacctcctccaagcaacttcgaaataaacgctgaagaaattgtggacttcacattaccaccgccaccaccccctccaggtttggatgaattagagactaaagcagaaaagaaagtagaattacatggaaagagaaaattggacataggaaaagatactttcgtcactagaaaatctagaaagcgtgcaaaaaaaatgaccaaaaaggcaaagagaagcaatttatatactcctaaagccgagatgccaccggaacatttgagaaagattattaatactcacagtgacatggcctccaaaatgtacaatactgataaaaaggcttttttgggcgctttgaagtatttaccgcacgcgattttaaaattgttagagaacatgcctcatccatgggagcaagccaaagaagttaaagttttatatcacacttctggagccataacatttgtgaatgaaacaccaagagtaatagagcctgtatatactgcccaatggagtgctacttggatagcaatgaggagagaaaaaagagatagaacacattttaaaagaatgagatttccacctttcgatgatgacgaaccacctttatcttatgaacagcacatagaaaatatcgagccattagatcctataaatcttcccttagactctcaagatgatgaatatgttaaagattggctctacgattcccgtcccttggaggaggatagtaaaaaggtcaatggtacatcttataaaaagtggagttttgatttacctgaaatgtccaacttatataggttatctacgccacttagagatgaagtaactgacaaaaattactattatcttttcgataaaaaatctttttttaacggtaaagcccttaataacgcaatccctggaggtcctaaatttgaacctttatacccaagagaagaggaggaagattataacgaattcaactctatagatagagtaatatttagggttcctattagaagcgaatataaggtagcgtttcctcatttatataattcccgtccccgttctgtgcgcataccatggtataataatccagtgagctgtattatccagaacgatgaggagtacgacacgcctgcacttttttttgatccatctttgaacccaatacctcactttattgataataattcttccctcaacgtatctaatacaaaggaaaacggtgatttcactttacctgaagattttgcacctcttttggctgaagaagaagaacttattttgccaaatacaaaagatgcgatgtctttatatcattctccttttccatttaatagaactaaaggaaaaatggtgagagcacaagatgttgccttagctaaaaaatggtttttgcaacatcctgacgaggagtatcccgttaaagttaaggtctcttaccaaaagctcttgaagaactacgtgttgaatgaattgcaccctactttgccaacaaaccacaacaaaactaagttattgaagagtttaaaaaataccaagtattttcaacaaactacaattgattgggtagaggcaggactccagttgtgtagacaaggacacaatatgttaaatttattaatccacagaaagggcttaacttatttacatctcgactacaatttcaatttaaaaccaactaaaaccttaaccacaaaagaacgtaaaaagtctagacttggaaactcttttcatttgatgcgtgaattgttgaaaatgatgaaattgattgtagatacacatgtgcagtttaggttaggaaatgtagatgccttccagttagcagatggtatacattatattttgaaccacataggacaattgaccggtatttatcgttataaatataaagtaatgcatcaaatccgcgcatgtaaagatttgaaacatatcatatattataagtttaataaaaatttgggaaaaggacctggttgtggattttggcaacctgcgtggagagtgtggttaaatttcttaagaggcactataccattgctcgaaagatatattggaaaccttatcacacgtcaatttgaaggccgttctaatgaaattgtcaaaactacaactaaacaaagacttgacgcctactacgatcttgagttaagaaactctgtcatggatgacattttagaaatgatgcctgagagtattagacagaaaaaggcaagaactatattgcaacatttaagtgaggcttggagatgttggaaggctaatattccatgggatgttcctggtatgccagccccaatcaaaaaaataattgaaagatatataaaatccaaagctgatgcctgggtatctgcagctcattacaatagagaacgtataaagcgtggagctcacgtcgaaaagactatggttaaaaaaaatttggggcgtttaacgagactttggatcaaaaatgagcaggaacgtcaaaggcaaatacagaaaaacggtcccgaaattactcccgaagaggctacgaccatattttctgttatggttgagtggcttgaaagtaggagcttttctccaataccatttccacctttaacttacaaaaatgatactaagatattagttcttgccctcgaagacttgaaagatgtctacgcatccaaagtacgtttaaatgcatctgaaagggaagaacttgcgttgatagaggaggcttatgataatcctcacgatactttgaacagaatcaaaaagtacttgttgacccagagagtttttaagcctgttgatataaccatgatggaaaactatcaaaacatttcccctgtttattctgttgatcccttggaaaagattaccgatgcatatcttgatcagtatttatggtacgaagctgaccaaagaaagcttttcccaaactggattaaaccaagtgattctgagataccacctcttttggtatacaagtggactcagggtataaacaacttatctgaaatttgggatgtatccagaggccaatctgcagttttgcttgagactactttgggtgaaatggccgaaaaaattgactttactttacttaatagattacttcgcttaattgtagatcctaatattgctgactatatcactgcaaaaaataatgttgttatcaactttaaagatatgagtcacgtcaacaaatatggcttaatacgcgggttgaagttcgcttctttcatattccaatattacggattggttatagatcttttattattgggtcaggaaagggctacagatttggctggtccagctaacaatccaaatgaatttatgcaattcaagagcaaagaagtagaaaaggcacatccgatcagactttacaccagatatttagatcgtatatatatgctttttcactttgaagaagatgagggagaggaattgactgatgaatacttggcagagaatccagatccaaactttgaaaacagcatcggatacaataatagaaaatgctggcccaaagattctcgcatgaggttgatacgtcaggacgttaacttggggcgcgcagtgttttgggaaattcaaagtagggtgccaacttctttaacgtccattaaatgggaaaatgcttttgtttccgtatacagtaaaaacaatccgaacttactcttctctatgtgtggttttgaagtcagaatattaccaagacaaagaatggaagaggtggtttctaacgatgaaggtgtttgggatttagttgacgaaagaaccaagcaaagaactgcaaaagcatatttaaaggtatctgaagaagaaatcaaaaaatttgacagcagaataagaggcatattgatggcctccggttctaccacttttactaaagtggccgctaaatggaacacttctttgatatcccttttcacatactttagagaagccattgttgccacggagccgttattagatatcttagtgaaaggagaaacaagaattcaaaaccgtgtcaaacttggtttaaattctaaaatgccaacaagatttccacctgctgttttttatacaccaaaagaacttggtgggttgggtatgattagtgcttctcatattttaattcctgcatctgacttaagttggtccaaacagaccgatactggaattacgcattttcgtgctggtatgacgcacgaggatgaaaaattaatcccaactatcttccgttacatcactacttgggaaaatgaatttttagactctcaaagggtgtgggccgagtatgcaacgaaaaggcaggaagctattcagcagaataggaggttagcttttgaagaacttgaaggatcttgggatcgtggtatacctcgtattagcactttatttcaaagagatagacatactttggcgtatgacagaggtcacagaatccgtagggaatttaaacagtactctttggagagaaacagccccttttggtggacaaactcccaccatgacggtaaattatggaatttaaatgcctatagaactgatgtgattcaagccttaggaggtattgaaacaattttggaacacactttatttaaggggactggttttaattcttgggaaggtttgttttgggaaaaggcgtccgggtttgaggattccatgcaatttaagaagttgactcatgctcaaagaactggtttaagccaaattccaaatcgtagatttaccttatggtggtctccaactattaacagagcaaatgtctatgtcggtttcttggtgcaattggatttgactggtatcttcctccatggtaaaattcctacgttaaaaatatctttaattcaaatattccgtgctcatttgtggcaaaaaatacatgaaagtatagtttttgatatttgtcaaattctcgatggtgagttagatgttttgcaaattgaatctgtgactaaagaaacagtgcatccccgcaaatcttacaagatgaattcttctgccgctgacataactatggaaagtgttcatgaatgggaagtttccaaaccctccttattacatgaaacaaatgactcttttaagggattgattaccaacaaaatgtggtttgatgtacaattgagatacggtgattatgattctcatgatatatctcgttatgtgagggcaaaattcctcgattatacaacagataatgtcagcatgtatccctccccaacaggtgttatgatcggtatcgatttggcttataacatgtatgatgcctatggtaattggttcaacggattaaaacctttgatacaaaatagtatgagaacaattatgaaagctaacccagcattatatgtccttcgtgaacgtattagaaaaggtcttcaaatatatcaatctagtgtacaggaaccatttttaaactccagtaactatgccgagttattcaataacgacattaaactcttcgttgacgacactaatgtgtatagagttactgtccacaagacttttgaagggaacgttgctacaaaagcaattaatggttgcattttcactttaaatccaaagactgggcatttatttttgaaaattatccatacctctgtatgggccggtcaaaaacgtttaagccaattggccaaatggaaaacagctgaggaagttagtgctcttgtgagatctttgcccaaagaagagcagccaaaacaaattatcgtcacaagaaaggcaatgcttgatcctttagaggttcacatgcttgactttcctaacatagcaatcaggccaacagagttaaggttaccattttctgctgcaatgagtatagataaactttctgatgttgtgatgaaagctactgaacctcagatggttttatttaacatttatgatgattggttagaccgtatttcttcctacactgcattttctagacttacattgcttttaagagctttaaagacgaacgaggaaagtgccaaaatgattttactcagtgaccccacgatcactatcaaatcttaccatttatggccttctttcactgatgaacaatggatcactatcgaatctcaaatgagagatttgattttgactgagtacggcagaaaatacaatgtcaatatatctgccttaactcaaacggaaattaaagatattatattgggtcaaaatatcaaggcaccatctgtgaagagacaaaaaatggctgaattagaagctgccaggtctgaaaagcagaacgacgaagaagctgcaggtgcatctactgttatgaaaactaaaactatcaatgcgcaaggtgaggagatagttgtagtagcttccgctgattacgaaagtcaaacgtttagttccaagaatgaatggagaaaatctgcaattgctaatacattattatatttgaggttaaaaaacatttatgtttctgctgatgatttcgtggaggaacagaatgtttacgtccttccaaaaaatttattaaagaagtttattgagatatccgatgtgaaaatccaggtggcggcctttatttatggtatgtctgcaaaagatcatccgaaggtgaaagaaatcaagactgttgtgttagtacctcaattaggccacgtaggatccgttcagataagcaacatccctgacatcggagaccttccggatactgaaggccttgaattactcggttggatccatacccagacagaagaacttaaattcatggctgcgtctgaagtagcaactcattctaaactttttgcggataagaaaagagactgcattgatatttccattttttccaccccgggaagtgtatctttaagcgcttataacttgaccgacgaaggttaccaatggggtgaagaaaataaggatataatgaacgtgttatctgaagggtttgagcctactttcagcacgcatgcccaattacttctctctgaccgtatcacaggtaattttataattccatctggaaacgtttggaactacacatttatgggaacagcatttaaccaagaaggtgactacaattttaaatacggcattcctttggaattctataatgagatgcatcgtccagtacactttttacagtttagcgaattggcgggggacgaagagttagaggccgaacaaatcgatgtatttagctga

SEQ ID NO: 5173 - DNA, 1881 bp, Saccharomyces cerevisiae
atgaatgacgacagccaggataaaataatacatgatatacgtattcagctacgaaaggctgccacagaattatcacgatggaagctatacggctcctcaaagtgggcagcagaggcgctagcaggtcttgcagaagctattgatgttgatcaaacacactctttagccgatgaatcgccactaagaaataaacaaggtgtaccgaaacagatgtttgaaataccacaaaacgggtttggcctatcagagactgagtatgacctgtacctccttggttctacgttgtttgatgctaaagagtttgatcgatgcgttttttttctaaaagatgtcactaatccataccttaagttcttaaaattatacagtaaatttctatcgtgggataagaaaagccaggaaagtatggaaaatatcttaactacagggaagtttacggacgaaatgtacagagctaacaaagatggggatggtagtgggaatgaggatataaatcaaagtgggcaccaacgcgccaatttaaaaatggtcagcaatgagcatgagtcacaatcgaacatatcatctattttgaaggaaattaacacatttctggagtcttatgaaataaagatagacgatgatgaggccgatttagggttagcactgttgtattatttacgaggggtcatcttaaagcaagagaagaatatttctaaggcaatgtcgtcattcttgaaatctctgagttgctactcctttaactggtcctgctggctggagttaatggactgtttacaaaaggttgacgatgcattgcttttaaataattatctatatcaaaatttccaattcaaattttctgaaaatcttggtagtcaacgaacgatagaatttaatataatgatcaaatttttcaagctaaaagtgtttgaggagcttaatggccagttagaggactactttgaagatttagagtttttgttacaagttttccccaatttcacttttttaaaggcttacaatgctactattagttacaacaatttggattatgttaccgcagaaagccgatttgatgacatcgttaaacaagatccgtaccgtctcaacgatttggaaacctactccaatattctatacgtcatgcagaagaattcaaaattagcctatttggcgcaattcgtctcccaaatagatagatttagaccggaaacatgttgtatcatagcgaactattacagtgcccgacaggaacatgaaaaatctatcatgtatttccgtcgagcactaactttggataaaaaaacaacaaacgcatggactttgatgggtcacgaatttgttgaactaagcaattcacatgccgcaatagaatgctatcgtcgggccgtagatatatgccctcgagacttcaaagcatggtttggtttgggccaggcttatgctctcctggacatgcatttatattctctttactacttccagaaagcttgcactttgaaaccttgggatcgtcggatttggcaagtattgggagaatgttatagtaagacgggaaataaggtagaagctataaaatgctacaaaagatccataaaagcttcacaaacggtcgatcaaaatacttcaatatattaccggttagcgcaactatatgaagaacttgaagacttgcaagaatgtaagaagttcatgatgaaatgtgtagatgtggaagaacttctggaaggtatagtaacagatgaaaccgtgaaggctaggctttggctggcaatatttgagattaaggcaggaaactaccaattggcttatgattatgccatgggggtatctagtggaacgtctcaagagattgaagaggctcgtatgctggctcgggagtgcagaaggcatatgtag

SEQ ID NO: 5174 - DNA, 1881 bp, Artificial Sequence
  Description of Artificial Sequence: Synthetic polynucleotide
atgaatgacgacagccaggataaaataatacatgatatacgtattcagttaagaaaggctgccacagaattaagtagatggaagttgtacggctcctccaagtgggcagcagaggcgttggcaggtcttgcagaagctattgatgttgatcaaacacactctttagccgatgaatctccattgagaaataaacaaggtgtaccgaaacagatgtttgaaataccacaaaacgggtttggcttatctgagactgagtatgacttgtacctccttggttctacgttgtttgatgctaaagagtttgatcgttgcgttttttttttgaaagatgtcactaatccataccttaagttcttaaaattatacagtaaatttttatcttgggataagaaaagccaggaaagtatggaaaatatcttaactacagggaagtttacggacgaaatgtacagagctaacaaagatggggatggtagtgggaatgaggatataaatcaaagtgggcaccaacgcgccaatttaaaaatggtcagcaatgagcatgagtctcaaagtaacatatcttctattttgaaggaaattaacacatttttggagtcttatgaaataaagatagacgatgatgaggccgatttagggttagcattattgtattatttaagaggggtcatcttaaagcaagagaagaatatttctaaggcaatgtcttctttcttgaaatctttgagttgctactcctttaactggtcctgctggttggagttaatggactgtttacaaaaggttgacgatgcattgcttttaaataattatttgtatcaaaatttccaattcaaattttctgaaaatcttggtagtcaaagaacgatagaatttaatataatgatcaaatttttcaagttgaaagtgtttgaggagcttaatggccagttagaggactactttgaagatttagagtttttgttacaagttttccccaatttcacttttttaaaggcttacaatgctactattagttacaacaatttggattatgttaccgcagaaagcagatttgatgacatcgttaaacaagatccgtaccgtctcaacgatttggaaacctactccaatattttatacgtcatgcagaagaattctaaattagcctatttggcgcaattcgtctcccaaatagatagatttagaccggaaacatgttgtatcatagcgaactattacagtgccagacaggaacatgaaaaatctatcatgtatttccgtagagcattgactttggataaaaaaacaacaaacgcatggactttgatgggtcacgaatttgttgaattgagcaattctcatgccgcaatagaatgctatcgtcgtgccgtagatatatgccctagagacttcaaagcatggtttggtttgggccaggcttatgctctcttggacatgcatttatattctctttactacttccagaaagcttgcactttgaaaccttgggatcgtagaatttggcaagtattgggagaatgttatagtaagacgggaaataaggtagaagctataaaatgctacaaaagatccataaaagcttctcaaacggtcgatcaaaatacttccatatattacagattagcgcaattatatgaagaacttgaagacttgcaagaatgtaagaagttcatgatgaaatgtgtagatgtggaagaacttttagaaggtatagtaacagatgaaaccgtgaaggctaggctttggttggcaatatttgagattaaggcaggaaactaccaattggcttatgattatgccatgggggtatctagtggaacgtctcaagagattgaagaggctcgtatgttggctagagagtgcagaaggcatatgtga

SEQ ID NO: 5175 - DNA, 786 bp, Saccharomyces cerevisiae
atgacaaaggaagaaggtcgtacgtattttgaatctctctgcgaggaggaacaaagtttgcaggaaagccaaacccacttattaaatattttagatatattatcagtattggcagaccctagatcatctgatgatctgcttactgaatccctcaagaagttgcctgatttacacagggagctgataaatagttccatccgcctgcgatacgataaatatcaaacaagagaagcacagcttttggaggatacaaaaactggaagggacgttgcagcgggagtacagaatcctaagagtattagcgagtactattctactttcgaacatttgaatagggatactttaaggtacataaatttactgaagcgactttctgttgatttagcaaagcaggtggaagtgtctgatccatcagtgacagtgtatgaaatggataaatgggttccatctgagaaacttcagggtattctcgagcagtactgtgcgcctgatactgatatacgtggtgtagacgctcaaatcaagaactatctagatcagatcaaaatggcacgtgccaaatttggtttagagaataagtattccttaaaggaaagactctctactttgacaaaggaactaaaccattggcgaaaagaatgggacgatatagaaatgcttatgttcggtgatgatgcacattctatgaaaaaaatgatccagaagatagattcattaaagtctgaaataaatgctccatcggaaagctatcctgtagataaagaaggtgacatagttttagaataa

SEQ ID NO: 5176 - DNA, 786 bp, Artificial Sequence
  Description of Artificial Sequence: Synthetic polynucleotide
atgacaaaggaagaaggtcgtacgtattttgaatctctctgcgaggaggaacaaagtttgcaggaaagccaaacccacttattaaatattttagatatattaagtgtattggcagaccctagatcttctgatgatttacttactgaatccctcaagaagttgcctgatttacacagggagttgataaatagttccatccgcctcaggtacgataaatatcaaacaagagaagcacagcttttggaggatacaaaaactggaagggacgttgcagcgggagtacagaatcctaagagtattagcgagtactattctactttcgaacatttgaatagggatactttaaggtacataaatttattgaagagactttctgttgatttagcaaagcaggtggaagtgtctgatccatctgtgacagtgtatgaaatggataaatgggttccatctgagaaacttcagggtattctcgagcagtactgtgcgcctgatactgatatacgtggtgtagacgctcaaatcaagaactatttggatcagatcaaaatggcacgtgccaaatttggtttagagaataagtattccttaaaggaaagactctctactttgacaaaggaattgaaccattggagaaaagaatgggacgatatagaaatgcttatgttcggtgatgatgcacattctatgaaaaaaatgatccagaagatagattctttaaagtctgaaataaatgctccatctgaaagctatcctgtagataaagaaggtgacatagttttagaatga

SEQ ID NO: 5177 - DNA, 1557 bp, Saccharomyces cerevisiae
atgtcgatagcttggtctagcgttttcaaaagagaattacggcttgaaagatttttaccaagagtatattcgacgaaagttcctgataatgcaccaagagcggctgacaatgaacaatggctagaaaccctaagacctataactcacccagaacagaaaaagtccgaccatgatgtcagttacacaagacacattaatgttcctctgggcgaagtcacttctgtcaactatctacaacggtataataagcataagcatagccagggcaatttcgtggatgttcgaatagtgaaatgcaaaagtggcgctggtggaagtggagctgtctccttctttagggatgcagggaggtctataggtcctccggatggtggagatgggggagctggtggtagtgtttatattcaagctgttgcggggttgggatctctggcgaagatgaagaccacatataccgctgaagacggagaagcaggtgctgccaggcaactggatggcatgcgaggaagagatgttttaatacaagttcctgtgggtactgttgtaaaatggtgcttaccaccccaaaaagttcgagagctcgtggaaagagaaatgcgcaaagacaataatgctacattaaggtctatacttggctcaacagccgtcaacttaagcgtttcttctggttctcatcggaaaaaaatacaactatacagacatgaaatggcggagagttggctcttcaaggacaaggccaaggaataccatgagaataaggactggttcaaagatttacataagaaaatggaggcatacgaccactcgttagaacaatctgaactgtttaatgatcagtttccactggctggtcttgacttaaatcagccaatgacgaaaccagtatgtctgctgaaaggtggccaaggtggactcggtaacatgcactttttaacaaatttgattagaaatccaagattttccaaacccggcaggaatgggttggaacagcattttttattcgaattgaaaagcattgctgatcttggactcattggtttgcctaacgctggaaaatcaactatactaaacaaaatctcaaatgcaaaaccgaaaatagggcactggcaattcaccacactgagccctacgattggcacagtttccttgggttttgggcaagacgtcttcactgtggccgatatacctggaataatacagggagcatcattagacaaagggatgggtcttgagtttctaaggcatatagaacgttccaatggttgggtatttgtccttgacctctctaataaaaaccctttgaatgacttacaattactgatagaggaagttggtactttagagaaagtcaagaccaaaaacatactaattgtatgtaataaagtcgatattgatgccgagaaatccgaatcatttgccaagtacctacaggttgagaaattttccaaaagtcaggaatgggactgtgttccgataagcgccctcagagaggaaaacatagatgtgttaaagaaaaagatgtttaagtgtgctcgtcagtctgaatttgacaagtag

SEQ ID NO: 5178 - DNA, 1557 bp, Artificial Sequence
  Description of Artificial Sequence: Synthetic polynucleotide
atgagtatagcttggtctagcgttttcaaaagagaattaagacttgaaagatttttaccaagagtatattctacgaaagttcctgataatgcaccaagagcggctgacaatgaacaatggttagaaaccttgagacctataactcacccagaacagaaaaagtccgaccatgatgtcagttacacaagacacattaatgttcctttgggcgaagtcacttctgtcaactatttacaaagatataataagcataagcatagccagggcaatttcgtggatgttagaatagtgaaatgcaaaagtggcgctggtggaagtggagctgtctccttctttagggatgcagggaggtctataggtcctccggatggtggagatgggggagctggtggtagtgtttatattcaagctgttgcggggttgggatctttagcgaagatgaagaccacatataccgctgaagacggagaagcaggtgctgccaggcaattggatggcatgagaggaagagatgttttaatacaagttcctgtgggtactgttgtaaaatggtgcttaccaccccaaaaagttagagagctcgtggaaagagaaatgcgcaaagacaataatgctacattaaggtctatacttggctctacagccgtcaacttaagcgtttcttctggttctcatagaaaaaaaatacaattgtacagacatgaaatggcggagagttggctcttcaaggacaaggccaaggaataccatgagaataaggactggttcaaagatttacataagaaaatggaggcatacgaccactctttagaacaatctgaattatttaatgatcagtttccattggctggtcttgacttaaatcagccaatgacgaaaccagtatgtcttttgaaaggtggccaaggtggactcggtaacatgcactttttaacaaatttgattagaaatccaagattttccaaacccggcaggaatgggttggaacagcattttttattcgaattgaaaagcattgctgatcttggactcattggtttgcctaacgctggaaaatctactatattaaacaaaatctctaatgcaaaaccgaaaatagggcactggcaattcaccacattgagccctacgattggcacagtttccttgggttttgggcaagacgtcttcactgtggccgatatacctggaataatacagggagcatctttagacaaagggatgggtcttgagtttttaaggcatatagaacgttccaatggttgggtatttgtccttgacctctctaataaaaaccctttgaatgacttacaattattgatagaggaagttggtactttagagaaagtcaagaccaaaaacatattgattgtatgtaataaagtcgatattgatgccgagaaatccgaaagttttgccaagtacttacaggttgagaaattttccaaaagtcaggaatgggactgtgttccgataagcgccctcagagaggaaaacatagatgtgttaaagaaaaagatgtttaagtgtgctcgtcagtctgaatttgacaagtga

SEQ ID NO: 5179 - DNA, 1296 bp, Saccharomyces cerevisiae
atggcagactttaaatctttaggtctttcaaaatggcttacggaatccttaagagctatgaaaattactcagccaaccgctatccaaaaggcttgtattcccaaaatcttagaaggaagagattgtattggtggtgccaagactggttctggtaaaactattgcatttgcagggcctatgctgactaaatggtccgaagatccgtcagggatgtttggagtggtcttgaccccaaccagagagttagccatgcaaattgccgaacaatttactgcacttggtagcagtatgaacattcgcgtgtcagttatagttggtggtgaaagcatcgttcagcaggcattggatttacaaaggaagccgcactttattattgccacgcctggacgtctggcacatcatatcatgagcagcggagatgataccgttggagggctaatgagagctaaatatttagttctagatgaagccgatattttgctaactagcacgtttgccgatcatttagcaacatgtataagtgctctacctcccaaggataagagacaaacacttctattcactgcaactataacggaccaagtaaagtcgttacaaaatgcaccagtgcagaaagggaaacccccattgttcgcttaccaagtagaaagtgtagataatgtggctattccatcgacgttgaaaatagagtatatcttggttccagaacacgtcaaagaagcatatttgtaccaattattaacatgcgaggaatatgagaataaaaccgctataatatttgtaaatagaacaatgaccgcggagatccttagaagaaccctgaagcagttggaagtgagggtagcgtcgttgcactctcaaatgccccaacaggaaagaacaaattccttacatagatttcgagctaacgctgcaagaatcctcatcgctacagatgtagcatccagaggtttggatatcccaactgttgagcttgtagtgaattacgatataccttcagacccagatgtattcatccatagatctggtcgtacggcccgtgctggcagaattggtgacgccatatcattcgttacccagcgagatgtttctaggatacaggccattgaggaccgtatcaacaagaagatgacagagacaaacaaggtacacgataccgctgtaataagaaaagccttgaccaaggtaaccaaggcgaagagggaatcgctgatggcaatgcaaaaggaaaacttcggtgagagaaaaagacagcaaaagaagaagcaaaatgacgggaaaagtttgcgctcttga

SEQ ID NO: 5180 - DNA, 1296 bp, Artificial Sequence
  Description of Artificial Sequence: Synthetic polynucleotide
atggcagactttaaatctttaggtctttctaaatggcttacggaatccttaagagctatgaaaattactcagccaaccgctatccaaaaggcttgtattcccaaaatcttagaaggaagagattgtattggtggtgccaagactggttctggtaaaactattgcatttgcagggcctatgttgactaaatggtccgaagatccgagtgggatgtttggagtggtcttgaccccaaccagagagttagccatgcaaattgccgaacaatttactgcacttggtagcagtatgaacattcgcgtgtctgttatagttggtggtgaaagcatcgttcagcaggcattggatttacaaaggaagccgcactttattattgccacgcctggacgtttagcacatcatatcatgagcagcggagatgataccgttggagggttgatgagagctaaatatttagttttggatgaagccgatattttgttgactagcacgtttgccgatcatttagcaacatgtataagtgctttacctcccaaggataagagacaaacacttttattcactgcaactataacggaccaagtaaagtctttacaaaatgcaccagtgcagaaagggaaacccccattgttcgcttaccaagtagaaagtgtagataatgtggctattccatctacgttgaaaatagagtatatcttggttccagaacacgtcaaagaagcatatttgtaccaattattaacatgcgaggaatatgagaataaaaccgctataatatttgtaaatagaacaatgaccgcggagatccttagaagaaccttgaagcagttggaagtgagggtagcgtctttgcactctcaaatgccccaacaggaaagaacaaattccttacatagatttagagctaacgctgcaagaatcctcatcgctacagatgtagcatccagaggtttggatatcccaactgttgagcttgtagtgaattacgatataccttctgacccagatgtattcatccatagatctggtcgtacggcccgtgctggcagaattggtgacgccatatctttcgttacccagagagatgtttctaggatacaggccattgaggaccgtatcaacaagaagatgacagagacaaacaaggtacacgataccgctgtaataagaaaagccttgaccaaggtaaccaaggcgaagagggaatctttgatggcaatgcaaaaggaaaacttcggtgagagaaaaagacagcaaaagaagaagcaaaatgacgggaaaagtttgcgctcttga

SEQ ID NO: 5181 - DNA, 1557 bp, Saccharomyces cerevisiae
atggaattcacacctatagatccgcaccagcaccaaaatgctgctactcttctatgttgtaactgtggtaccccaatcgatgggtccactgggctggttatgtgttatgactgtatcaaactgactgtggacattactcaaggtattccaagagaagcgaacatttcattttgcagaaactgtgaaagatttttgcaaccacctggacaatggatcagagcagaattagaatctagagaattactggccatttgtttgcgtcgtttgaagggcctaacaaaagtcagattagtggatgcttcattcatttggacagaaccccattctagacgtattagaattaaacttaccgtgcagggagaagccatgacaaatactattattcagcaaactttcgaagtagaatacattgttattgcgatgcaatgtccagactgtgccagatcctacactacaaatacttggagggctactgtccaaattagacaaaaagtgcctcacaagagaacatttttgtttttggaacaactgattttgaaacataatgctcatgtggataccatttccattagtgaagctaaggacgggttggatttcttctatgcgcaaaaaaaccacgcagttaagatgattgattttttgaacgctgttgttccgattaaacataaaaagtctgaagaacttatttctcaagatacacatactggtgcatctacttataaattttcatattctgtcgagattgttcctatctgtaaagatgacttggtcgttttaccaaaaaaactggctaaatctatgggtaacatttctcaatttgttctatgttctaagatttctaacactgtccagtttatggatccgactactttgcaaaccgcggatctgtcaccatctgtgtactggagggctccattcaacgccctggctgatgtgacccagttggtggagttcattgttctggacgtggattctacaggtataagcaggggaaatcgtgtcttagctgacattactgttgctagaacgtctgacttgggtgttaatgaccaagtctactacgtcaggtctcatctcggtggtatttgccatgcaggtgatagtgttatgggttatttcattgcaaactcgaattacaactcagatctttttgatgggttaaatatcgattatgtgcctgatgtagttcttgtgaagaaattgtatcaaagaaagagcaaaaagagcagacactggaagttaaagagaatggctaaggaacacaaagatatcgatgcatccttagattacaattcaagagctcaaaagcaagaaatggaacgtgcagaaaaggactacgaattattcttacaagaattagaagaggatgctgaattaagacaaagtgttaacctatacaaaaaccgcgaagcaaatgtacctcctgaagagcatgaaatggatgaagacgaggatgaagacgctccacaaatcaacattgatgaattattggacgagttagatgaaatgacattagaagatggagtcgagaacacacccgttgaatctcagcagtaa

SEQ ID NO: 5182 - DNA, 1557 bp, Artificial Sequence
  Description of Artificial Sequence: Synthetic polynucleotide
atggaattcacacctatagatccgcaccagcaccaaaatgctgctactcttttatgttgtaactgtggtaccccaatcgatgggtccactgggttggttatgtgttatgactgtatcaaattaactgtggacattactcaaggtattccaagagaagcgaacatttccttttgcagaaactgtgaaagatttttgcaaccacctggacaatggatcagagcagaattagaatctagagaattattagccatttgtttgcgtcgtttgaagggcttaacaaaagtcagattagtggatgcttctttcatttggacagaaccccattctagacgtattagaattaaacttaccgtgcagggagaagccatgacaaatactattattcagcaaactttcgaagtagaatacattgttattgcgatgcaatgtccagactgtgccagatcctacactacaaatacttggagggctactgtccaaattagacaaaaagtgcctcacaagagaacatttttgtttttggaacaattgattttgaaacataatgctcatgtggataccatttccattagtgaagctaaggacgggttggatttcttctatgcgcaaaaaaaccacgcagttaagatgattgattttttgaacgctgttgttccgattaaacataaaaagtctgaagaacttatttctcaagatacacatactggtgcatctacttataaattttcttattctgtcgagattgttcctatctgtaaagatgacttggtcgttttaccaaaaaaattggctaaatctatgggtaacatttctcaatttgttttatgttctaagatttctaacactgtccagtttatggatccgactactttgcaaaccgcggatttatctccatctgtgtactggagggctccattcaacgccttagctgatgtgacccagttggtggagttcattgttttggacgtggattctacaggtataagcaggggaaatcgtgtcttagctgacattactgttgctagaacgtctgacttgggtgttaatgaccaagtctactacgtcaggtctcatctcggtggtatttgccatgcaggtgatagtgttatgggttatttcattgcaaacagtaattacaacagtgatctttttgatgggttaaatatcgattatgtgcctgatgtagttcttgtgaagaaattgtatcaaagaaagagcaaaaagagcagacactggaagttaaagagaatggctaaggaacacaaagatatcgatgcatccttagattacaattctagagctcaaaagcaagaaatggaacgtgcagaaaaggactacgaattattcttacaagaattagaagaggatgctgaattaagacaaagtgttaacctttacaaaaaccgcgaagcaaatgtacctcctgaagagcatgaaatggatgaagacgaggatgaagacgctccacaaatcaacattgatgaattattggacgagttagatgaaatgacattagaagatggagtcgagaacacacccgttgaatctcagcagtga

SEQ ID NO: 5183 - DNA, 1893 bp, Saccharomyces cerevisiae
atgtcgtcagaaagggtcttaagttatgcaccagcttttaaatcatttctggatacatcttttttccaagaattatcgagattgaaactcgatgttctgaaattagattcaacatgccaaccacttactgtgaatctagatttacacaacattcctaaatctgctgatcaagttccattattcttaacaaatagaagctttgaaaaacacaataataagcgtactaatgaagtgcctttacagggcagtattttcaattttaatgtattagacgagtttaagaatcttgataagcaactatttttacatcaaagagcattggaatgctgggaagatggaataaaggatatcaataagtgtgtttcttttgtgattattagttttgctgacctaaaaaagtacaggttttattactggttaggtgttccctgttttcaaagaccctcttcaacagttttacatgtgcggccagagccgagtttaaaagggctgttctcaaagtgtcaaaaatggtttgatgtcaattactcaaaatgggtgtgtatactggatgcagacgatgaaatagtaaattatgacaagtgtattattcgaaaaactaaagttttggcgataagggacactagtacgatggaaaacgtcccttctgctctaaccaaaaattttctcagcgtgttgcaatacgatgttcctgacttgatagatttcaaactattaattattagacagaacgaaggtagctttgcattaaatgctacatttgcttctattgacccacaatcatcctcaagtaacccagatatgaaagtttctggatgggaaaggaatgtgcaaggtaagctagcaccacgtgttgttgatttaagttcattgttagatcctttaaaaattgctgaccaatccgtggatttaaatttgaagctaatgaaatggagaattcttcctgacttaaatctagatatcatcaaaaacacaaaagtactactactaggtgctggtacactaggttgttatgtttcacgcgcattgatagcatggggggttagaaaaataacatttgtggataacggtacagtttcatattcaaatccagtgaggcaagcgttatataattttgaggactgtggaaagccaaaggcagaacttgcggctgcgtctttgaaaagaatatttcctttaatggacgctactggtgtgaaattaagtattcctatgatcggtcataaattagtaaacgaggaggctcagcataaggattttgatagattaagagcattaataaaagagcatgatatcatttttttattggtggattctcgagaaagcagatggcttccgtcgttattgagcaacatcgaaaacaaaaccgttattaatgctgctctggggtttgatagctacttagttatgaggcatggtaatagagatgaacagtcttcaaaacaactgggctgttatttttgccatgatgtggtagcaccaactgacagtttaactgacaggactttggatcaaatgtgcacagtaactagacccggcgttgctatgatggcctcttctttagcagttgaattgatgacttccttactacagaccaaatactctggttcagaaacaacagtattaggggatatacctcatcaaatacgtgggtttttgcataatttttccatcttaaaattagaaactccagcctatgagcattgtccagcatgtagccctaaagttatcgaagcatttacagacttaggttgggaatttgttaaaaaggccttggagcatccactttaccttgaagaaattagcggtttgtcagtcataaagcaggaggtcgaacgactaggcaacgatgtttttgaatgggaagatgatgaatctgatgagattgcttaa

SEQ ID NO: 5184 - DNA, 1893 bp, Artificial Sequence
  Description of Artificial Sequence: Synthetic polynucleotide
atgtcttctgaaagggtcttaagttatgcaccagcttttaaaagttttttggatacatcttttttccaagaattatctagattgaaactcgatgttttgaaattagattctacatgccaaccacttactgtgaatttggatttacacaacattcctaaatctgctgatcaagttccattattcttaacaaatagaagctttgaaaaacacaataataagcgtactaatgaagtgcctttacagggcagtattttcaattttaatgtattagacgagtttaagaatcttgataagcaattatttttacatcaaagagcattggaatgctgggaagatggaataaaggatatcaataagtgtgtttcttttgtgattattagttttgctgacttgaaaaagtacaggttttattactggttaggtgttccctgttttcaaagaccctcttctacagttttacatgtgagaccagagccgagtttaaaagggcttttctccaagtgtcaaaaatggtttgatgtcaattactctaaatgggtgtgtatattggatgcagacgatgaaatagtaaattatgacaagtgtattattagaaaaactaaagttttggcgataagggacactagtacgatggaaaacgtcccttctgctttgaccaaaaattttctcagcgtgttgcaatacgatgttcctgacttgatagatttcaaattattaattattagacagaacgaaggtagctttgcattaaatgctacatttgcttctattgacccacaatcttcctccagtaacccagatatgaaagtttctggatgggaaaggaatgtgcaaggtaagttagcaccacgtgttgttgatttaagttctttgttagatcctttaaaaattgctgaccaatccgtggatttaaatttgaagttgatgaaatggagaattcttcctgacttaaatttggatatcatcaaaaacacaaaagtattattattgggtgctggtacattaggttgttatgtttctcgcgcattgatagcatggggggttagaaaaataacatttgtggataacggtacagtttcttattctaatccagtgaggcaagcgttatataattttgaggactgtggaaagccaaaggcagaacttgcggctgcgtctttgaaaagaatatttcctttaatggacgctactggtgtgaaattaagtattcctatgatcggtcataaattagtaaacgaggaggctcagcataaggattttgatagattaagagcattaataaaagagcatgatatcatttttttattggtggattctagagaaagcagatggcttccgtctttattgagcaacatcgaaaacaaaaccgttattaatgctgctttagggtttgatagctacttagttatgaggcatggtaatagagatgaacagtcttctaaacaattaggctgttatttttgccatgatgtggtagcaccaactgacagtttaactgacaggactttggatcaaatgtgcacagtaactagacccggcgttgctatgatggcctcttctttagcagttgaattgatgacttccttattgcagaccaaatactctggttctgaaacaacagtattaggggatatacctcatcaaatacgtgggtttttgcataatttttccatcttaaaattagaaactccagcctatgagcattgtccagcatgtagccctaaagttatcgaagcatttacagacttaggttgggaatttgttaaaaaggccttggagcatccactttaccttgaagaaattagcggtttgtctgtcataaagcaggaggtcgaaagattgggcaacgatgtttttgaatgggaagatgatgaatctgatgagattgcttga

SEQ ID NO: 5185 - DNA, 2472 bp, Saccharomyces cerevisiae
atggaaatcaaagaggtagatgacagggcagagctactgagatataccaacaatattccgttacttggaaagctagtcaaccatcaaccattatggagtacaaatcctaagttaaagtccttttcgctagaaaaaatatcagcccctgatcaaaggcgtgtacaagaggcattagttgtaaaagacctattaaatgtattgattggacttgaaggaacatacatcagatattttaatgattatgaacctagtgacccagagacaccgatagaatttaagattgccaagaaaatggatccatcattcaaaacattcagtagaagaattgttaggtatggtaagcaatacatgatattaacaagggcgtatgaaaaatggtctgacacaagctttgggatggttttgcaaagatttgcttatgaaatcagaagattcttagaagacgtctacttaaaaacgttagttgaaaggcttgaaagggactttaacaaagtgccaaacttttctatcagagaactagaacaaatcattaatgaaacagaagtaaacaaacaaatggagttgctgtacaatatttatgaagaaatttttagagaaatagaagaaagaaggacgaaccaatcttcacaagaagatttcaataattttatggacagtatgaagaatgaaagcagcttgcacttacgattaatggtagcatttgacacaacagtatatccggtacccaaaggtggtgccatattgaaaatttttcagcaaaaaatactggaaaatttgggtgataggtcaagcgtaatgtttttgaagaagctattgaataatataagccaagactattgcacaatgctgtatgaatggctaacacagggtattttaaacgacccttaccaagaattcatgacttatgatgatttggaaggtaagacggataacatatttgacacaagagacagagcgtgggatacgcaatacttcataagaaaagatgttttgttgcgggattgtgactcagaagaggataagaatctactattcaagatgttaaggaccggtattttactcaaagttgttcgagctagcttacaaatacccaccataccttctaatagcagtgatataaccattcaagaaatcaatgatttcgctgacttaatggagggttctaatcttgaactttacgtggataaatgttacagcagagccaatgaaatatttttaaagctattttttcaaggttacgatttgatcaatgtattaaaacatttgcaacaaatttttcttgggtatcaatctggtcataatgttttaaagtttctaacaaaaaatatgggtgagttgaccaaacactacaggaatgataataatgcaaactatgacaagctgctacaaaattttgagttagagagacaatccgaaaatccaaacaacctgatgaggcaactcctgatgatacagttcgatacagaaacacttccacaagtcttatcgcactacctccaaatttatccagaagtacctgagaataactcagcaaatgacgacagcgacccattgatgcacgcgaataatttcaagaatatgaatgccattctttttgatgaattaagcaaagaacgaacgggagcctaccatggatccaatctagaactatatactccaaaaagcgcaatttatcatttaaaatttgacatcaacataccttatccattgaatattattattagtaggacatgcatgataaaataccaaataatcctgcgctaccaactagttttacaataccactcaaggcttttggatgagacttggatggacttaaacaaaacacccagctggaaatacagaggctattcgcacactgtgaagaggaggatagtaagggcaacgagagtgctgcatgctaagatgaaccacttcattaaaaccatcatggaatatttcaaccaaaacgtaattgataaagaggtatactcattagaaaagtgctacagaaatcctactcttgccgttgccatccaaaatgagctagaaggtggattaacaaatataatgacaaatcgttgcttgtctgacttgattccactacagttacaaatatttgacattgtatataagttttgcaagttcatcaaatctatgagagcaaaattatgtcaactggaccccgtactatatgagaaacacaaaagcgggatgatgaaaacactaaacgaaggctatcgtacaaacaatggcggtcaggaagatgttggttaccaagaagatgccgccctggaattaattcagaagctgattgaatacattagcaacgcgtccagcatttttcggaagtgtctcataaactttactcaagagttaagtactgaaaaattcgacttttatgatagttcaagtgtcgacgctgcgggtatagaaagggttctttactctatagtacctcctcgctcagcatctgcttcttcccaaagatga

SEQ ID NO: 5186 - DNA, 2472 bp, Artificial Sequence
  Description of Artificial Sequence: Synthetic polynucleotide
atggaaatcaaagaggtagatgacagggcagagttattaagatataccaacaatattccgttacttggaaagttggtcaaccatcaaccattatggagtacaaatcctaagttaaagtccttttctttggaaaaaatatctgcccctgatcaaaggcgtgtacaagaggcattagttgtaaaagacttattaaatgtattgattggacttgaaggaacatacatcagatattttaatgattatgaacctagtgacccagagacaccgatagaatttaagattgccaagaaaatggatccatctttcaaaacattcagtagaagaattgttaggtatggtaagcaatacatgatattaacaagggcgtatgaaaaatggtctgacacaagctttgggatggttttgcaaagatttgcttatgaaatcagaagattcttagaagacgtctacttaaaaacgttagttgaaaggcttgaaagggactttaacaaagtgccaaacttttctatcagagaattggaacaaatcattaatgaaacagaagtaaacaaacaaatggagttgttgtacaatatttatgaagaaatttttagagaaatagaagaaagaaggacgaaccaatcttctcaagaagatttcaataattttatggacagtatgaagaatgaaagcagcttgcacttaagattaatggtagcatttgacacaacagtatatccggtacccaaaggtggtgccatattgaaaatttttcagcaaaaaatattggaaaatttgggtgataggagcagcgtaatgtttttgaagaagttgttgaataatataagccaagactattgcacaatgctttatgaatggttgacacagggtattttaaacgacccttaccaagaattcatgacttatgatgatttggaaggtaagacggataacatatttgacacaagagacagagcgtgggatacgcaatacttcataagaaaagatgttttgttgagagattgtgactctgaagaggataagaatttattattcaagatgttaaggaccggtattttactcaaagttgttagagctagcttacaaatacccaccataccttctaatagcagtgatataaccattcaagaaatcaatgatttcgctgacttaatggagggttctaatcttgaactttacgtggataaatgttacagcagagccaatgaaatatttttaaagttattttttcaaggttacgatttgatcaatgtattaaaacatttgcaacaaatttttcttgggtatcaatctggtcataatgttttaaagtttttaacaaaaaatatgggtgagttgaccaaacactacaggaatgataataatgcaaactatgacaagttattacaaaattttgagttagagagacaatccgaaaatccaaacaacttgatgaggcaactcttaatgatacagttcgatacagaaacacttccacaagtcttatcccactacctccaaatttatccagaagtacctgagaataactctgcaaatgacgacagcgacccattgatgcacgcgaataatttcaagaatatgaatgccattctttttgatgaattaagcaaagaaagaacgggagcctaccatggatccaatttggaattgtatactccaaaaagcgcaatttatcatttaaaatttgacatcaacataccttatccattgaatattattattagtaggacatgcatgataaaataccaaataatcttacgctaccaattggttttacaataccactctaggcttttggatgagacttggatggacttaaacaaaacacccagctggaaatacagaggctattctcacactgtgaagaggaggatagtaagggcaacgagagtgttacatgctaagatgaaccacttcattaaaaccatcatggaatatttcaaccaaaacgtaattgataaagaggtatactctttagaaaagtgctacagaaatcctactcttgccgttgccatccaaaatgagttagaaggtggattaacaaatataatgacaaatcgttgcttgtctgacttgattccattacagttacaaatatttgacattgtatataagttttgcaagttcatcaaatctatgagagcaaaattatgtcaattggaccccgtattatatgagaaacacaaaagcgggatgatgaaaacattgaacgaaggctatcgtacaaacaatggcggtcaggaagatgttggttaccaagaagatgccgccttggaattaattcagaagttgattgaatacattagcaacgcgtccagcatttttagaaagtgtctcataaactttactcaagagttaagtactgaaaaattcgacttttatgatagtagtagtgtcgacgctgcgggtatagaaagggttctttactctatagtacctcctcgctctgcatctgcttcttcccaaagatga

SEQ ID NO: 5187 - DNA, 339 bp, Saccharomyces cerevisiae
atgctttttttttttatatatgcttggtgccacttgtcacatacaattctacaaccttcgacaaaaatccaaatgatagtaagatcaaagccagaaagcaatggagaaaaaaaattaatgaaccacgatgaaccaaatgatcaatacaaccaaagaaactaccctagtgaggtgtatgctgacttggtatcacacttcatgaattttgcatatggcaaagtccacgaaagtgggcttcagaaaaaaggcgtgcggtgtgtagatgtatcaattagtggatgccagttttggaacgggattccactttccgcaagttggtgcacgtcgttagtgacataa

SEQ ID NO: 5188 - DNA, 339 bp, Artificial Sequence
  Description of Artificial Sequence: Synthetic polynucleotide
atgctttttttttttatatatgcttggtgccacttgtctcatacaattttacaaccttctacaaaaatccaaatgatagtaagatccaagccagaaagcaatggagaaaaaaaattaatgaaccacgatgaaccaaatgatcaatacaaccaaagaaactaccctagtgaggtgtatgctgacttggtaagccacttcatgaattttgcatatggcaaagtccacgaaagtgggcttcagaaaaaaggcgtgaggtgtgtagatgtatctattagtggatgccagttttggaacgggattccactttccgcaagttggtgcacgtctttagtgacatga

SEQ ID NO: 5189 - DNA, 1314 bp, Saccharomyces cerevisiae
atggctgtctctaaagtttacgctagatccgtctacgactcccgtggtaacccaaccgtcgaagtcgaattaaccaccgaaaagggtgttttcagatccattgttccatctggtgcctccaccggtgtccacgaagctttggaaatgagagatgaagacaaatccaagtggatgggtaagggtgttatgaacgctgtcaacaacgtcaacaacgtcattgctgctgctttcgtcaaggccaacctagatgttaaggaccaaaaggccgtcgatgacttcttgttgtctttggatggtaccgccaacaagtccaagttgggtgctaacgctatcttgggtgtctccatggccgctgctagagccgctgctgctgaaaagaacgtcccattgtaccaacatttggctgacttgtctaagtccaagacctctccatacgttttgccagttccattcttgaacgttttgaacggtggttcccacgctggtggtgctttggctttgcaagaattcatgattgctccaactggtgctaagaccttcgctgaagccatgagaattggttccgaagtttaccacaacttgaagtctttgaccaagaagagatacggtgcttctgccggtaacgtcggtgacgaaggtggtgttgctccaaacattcaaaccgctgaagaagctttggacttgattgttgacgctatcaaggctgctggtcacgacggtaaggtcaagatcggtttggactgtgcttcctctgaattcttcaaggacggtaagtacgacttggacttcaagaacccagaatctgacaaatccaagtggttgactggtgtcgaattagctgacatgtaccactccttgatgaagagatacccaattgtctccatcgaagatccatttgctgaagatgactgggaagcttggtctcacttcttcaagaccgctggtatccaaattgttgctgatgacttgactgtcaccaacccagctagaattgctaccgccatcgaaaagaaggctgctgacgctttgttgttgaaggttaaccaaatcggtaccttgtctgaatccatcaaggctgctcaagactctttcgctgccaactggggtgttatggtttcccacagatctggtgaaactgaagacactttcattgctgacttggttgtcggtttgagaactggtcaaatcaagactggtgctccagctagatccgaaagattggctaagttgaaccaattgttgagaatcgaagaagaattgggtgacaaggctgtctacgccggtgaaaacttccaccacggtgacaagttgtaa

SEQ ID NO: 5190 - DNA, 1314 bp, Artificial Sequence
  Description of Artificial Sequence: Synthetic polynucleotide
atggctgtctctaaagtttacgctagatccgtctacgactcccgtggtaacccaaccgtcgaagtcgaattaaccaccgaaaagggtgttttcagatccattgttccatctggtgcctccaccggtgtccacgaagctttggaaatgagagatgaagacaaatccaagtggatgggtaagggtgttatgaacgctgtcaacaacgtcaacaacgtcattgctgctgctttcgtcaaggccaaccttgatgttaaggaccaaaaggccgtcgatgacttcttgttgtctttggatggtaccgccaacaagtccaagttgggtgctaacgctatcttgggtgtctccatggccgctgctagagccgctgctgctgaaaagaacgtcccattgtaccaacatttggctgacttgtctaagtccaagacctctccatacgttttgccagttccattcttgaacgttttgaacggtggttcccacgctggtggtgctttggctttgcaagaattcatgattgctccaactggtgctaagaccttcgctgaagccatgagaattggttccgaagtttaccacaacttgaagtctttgaccaagaagagatacggtgcttctgccggtaacgtcggtgacgaaggtggtgttgctccaaacattcaaaccgctgaagaagctttggacttgattgttgacgctatcaaggctgctggtcacgacggtaaggtcaagatcggtttggactgtgcttcctctgaattcttcaaggacggtaagtacgacttggacttcaagaacccagaatctgacaaatccaagtggttgactggtgtcgaattagctgacatgtaccactccttgatgaagagatacccaattgtctccatcgaagatccatttgctgaagatgactgggaagcttggtctcacttcttcaagaccgctggtatccaaattgttgctgatgacttgactgtcaccaacccagctagaattgctaccgccatcgaaaagaaggctgctgacgctttgttgttgaaggttaaccaaatcggtaccttgtctgaatccatcaaggctgctcaagactctttcgctgccaactggggtgttatggtttcccacagatctggtgaaactgaagacactttcattgctgacttggttgtcggtttgagaactggtcaaatcaagactggtgctccagctagatccgaaagattggctaagttgaaccaattgttgagaatcgaagaagaattgggtgacaaggctgtctacgccggtgaaaacttccaccacggtgacaagttgtga

SEQ ID NO: 5191 - DNA, 570 bp, Saccharomyces cerevisiae
atggatgataagaaaacatggagtacagtcactttgagaaccttcaatcagctggtaacgtcttcgttaattggatactcaaaaaagatggatagcatgaatcacaagatggaaggaaatgcgggccacgaccacagtgatatgcatatgggagatggagatgatacctgttcgatgaatatgctattttcgtggtcatacaagaatacgtgtgtcgtctttgaatggtggcatatcaagaccctgcctggactgattttaagttgtttagcaatttttggtctagcctacctctatgagtacttaaagtactgtgtccataagagacaattatcccagagagtattgttaccaaatagatctctgaccaagatcaaccaagccgacaaagtgtccaatagtattctatatggtttgcaagtgggattctcattcatgctcatgcttgtattcatgacttataatggttggttaatgttagctgtcgtgtgtggggcaatatggggtaattacagctggtgtacttcgtatagtcctgagatagatgacagctccctcgcctgccattaa

SEQ ID NO: 5192 - DNA, 570 bp, Artificial Sequence
  Description of Artificial Sequence: Synthetic polynucleotide
atggatgataagaaaacatggagtacagtcactttgagaaccttcaatcagttggtaacgtcttctttaattggatactctaaaaagatggatagcatgaatcacaagatggaaggaaatgcgggccacgaccacagtgatatgcatatgggagatggagatgatacctgttccatgaatatgttattttcttggagttacaagaatacgtgtgtcgtctttgaatggtggcatatcaagaccttacctggattgattttaagttgtttagcaatttttggtttagcctacctctatgagtacttaaagtactgtgtccataagagacaattatcccagagagtattgttaccaaatagatctttaaccaagatcaaccaagccgacaaagtgtccaatagtattctttatggtttgcaagtgggattcagtttcatgctcatgcttgtattcatgacttataatggttggttaatgttagctgtcgtgtgtggggcaatatggggtaattacagctggtgtacttcttatagtcctgagatagatgacagctccctcgcctgccattga

SEQ ID NO: 5193 - DNA, 150 bp, Saccharomyces cerevisiae
atgataaactacgttaacattacatgtataatatttagcactcgtacgttactagtctttgacacaagtttatatatccccccctttatgttatcgtttattggctacagcctcagtaatcaaaatagtccactatttctatatcattaa

SEQ ID NO: 5194 - DNA, 150 bp, Artificial Sequence
  Description of Artificial Sequence: Synthetic polynucleotide
atgataaactacgttaacattacatgtataatatttagcactcgtacgttattggtctttgacacaagtttatatatccccccctttatgttatcttttattggctacagcctcagtaatcaaaatagtccattatttttatatcattga

SEQ ID NO: 5195 - DNA, 1299 bp, Saccharomyces cerevisiae
atgacagtgaatgacaaaaaaagattggcaatcataggtggggggccaggagggttggcagctgcaagagttttctcgcaaagtcttccaaattttgaaatagaaatatttgtaaaggattacgatattggcggtgtctggcattatccagaacaaaaaagtgatgggagggtcatgtatgaccatttggaaaccaatatatcaaagaagttaatgcagtttagcggctttcccttcgaggaaaacgtccctttatatccgtctcgaagaaacatttgggaatacttgaaagcctattacaaaacgttcattgccaacaaagatgctatcagcatccatttcagcaccgaagttacctacttaaagaagaagaactctcaatgggagataacatctaaagacgaactaaggactactaaatcggattttgacttcgttattgttgcgtctggtcactacagtgtccctaaactaccaactaatatcgcaggtctcgatctatggttcgacaataagggcgcctttcattctaaggatttcaaaaactgcgagtttgcccgtgaaaaagtcgttattgtggtgggaaacggcagttccggccaagatattgccaaccaactaactaccgttgcaaagaaagtatataatagtataaaagagcctgcgagcaatcaactgaaggccaagttaatcgagactgtccaaacaatagacagtgccgattggaaaaatcgttcagttactttatctgatggaagagtacttcagaatatagactacattattttcgccacaggctattattacagctttccatttatagagccctccgttagactggaagtgctaggtgagggtgttactggcgacaagcactcgtctgtcaatctgcacaatttgtgggagcacatgatctatgtaaaagatcctacgctgtcctttatcttgaccccgcagttggtcatcccgttcccgttgtcggaactacaggcggctattatggtcgaagtattctgtaaaagcttaccgataactacaactttcgactctaatgcctgcggaacgcacaacttcccaaagggaaaggacctggaatactatgcagaactacaggaactactgaatagcattccacgtagggtcggtcatttcgaaccagttgtatgggatgatagactgatcgatctaagaaacagtagttatacagacaaagaagaaagaaatgtgcttctagcggaacacgcacaagccctaaagaaaaaaaaagcaccatacttccttccggcgccacatacttaa

SEQ ID NO: 5196 - DNA, 1299 bp, Artificial Sequence
  Description of Artificial Sequence: Synthetic polynucleotide
atgacagtgaatgacaaaaaaagattggcaatcataggtggggggccaggagggttggcagctgcaagagttttctctcaaagtcttccaaattttgaaatagaaatatttgtaaaggattacgatattggcggtgtctggcattatccagaacaaaaaagtgatgggagggtcatgtatgaccatttggaaaccaatatatccaagaagttaatgcagtttagcggctttcccttcgaggaaaacgtccctttatatccgtctagaagaaacatttgggaatacttgaaagcctattacaaaacgttcattgccaacaaagatgctatcagcatccatttcagcaccgaagttacctacttaaagaagaagaactctcaatgggagataacatctaaagacgaattgaggactactaaatctgattttgacttcgttattgttgcgtctggtcactacagtgtccctaaattaccaactaatatcgcaggtctcgatttatggttcgacaataagggcgcctttcattctaaggatttcaaaaactgcgagtttgcccgtgaaaaagtcgttattgtggtgggaaacggcagttccggccaagatattgccaaccaattgactaccgttgcaaagaaagtatataatagtataaaagagcctgcgagcaatcaattgaaggccaagttaatcgagactgtccaaacaatagacagtgccgattggaaaaatcgttctgttactttatctgatggaagagtacttcagaatatagactacattattttcgccacaggctattattacagctttccatttatagagccctccgttagattagaagtgttgggtgagggtgttactggcgacaagcactcttctgtcaatttacacaatttgtgggagcacatgatctatgtaaaagatcctacgttatcctttatcttgaccccgcagttggtcatcccgttcccgttgagtgaattacaggcggctattatggtcgaagtattctgtaaaagcttaccgataactacaactttcgactctaatgcctgcggaacgcacaacttcccaaagggaaaggacttggaatactatgcagaattacaggaattattgaatagcattccacgtagggtcggtcatttcgaaccagttgtatgggatgatagattgatcgatttgagaaacagtagttatacagacaaagaagaaagaaatgtgcttttggcggaacacgcacaagccttgaagaaaaaaaaagcaccatacttccttccggcgccacatacttga

SEQ ID NO: 5197 - DNA, 1362 bp, Saccharomyces cerevisiae
atgatggatatcagccctacctgttatgggtacatcgacgacgagcaagatctagcccttgttttccagggcgtattcaatggaaatttgagatgcatcgaacggaggccatatgatgcagaaaaggttgaattagtcaaccccggaaacatttttgttttcaacgaagagaaatccggcatcaaaagatggacagatggtttttcttggtctccttcaagaatttcaggcaaatttctcgtatatagagagtataataggctgggttccacgcacgatctaccgctgcataatgtacctgagtataatatcttcgagagggctcataggaagtatttttatactggactactgaaaaaaacattttctctaaaattcaatatggatcccaccgacagcactaagctggaaacatttcatcttattgcgtactatacggaaaaggatattcatcaaggaagtttgaggagaccttcagaaaatcctttcttccataaatttcgaccttcacagaaactattagatgctttacaaaaagttgctgtaggaaatggcagatctaacccgtctaaaaataatgagagaggcagaaccaaagctcataattataaaacgcgcaggtctttatcatcttctccgagctattgtgatctcttgagcaattataacaaccatcctggaaatattccagttaggaccgcagttcagttacctttaaccaccttcaataacgctcctcgagaaatgcaccaacagcagcaccgacaacagcaacaatatctcttacccatagatgaacagaataaattacctctcccgtatatgcagcaccagccacaaccaattggtgtttacaatcctaactatcagcctggattgagacgtacggtctcacaacctatgattttctgcaatacatacaatactctcccgcaacaacctactgcagcaccttatgaacggcgtggcgtgtcgccttcagtgatatactcctccaatacattgagcccaataccataccaaaatatcgatccatactcttcgaggtcgggtcctgaatgcaatcactctaaggcgcctatcgccccaacaatgatgcccccagtacaccatatacttgtgcatgattaccgacaaccaaaaccagtcacagattctattaatcctccaaatgtaaacataaccacctccacaaccaacaagaacctagatggcatttatattttgccagctcctcgtatgaatcccccggctcaaacacaataccaaatgattcatgcgccagacagcatgcaacatccaccaacatttagtaaaaacaacacatcaagcaatcctaaatcccaccaatactcaaagtag

SEQ ID NO: 5198 - DNA, 1362 bp, Artificial Sequence
  Description of Artificial Sequence: Synthetic polynucleotide
atgatggatatcagccctacctgttatgggtacatcgacgacgagcaagatttggcccttgttttccagggcgtattcaatggaaatttgagatgcatcgaaagaaggccatatgatgcagaaaaggttgaattagtcaaccccggaaacatttttgttttcaacgaagagaaatccggcatcaaaagatggacagatggtttttcttggtctccttccagaatttctggcaaatttctcgtatatagagagtataataggcttggttccacgcacgatttaccgcttcataatgtacctgagtataatatcttcgagagggctcataggaagtatttttatactggacttttgaaaaaaacattttctttgaaattcaatatggatcccaccgacagcactaagttggaaacatttcatcttattgcgtactatacggaaaaggatattcatcaaggaagtttgaggagaccttctgaaaatcctttcttccataaatttagaccttctcagaaattattagatgctttacaaaaagttgctgtaggaaatggcagatctaacccgtctaaaaataatgagagaggcagaaccaaagctcataattataaaacgcgcaggtctttatcttcttctccgagctattgtgatctcttgagcaattataacaaccatcctggaaatattccagttaggaccgcagttcagttacctttaaccaccttcaataacgctcctagagaaatgcaccaacagcagcaccgtcaacagcaacaatatctcttacccatagatgaacagaataaattacctctcccgtatatgcagcaccagccacaaccaattggtgtttacaatcctaactatcagcctggattgagacgtacggtctctcaacctatgattttctgcaatacatacaatactctcccgcaacaacctactgcagcaccttatgaaagacgtggcgtgtctccttctgtgatatactcctccaatacattgagcccaataccataccaaaatatcgatccatactcttccaggtctggtcctgaatgcaatcactctaaggcgcctatcgccccaacaatgatgcccccagtacaccatatacttgtgcatgattacagacaaccaaaaccagtcacagattctattaatcctccaaatgtaaacataaccacctccacaaccaacaagaaccttgatggcatttatattttgccagctcctcgtatgaatcccccggctcaaacacaataccaaatgattcatgcgccagacagcatgcaacatccaccaacatttagtaaaaacaacacatctagcaatcctaaatcccaccaatactccaagtga

SEQ ID NO: 5199 - DNA, 2232 bp, Saccharomyces cerevisiae
atggatggtcccaattttgcacatcaaggcgggagatcacaacgtactactgaattgtattcgtgcgcacgatgcagaaaattaaagaagaagtgtggtaaacaaataccgacatgtgcaaactgcgataaaaatggggcacactgttcatatccaggtagagccccaagacgtaccaagaaggagttagcggatgctatgctacgaggggaatatgttccagtgaaaaggaacaagaaggtaggaaaaagcccattgagcactaagagcatgccaaactcttctagtccgctatccgcaaatggcgctataactcccgggttttcgccttacgaaaacgatgatgcacataagatgaaacagctaaaaccgtcagatccaataaatcttgtcatgggggcaagtccaaattctagcgaaggtgtctcatcgctaatttcggtgctaacatcgctgaatgataattctaatccttcttcgcacttatcctctaatgaaaattccatgattccttcccgatcattgccagcttccgtgcagcaaagttcgacaacttcatcattcggaggatataacacgccttcaccactaattagcagtcatgtgcctgcgaacgcccaagccgtaccgctacaaaacaacaatcgcaatactagcaacggggataacggcagtaatgttaaccacgataataacaatggcagtaccaacacaccgcaattgagtcttaccccatatgcaaacaattcagcccccaatgggaaattcgattctgtgccggttgatgcatcctcgatcgaatttgaaactatgtcctgttgctttaaaggtggtagaacaacatcgtgggtcagagaggatggctcgttcaagtcaattgatagatccttactggacaggttcattgccgcatacttcaaacacaatcaccgtctatttcccatgattgataaaatagcattcctaaatgacgccgcgacaattactgatttcgaaaggttatatgacaacaaaaactaccctgacagctttgttttcaaagtatacatgatcatggctattggttgtacaactttacagcgtgctggtatggtttctcaggacgaagagtgtctgagtgaacatttggcttttttggccatgaaaaaatttcgtagtgttataattttacaagatatcgaaactgtacgatgcctattgttgttgggtatttattcgttttttgagccaaagggctcctcgtcatggacaattagtggtatcatcatgcgattgaccataggattaggtttaaatagagagttaactgccaaaaaactcaagagcatgtctgctttagaagcagaggcaagatatagagtgttttggagtgcttactgctttgaaaggctagtatgcacctcgttgggccgtatatccgggatcgacgacgaagacatcactgtgccactaccgagggcgttgtatgtggatgaaagagacgatttagagatgaccaagttgatgatatcattaaggaaaatgggcggtcgcatttataaacaagtccactctgtaagtgcagggcgacaaaagttaaccatcgaacaaaagcaggaaatcataagtggattacgcaaggagctagacgaaatttattctcgagaatcagaaagaaggaaactgaaaaaatctcaaatggatcaggtggagagggagaacaattctactacaaatgtaatatccttccatagttctgagatttggctagcaatgagatactcccagttgcaaatcttactatacagaccatctgcattgatgccaaaaccgcccattgactcactatccactctaggagagttttgcttgcaagcctggaaacatacttatacactgtacaagaagcggttattacccttgaactggataacccttttcagaacattaaccatttgtaacactatcttatactgtctttgccagtggagcatcgacctcattgaaagtaaaatcgaaattcaacagtgtgtggaaatactaagacatttcggtgaaagatggatttttgctatgagatgcgcggatgttttccaaaacattagcaacacaattctcgatattagtttaagccatggtaaagttcctaatatggaccaattaacaagagagttatttggcgccagcgattcatatcaagacatattagacgaaaacaatgttgacgtctcttgggttgataaacttgtatga

SEQ ID NO: 5200 - DNA, 2232 bp, Artificial Sequence
  Description of Artificial Sequence: Synthetic polynucleotide
atggatggtcccaattttgcacatcaaggcgggagatctcaacgtactactgaattgtattcttgcgcacgttgcagaaaattaaagaagaagtgtggtaaacaaataccgacatgtgcaaactgcgataaaaatggggcacactgttcttatccaggtagagccccaagacgtaccaagaaggagttagcggatgctatgttaagaggggaatatgttccagtgaaaaggaacaagaaggtaggaaaaagcccattgagcactaagagcatgccaaactcttctagtccgttatccgcaaatggcgctataactcccgggttttctccttacgaaaacgatgatgcacataagatgaaacagttgaaaccgagtgatccaataaatcttgtcatgggggcaagtccaaattctagcgaaggtgtctcttctttgatttctgtgttaacatctttgaatgataattctaatccttcttctcacttatcctctaatgaaaattccatgattccttccagaagtttgccagcttccgtgcagcaaagttctacaacttcttctttcggaggatataacacgccttctccattgattagcagtcatgtgcctgcgaacgcccaagccgtaccgttacaaaacaacaatcgcaatactagcaacggggataacggcagtaatgttaaccacgataataacaatggcagtaccaacacaccgcaattgagtcttaccccatatgcaaacaattctgcccccaatgggaaattcgattctgtgccggttgatgcatcctctatcgaatttgaaactatgtcctgttgctttaaaggtggtagaacaacatcttgggtcagagaggatggcagtttcaagtctattgatagatccttattagacaggttcattgccgcatacttcaaacacaatcaccgtttgtttcccatgattgataaaatagcattcttgaatgacgccgcgacaattactgatttcgaaaggttatatgacaacaaaaactaccctgacagctttgttttcaaagtatacatgatcatggctattggttgtacaactttacagcgtgctggtatggtttctcaggacgaagagtgtttaagtgaacatttggcttttttggccatgaaaaaatttcgtagtgttataattttacaagatatcgaaactgtaagatgcttgttgttgttgggtatttattctttttttgagccaaagggctcctcttcttggacaattagtggtatcatcatgagattgaccataggattaggtttaaatagagagttaactgccaaaaaactcaagagcatgtctgctttagaagcagaggcaagatatagagtgttttggagtgcttactgctttgaaaggttagtatgcacctctttgggccgtatatccgggatcgacgacgaagacatcactgtgccattaccgagggcgttgtatgtggatgaaagagacgatttagagatgaccaagttgatgatatctttaaggaaaatgggcggtcgcatttataaacaagtccactctgtaagtgcagggcgtcaaaagttaaccatcgaacaaaagcaggaaatcataagtggattacgcaaggagttggacgaaatttattctagagaaagtgaaagaaggaaattgaaaaaatctcaaatggatcaggtggagagggagaacaattctactacaaatgtaatatccttccatagttctgagatttggttggcaatgagatactcccagttgcaaatcttattgtacagaccatctgcattgatgccaaaaccgcccattgactctttatccactttgggagagttttgcttgcaagcctggaaacatacttatacattgtacaagaagagattattacccttgaactggataacccttttcagaacattaaccatttgtaacactatcttatactgtctttgccagtggagcatcgacctcattgaaagtaaaatcgaaattcaacagtgtgtggaaatattaagacatttcggtgaaagatggatttttgctatgagatgcgcggatgttttccaaaacattagcaacacaattctcgatattagtttaagccatggtaaagttcctaatatggaccaattaacaagagagttatttggcgccagcgattcttatcaagacatattagacgaaaacaatgttgacgtctcttgggttgataaacttgtatga

SEQ ID NO: 5201 - DNA, 1203 bp, Saccharomyces cerevisiae
atgccatttgttaaggactttaagccacaagctttgggtgacaccaacttattcaaaccaatcaaaattggtaacaatgaacttctacaccgtgctgtcattcctccattgactagaatgagagcccaacatccaggtaatattccaaacagagactgggccgttgaatactacgctcaacgtgctcaaagaccaggaaccttgattatcactgaaggtacctttccctctccacaatctgggggttacgacaatgctccaggtatctggtccgaagaacaaattaaagaatggaccaagattttcaaggctattcatgagaataaatcgttcgcatgggtccaattatgggttctaggttgggctgctttcccagacacccttgctagggatggtttgcgttacgactccgcttctgacaacgtgtatatgaatgcagaacaagaagaaaaggctaagaaggctaacaacccacaacacagtataacaaaggatgaaattaagcaatacgtcaaagaatacgtccaagctgccaaaaactccattgctgctggtgccgatggtgttgaaatccacagcgctaacggttacttgttgaaccagttcttggacccacactccaataacagaaccgatgagtatggtggatccatcgaaaacagagcccgtttcaccttggaagtggttgatgcagttgtcgatgctattggccctgaaaaagtcggtttgagattgtctccatatggtgtcttcaacagtatgtctggtggtgctgaaaccggtattgttgctcaatatgcttatgtcttaggtgaactagaaagaagagctaaagctggcaagcgtttggctttcgtccatctagttgaacctcgtgtcaccaacccatttttaactgaaggtgaaggtgaatacaatggaggtagcaacaaatttgcttattctatctggaagggcccaattattagagctggtaactttgctctgcacccagaagttgtcagagaagaggtgaaggatcctagaacattgatcggttacggtagattttttatctctaatccagatttggttgatcgtttggaaaaagggttaccattaaacaaatatgacagagacactttctacaaaatgtcagctgagggatacattgactaccctacgtacgaagaagctctaaaactcggttgggacaaaaattaa

SEQ ID NO: 5202 - DNA, 1203 bp, Artificial Sequence
  Description of Artificial Sequence: Synthetic polynucleotide
atgccatttgttaaggactttaagccacaagctttgggtgacaccaacttattcaaaccaatcaaaattggtaacaatgaacttttacaccgtgctgtcattcctccattgactagaatgagagcccaacatccaggtaatattccaaacagagactgggccgttgaatactacgctcaacgtgctcaaagaccaggaaccttgattatcactgaaggtacctttccctctccacaatctgggggttacgacaatgctccaggtatctggtccgaagaacaaattaaagaatggaccaagattttcaaggctattcatgagaataaatctttcgcatgggtccaattatgggttttaggttgggctgctttcccagacacccttgctagggatggtttgcgttacgactccgcttctgacaacgtgtatatgaatgcagaacaagaagaaaaggctaagaaggctaacaacccacaacacagtataacaaaggatgaaattaagcaatacgtcaaagaatacgtccaagctgccaaaaactccattgctgctggtgccgatggtgttgaaatccacagcgctaacggttacttgttgaaccagttcttggacccacactccaataacagaaccgatgagtatggtggatccatcgaaaacagagcccgtttcaccttggaagtggttgatgcagttgtcgatgctattggccctgaaaaagtcggtttgagattgtctccatatggtgtcttcaacagtatgtctggtggtgctgaaaccggtattgttgctcaatatgcttatgtcttaggtgaattggaaagaagagctaaagctggcaagcgtttggctttcgtccatttggttgaacctcgtgtcaccaacccatttttaactgaaggtgaaggtgaatacaatggaggtagcaacaaatttgcttattctatctggaagggcccaattattagagctggtaactttgctttacacccagaagttgtcagagaagaggtgaaggatcctagaacattgatcggttacggtagattttttatctctaatccagatttggttgatcgtttggaaaaagggttaccattaaacaaatatgacagagacactttctacaaaatgtctgctgagggatacattgactaccctacgtacgaagaagctttgaaactcggttgggacaaaaattga

SEQ ID NO: 5203 - DNA, 492 bp, Saccharomyces cerevisiae
atggaaatgcactggataaccctcgttgcatttattgctacattcttcaacctagctgctacctcgatcaacaatagttccctccctgatgttgatcttactaatcctttgagattcttcactaacattccagcaggacttaattttaatgaagtcatttttctcgaaagaaacggattctatcttggtggaatagactctccctcaatctaccacttaataaatggtacagctgtgtattttggggatgtcagagataatatcatgccgggtacagttggcactactaggaatgttacagatgtcgactatggctccttactgacagagtatggttatgaagctaatacagattatgtctcgcgttggatcgccactcatgtagtaatctctccattgaatgctacagagtttttccaaacacccgtgccagtaccagtgccagtgccgataacaatactgcaccaacaggtgaactcaaaactacattag

SEQ ID NO: 5204 - DNA, 492 bp, Artificial Sequence
  Description of Artificial Sequence: Synthetic polynucleotide
atggaaatgcactggataaccctcgttgcatttattgctacattcttcaacttggctgctacctctatcaacaatagttccctccctgatgttgatcttactaatcctttgagattcttcactaacattccagcaggacttaattttaatgaagtcatttttctcgaaagaaacggattctatcttggtggaatagactctccctccatctaccacttaataaatggtacagctgtgtattttggggatgtcagagataatatcatgccgggtacagttggcactactaggaatgttacagatgtcgactatggctccttattaacagagtatggttatgaagctaatacagattatgtctctcgttggatcgccactcatgtagtaatctctccattgaatgctacagagtttttccaaacacccgtgccagtaccagtgccagtgccgataacaatattacaccaacaggtgaactccaaattgcattga

SEQ ID NO: 5205 - DNA, 687 bp, Saccharomyces cerevisiae
atgctgttagaattgatttcttatgcaggaaccgtttcagggtttctttttttaacactttcaattgcatcgggtttatactacattagtgaacttgttgaagaacacacagaacccacaagacggtttctcacaagggctatttatggtataatattaatattaattctgctactgttactagacggtttcccgttcaaacttacacttttttccattgcatgttacatagtatattaccaaaacttaaaaagtttcccatttatttcgttaaccagcccaactttcctattaagctgcgtatgtgtggtcttgaatcactacttctggttcaaatattttaatgatacggaagttcccccacagttcaaatttgatccaaattatataccacgcagacgtgctagtttcgctgaagtagcctcattttttggtatatgcgtttggttcataccatttgccttatttgtttctctgtcagctggtgattatgtgctaccaacgactagtgagcaacatatggctaagaaaaatgatgacatcacaacgaacaaccagccaaaatttcgtaaaagggctgttgggttagctcgtgtagtcatcaactcggtaaggaagtacatctactctctagcccgtgtattcggttatgagatagaacctgactttgatagattggctgtttag

SEQ ID NO: 5206 - DNA, 687 bp, Artificial Sequence
  Description of Artificial Sequence: Synthetic polynucleotide
atgcttttagaattgatttcttatgcaggaaccgtttctgggtttctttttttaacactttctattgcatctggtttatactacattagtgaacttgttgaagaacacacagaacccacaagaagatttctcacaagggctatttatggtataatattaatattaattttattattattattagacggtttcccgttcaaacttacacttttttccattgcatgttacatagtatattaccaaaacttaaaaagtttcccatttatttctttaaccagcccaactttcttattaagctgcgtatgtgtggtcttgaatcactacttctggttcaaatattttaatgatacggaagttcccccacagttcaaatttgatccaaattatataccacgcagacgtgctagtttcgctgaagtagcctctttttttggtatatgcgtttggttcataccatttgccttatttgtttctttatctgctggtgattatgtgttaccaacgactagtgagcaacatatggctaagaaaaatgatgacatcacaacgaacaaccagccaaaatttcgtaaaagggctgttgggttagctcgtgtagtcatcaactctgtaaggaagtacatctactctttggcccgtgtattcggttatgagatagaacctgactttgatagattggctgtttga

SEQ ID NO: 5207 - DNA, 2358 bp, Saccharomyces cerevisiae
atgtctgttaaagagcataacgaagaagatattattggtgatgaattacagaattcgaggcaactctccattgattgcgactcagttaaaatttcactaaggaacacatattggaccaaagactatacaacaggtatcaaattattcataaaacatatgaagagagaaaatgatttgctgattaaagacatcaaattttacaatgattttgtcaacaaattttggaaaccaacattgaacaatttacaaaaaatggaagcaaccaattcaatgaatagcaggctgctggaagtgatgagcaaacagtttaatataatatcaacagagcaagttgaaagagattgtaaaattccattgcaagaactaagagatcttaatgagagcttccttcgtgaggcagaaaacgatttgtcatctcgttattcagcttacattaaggatttagtcgcagctaaagaggcactaattggatgtgagaaaagagttcagtctatatataaattgaaaaaagccaatacgccagtggaaaattcttcctctgtttttgataatggaaaggatagtgcaccgttaaccaggttgaacttcgtatgcgagtttccttacactttagacgagaggttaaaatttgaggattgcgaccaatttatgtcatttttgcaaaccttgaagggaaaagtcatcctggagaaaagtgtcttttccgttccaggattgtcaaatcaaagtttccaaggcaggtcattgatcaaagaattgaaaaaacttgaacccagactaaacctgtccttatttaatatcgataggataggtaacgaattcatccaactgggtataatacaagaatattccctgagtttttactctagcaaagtttctcagtttgaccaggaaaaatactattactggaacagtgaagtccttgctacgcaagagagtaatggtaatgctggaaacagaaaaaaaaaatcgtatggtgagttaacacactccgacaatgaacacgaagaaaagtccaacgtttcatctatcaaaacatctatatccgattggatccgcaaagttagtcaacatgataatgatgattgcgatgcagcgggaagtacagatatgaataaaaatgagtggaagagtttaaaacagcaacttgaatcatcacaagatatttttttctccaagtgttgccagttggaatattctaaagtgcagttggaaaaaaccatttatgattattgtaaaaattactctaaaatggaggacggaatcaaacgagctctagaatcatcaaacatgatgtttcaacaaaaatgtgaaaaatttactgactcacctgtgtgttctctacaagaagcacaactgccacaggaaactgccaatgcggatgtaagagggtttttcctcagggataatggcataccctttcgcaggtggaatatcctagaagcgagtgatccagtcgacgcttgcaaagaaatctccataaaaagcgaaaagtttttctgtggtagtgaaataaataatgaactggctgctcttgatacgttaggggcaataaagattatactgcggcagattgaaaaggaaccaaatgctaataaagtcatacaaagttggcacagggatattgattttgtaagggtttctaatttgaaaagagacttattgggggaattcaaaggatcgaaaactaccgaaaatacaaactctataatcactgctcatttttttgaaaactcgcacagctatgtcactaatgatctcgtcggactgataaaattatggctgttagagctacccgacagcctaataccttcaaaccactacgatgacttaattaaggccgaaaaatcgctaacatccctatgtgaacagtttccgacgagctccttaaggtttctacaagaactagcaaaccattttcaattgatcaatagcaaatactcacttccgccgcaaacaatacaagatttgtttagagacaacagtgacatagacataccattggcccatcacttcgtaagaagaacaggcttacagaaccctatcgacatcaaaatcttgtcaccaacattatctacatttttcatcaacgaaagaactgtagaaactttgcaaacgttgatcgcaaacaggatcacgacggcaactactgcgacactcactgaaccgccgacgataattataaaggatacaacggcacctatacactctacccctaagccaccgccaaacgacaaggatggccatttcatacctcggccattcaagactagttctactccgacaaccccagagagacctaaacgtaagagtggtttattccttcccatcaacgtcaacgatgtcccttctacataa

SEQ ID NO: 5208 - DNA, 2358 bp, Artificial Sequence
  Description of Artificial Sequence: Synthetic polynucleotide
atgtctgttaaagagcataacgaagaagatattattggtgatgaattacagaattctaggcaactctccattgattgcgactctgttaaaatttctttgaggaacacatattggaccaaagactatacaacaggtatcaaattattcataaaacatatgaagagagaaaatgatttgttaattaaagacatcaaattttacaatgattttgtcaacaaattttggaaaccaacattgaacaatttacaaaaaatggaagcaaccaattctatgaatagcaggttattggaagtgatgagcaaacagtttaatataatatctacagagcaagttgaaagagattgtaaaattccattgcaagaattgagagatcttaatgagagcttccttcgtgaggcagaaaacgatttgtcttctcgttattctgcttacattaaggatttagtcgcagctaaagaggcattgattggatgtgagaaaagagttcagtctatatataaattgaaaaaagccaatacgccagtggaaaattcttcctctgtttttgataatggaaaggatagtgcaccgttaaccaggttgaacttcgtatgcgagtttccttacactttagacgagaggttaaaatttgaggattgcgaccaatttatgagttttttgcaaaccttgaagggaaaagtcatcttggagaaaagtgtcttttccgttccaggattgagcaatcaaagtttccaaggcaggtctttgatcaaagaattgaaaaaacttgaacccagattgaacctttccttatttaatatcgataggataggtaacgaattcatccaattgggtataatacaagaatattccttgagtttttactctagcaaagtttctcagtttgaccaggaaaaatactattactggaacagtgaagtccttgctacgcaagagagtaatggtaatgctggaaacagaaaaaaaaaaagttatggtgagttaacacactccgacaatgaacacgaagaaaagtccaacgtttcttctatcaaaacatctatatccgattggatccgcaaagttagtcaacatgataatgatgattgcgatgcagcgggaagtacagatatgaataaaaatgagtggaagagtttaaaacagcaacttgaatcttctcaagatatttttttctccaagtgttgccagttggaatattctaaagtgcagttggaaaaaaccatttatgattattgtaaaaattactctaaaatggaggacggaatcaaaagagctttggaatcttccaacatgatgtttcaacaaaaatgtgaaaaatttactgactctcctgtgtgttctttacaagaagcacaattaccacaggaaactgccaatgcggatgtaagagggtttttcctcagggataatggcataccctttcgcaggtggaatatcttggaagcgagtgatccagtcgacgcttgcaaagaaatctccataaaaagcgaaaagtttttctgtggtagtgaaataaataatgaattggctgctcttgatacgttaggggcaataaagattatattgagacagattgaaaaggaaccaaatgctaataaagtcatacaaagttggcacagggatattgattttgtaagggtttctaatttgaaaagagacttattgggggaattcaaaggatctaaaactaccgaaaatacaaactctataatcactgctcatttttttgaaaactctcacagctatgtcactaatgatctcgtcggattgataaaattatggttgttagagttgcccgacagcttgataccttccaaccactacgatgacttaattaaggccgaaaaatctttaacatccttatgtgaacagtttccgacgagctccttaaggtttttgcaagaattggcaaaccattttcaattgatcaatagcaaatactctcttccgccgcaaacaatacaagatttgtttagagacaacagtgacatagacataccattggcccatcacttcgtaagaagaacaggcttacagaaccctatcgacatcaaaatcttgtctccaacattatctacatttttcatcaacgaaagaactgtagaaactttgcaaacgttgatcgcaaacaggatcacgacggcaactactgcgacactcactgaaccgccgacgataattataaaggatacaacggcacctatacactctacccctaagccaccgccaaacgacaaggatggccatttcatacctaggccattcaagactagttctactccgacaaccccagagagacctaaacgtaagagtggtttattccttcccatcaacgtcaacgatgtcccttctacatga

SEQ ID NO: 5209 - DNA, 1470 bp, Saccharomyces cerevisiae
atgtctgctgatttcggtttgattggtttggccgtcatgggtcaaaatttgatcttgaacgctgctgaccacggtttcactgtttgtgcttacaacagaactcaatccaaggtcgaccatttcttggccaatgaagctaagggcaaatctatcatcggtgctacttccattgaagatttcatctccaaattgaagagacctagaaaggtcatgcttttggttaaagctggtgctccagttgacgctttgatcaaccaaatcgtcccacttttggaaaagggtgatattatcatcgatggtggtaactctcacttcccagattctaatagacgttacgaagaattgaagaagaagggtattcttttcgttggttctggtgtctccggtggtgaggaaggtgcccgttacggtccatctttgatgccaggtggttctgaagaagcttggccacatattaagaacatcttccaatccatctctgctaaatccgacggtgaaccatgttgcgaatgggttggcccagccggtgctggtcactacgtcaagatggttcacaacggtattgaatacggtgatatgcaattgatttgtgaagcttatgacatcatgaagagattgggtgggtttaccgataaggaaatcagtgacgtttttgccaaatggaacaatggtgtcttggattccttcttggtcgaaattaccagagatattttgaaattcgacgacgtcgacggtaagccattagttgaaaaaatcatggatactgctggtcaaaagggtactggtaagtggactgccatcaacgccttggatttgggtatgccagttactttgattggtgaagctgtctttgcccgttgtctatctgctttgaagaacgagagaattagagcctccaaggtcttaccaggcccagaagttccaaaagacgccgtcaaggacagagaacaatttgtcgatgatttggaacaagctttgtatgcttccaagattatttcttacgctcaaggtttcatgttgatccgtgaagctgctgctacttatggctggaaactaaacaaccctgccatcgctttgatgtggagaggtggttgtatcattagatctgttttcttgggtcaaatcacaaaggcctacagagaagaaccagatttggaaaacttgttgttcaacaagttcttcgctgatgccgtcaccaaggctcaatctggttggagaaagtcaattgcgttggctaccacctacggtatcccaacaccagccttttccaccgctttgtctttctacgatgggtacagatctgaaagattgccagccaacttactacaagctcaacgtgactactttggtgctcacactttcagagtgttgccagaatgtgcttctgacaacttgccagtagacaaggatatccatatcaactggactggccacggtggtaatgtttcttcctctacataccaagcttaa

SEQ ID NO: 5210 - DNA, 1470 bp, Artificial Sequence
  Description of Artificial Sequence: Synthetic polynucleotide
atgtctgctgatttcggtttgattggtttggccgtcatgggtcaaaatttgatcttgaacgctgctgaccacggtttcactgtttgtgcttacaacagaactcaatccaaggtcgaccatttcttggccaatgaagctaagggcaaatctatcatcggtgctacttccattgaagatttcatctccaaattgaagagacctagaaaggtcatgcttttggttaaagctggtgctccagttgacgctttgatcaaccaaatcgtcccacttttggaaaagggtgatattatcatcgatggtggtaactctcacttcccagattctaatagacgttacgaagaattgaagaagaagggtattcttttcgttggttctggtgtctccggtggtgaggaaggtgcccgttacggtccatctttgatgccaggtggttctgaagaagcttggccacatattaagaacatcttccaatccatctctgctaaatccgacggtgaaccatgttgcgaatgggttggcccagccggtgctggtcactacgtcaagatggttcacaacggtattgaatacggtgatatgcaattgatttgtgaagcttatgacatcatgaagagattgggtgggtttaccgataaggaaatcagtgacgtttttgccaaatggaacaatggtgtcttggattccttcttggtcgaaattaccagagatattttgaaattcgacgacgtcgacggtaagccattagttgaaaaaatcatggatactgctggtcaaaagggtactggtaagtggactgccatcaacgccttggatttgggtatgccagttactttgattggtgaagctgtctttgcccgttgtttgtctgctttgaagaacgagagaattagagcctccaaggtcttaccaggcccagaagttccaaaagacgccgtcaaggacagagaacaatttgtcgatgatttggaacaagctttgtatgcttccaagattatttcttacgctcaaggtttcatgttgatccgtgaagctgctgctacttatggctggaaattgaacaaccctgccatcgctttgatgtggagaggtggttgtatcattagatctgttttcttgggtcaaatcacaaaggcctacagagaagaaccagatttggaaaacttgttgttcaacaagttcttcgctgatgccgtcaccaaggctcaatctggttggagaaagtctattgcgttggctaccacctacggtatcccaacaccagccttttccaccgctttgtctttctacgatgggtacagatctgaaagattgccagccaacttattacaagctcaacgtgactactttggtgctcacactttcagagtgttgccagaatgtgcttctgacaacttgccagtagacaaggatatccatatcaactggactggccacggtggtaatgtttcttcctctacataccaagcttga

SEQ ID NO: 5211 - DNA, 1716 bp, Saccharomyces cerevisiae
atgagaagctctggcacatatgagaatgatccttctggggaaataacctcaacttccccaaagcagtcgaagcagaaaaagcctaccaaatttagggaaagaatgcgcaggtggttacaaaatgggaaaaataacaaccaccaaggagaggaggatgttcctgaaatatttaacaagaatttttatccgcaaacaggcatgacagctttcaacaataatgataatggtgaggttcaggatgttacaaacaatttttttttgcccagtgaagatgaatctggtccagttcaaagtagtgttaaaacttttttaactggtaacaatgatgaagattctaacttccaacaaaaccagaatcctaaacaaaagtccgaacttccaaagtcaccttaccggcaaaaacctacgcaagaaatagcattattgaaagatcttttcgttaccaacaaatatgacgatccctatttgaattcttccacaaggtttggtaacataacttcaacttttcccagtagtttgtcattgaggactgtcaccttacaaacaataaaaaaaagaattgactgtatttctgcaaaaaaaaaagaagtgtggaagacagaggaaaaatttctaaaagatatcttaatgtggttacagagttcaaattttgaagaccctgatacaatatcattaatacatgaaattgaaaaaatatttgaagaggatatccattttgaacaaaacgtgtcggattgcttaaaagaaatctcaaataatttcgaatatatctgcatgcgagaaacccaattgataaacgaaggaaacatactaaaaaatgacttaaaaaagtacgcaaaagcaagggaacataaaggcgaaaagcatgaagatactgaagtcttgagggaaaaagtaatatcatcacaaaaatcgtttgatgttacaaagaggcactataagcatgcaatttcaataacgacaagacagctatttatgaatttggcgtttgagtactacgaaaattgttcagatatgaaggatatttcgagaaaatacctacaagaatctttgtccactttacaaactatcgacacattgagtttttcggaagaattagaaaaaattagaaagagaagatttgataagttttgggcaaaaactaatcctgatccaacaaacaatattcaaaagtttgttaatatgagaacaggagtagcaggttttaatgattccttaatgaatcacttgtacgggaaactaagtttcggggtagcgccagttgaagaagaattacaaaactcacagccggagcacactgatgtgcctgaaaatgtttggaatgaggttctctctgattataattcaatggatggtaatccaattacttcaaataaattcctttctgcgaaagaacttgagcccgatcaattagttgaacttctcgctcaggaaaaagaagagaaagaggcaaaaaatatcagctcttcaactgcagaagttccatcgatatcgcaacctgaaataaagaaggagaatctcgaatcaaatgattccttgattttaagaagcacgaaaagaaatgtaaatgtcaatgccgctagtttgaggaatctttccattaaaaaaactcaagtcaaaccggagtctgcaagtgaagaaagcaaagttcttgctgcagctttaaatgatgcaaaacaaaacttggatgaaaacgtctggagaactcctatctaa

SEQ ID NO: 5212 - DNA, 1716 bp, Artificial Sequence
  Description of Artificial Sequence: Synthetic polynucleotide
atgagaagctctggcacatatgagaatgatccttctggggaaataacctctacttccccaaagcagtccaagcagaaaaagcctaccaaatttagggaaagaatgcgcaggtggttacaaaatgggaaaaataacaaccaccaaggagaggaggatgttcctgaaatatttaacaagaatttttatccgcaaacaggcatgacagctttcaacaataatgataatggtgaggttcaggatgttacaaacaatttttttttgcccagtgaagatgaatctggtccagttcaaagtagtgttaaaacttttttaactggtaacaatgatgaagattctaacttccaacaaaaccagaatcctaaacaaaagtccgaacttccaaagtctccttacagacaaaaacctacgcaagaaatagcattattgaaagatcttttcgttaccaacaaatatgacgatccctatttgaattcttccacaaggtttggtaacataacttctacttttcccagtagtttgtctttgaggactgtcaccttacaaacaataaaaaaaagaattgactgtatttctgcaaaaaaaaaagaagtgtggaagacagaggaaaaatttttgaaagatatcttaatgtggttacagagtagtaattttgaagaccctgatacaatatctttaatacatgaaattgaaaaaatatttgaagaggatatccattttgaacaaaacgtgtctgattgcttaaaagaaatctctaataatttcgaatatatctgcatgagagaaacccaattgataaacgaaggaaacatattgaaaaatgacttaaaaaagtacgcaaaagcaagggaacataaaggcgaaaagcatgaagatactgaagtcttgagggaaaaagtaatatcttctcaaaaaagttttgatgttacaaagaggcactataagcatgcaatttctataacgacaagacagttatttatgaatttggcgtttgagtactacgaaaattgttctgatatgaaggatatttctagaaaatacttacaagaatctttgtccactttacaaactatcgacacattgagtttttctgaagaattagaaaaaattagaaagagaagatttgataagttttgggcaaaaactaatcctgatccaacaaacaatattcaaaagtttgttaatatgagaacaggagtagcaggttttaatgattccttaatgaatcacttgtacgggaaattaagtttcggggtagcgccagttgaagaagaattacaaaactctcagccggagcacactgatgtgcctgaaaatgtttggaatgaggttctctctgattataattctatggatggtaatccaattacttccaataaattcctttctgcgaaagaacttgagcccgatcaattagttgaacttctcgctcaggaaaaagaagagaaagaggcaaaaaatatcagctcttctactgcagaagttccaagtatatctcaacctgaaataaagaaggagaatctcgaaagtaatgattccttgattttaagaagcacgaaaagaaatgtaaatgtcaatgccgctagtttgaggaatctttccattaaaaaaactcaagtcaaaccggagtctgcaagtgaagaaagcaaagttcttgctgcagctttaaatgatgcaaaacaaaacttggatgaaaacgtctggagaactcctatctga

SEQ ID NO: 5213 - DNA, 714 bp, Saccharomyces cerevisiae
atgaatcaaggttacacacagctttccgcaccggaactgaaggagactaaaacatcgaagctaaataaaatgaacaactttcgaagctctccgattgctgagataattaataagataccaccagattgcgggaagatacagaatacaacatttcctgagttcaatccagcgttaagaagacgacaacacgaacagtggcctgcatacgaaaaaccaataagagttactgacagtatgtcaccacagctttcttcaatcaattgtttgccaaatttgtatccccacggtacgctaccattaccaaacccttatttatcctatttaaatcacattgaaaaagttaattgccaagatgtcaagtttagtaactggagtgttttacataattcgaataatggatttgaaattccgacatatttcagtccacggacaacacaaaacatgccttgttccgaaaaagttgaaagctggcttgaaagattaccaatttttgtggggttcgacggttatttatttacaaactgctttgattatgaatatatgttggattgggaagagacagaatttacattcgagaaaacatcatgtatggagacggattattctaaagctttaaccgatactgatattatatatattcaagagaaaaaaattgaagcgttgataagaaaccaatatctgaaggagtatgaattttctcaaaaagatttttga

SEQ ID NO: 5214 - DNA, 714 bp, Artificial Sequence
  Description of Artificial Sequence: Synthetic polynucleotide
atgaatcaaggttacacacagctttccgcaccggaattgaaggagactaaaacatccaagttgaataaaatgaacaactttagaagctctccgattgctgagataattaataagataccaccagattgcgggaagatacagaatacaacatttcctgagttcaatccagcgttaagaagaagacaacacgaacagtggcctgcatacgaaaaaccaataagagttactgacagtatgtctccacagctttcttctatcaattgtttgccaaatttgtatccccacggtacgttaccattaccaaacccttatttatcctatttaaatcacattgaaaaagttaattgccaagatgtcaagtttagtaactggagtgttttacataatagtaataatggatttgaaattccgacatatttcagtccaagaacaacacaaaacatgccttgttccgaaaaagttgaaagctggcttgaaagattaccaatttttgtggggttcgacggttatttatttacaaactgctttgattatgaatatatgttggattgggaagagacagaatttacattcgagaaaacatcttgtatggagacggattattctaaagctttaaccgatactgatattatatatattcaagagaaaaaaattgaagcgttgataagaaaccaatatttgaaggagtatgaattttctcaaaaagatttttga

SEQ ID NO: 5215 - DNA, 4674 bp, Saccharomyces cerevisiae
atgccggagatttatggacctcagccattaaagccactcaatacggtgatgagacatgggtttgaagagcaataccaaagtgaccaacttttacaatcactcgcgaatgatttcatattctactttgatgataaacgacacaaaactaatggaaatccgattcctgaagaggataaacaacgagatgtaaatcgttattaccagccgattaccgattggaagattatgaaagatcgacagaagacagtaagtgcggcccttttattatgcttgaatttaggtgtcgatccccctgatgttatgaagacacatccctgtgccagagttgaagcatgggtagacccattgaatttccaggactcgaagaaagcaatagaacaaattggtaaaaacttacaagcacagtacgaaactctgtctttgagaacacgctataaacaaagcttggatccttgtgtagaggatgtcaaacggttttgcaactcgctaagaagaacttctaaggaagataggatacttttccactacaacggacatggtgtgcctaagcctacaaaatcaggtgaaatttgggttttcaacagaggttatacacaatatattccggtatctttgtatgacctgcaaacttggttaggtgcgccatgtatatttgtctatgattgcaacagtgctgaaaatatattaatcaactttcagaagtttgtgcaaaagaggattaaagatgatgaagagggaaatcatgatgttgccgcgccatcaccaacttcagcttatcaagattgtttccaattagcctcttgcacttccgatgaacttttacttatgagtccggaactacccgcagatttgtttagttgttgtttgacctgtccaatagagattagcatccgtatctttctcatgcagtcacccttaaaagattctaaatataaaattttcttcgaaaatagtacttcaaatcaaccgtttggtgatagtaagaactcgttcaagtccaaaatacccaacgtcaatatccctggaatgttgtcggataggagaacgccgttgggagaactaaattggatttttacagctataacggacacaattgcatggacatccctcccccgaccacttttcaaaaaattattcagacatgatttaatgattgctgcgcttttcagaaattttcttctagccaaaagaataatgccgtggtacaattgccatcctgtatctgatccagaattaccagatagtataaccacacatccaatgtggaaatcttgggatttagccatggatgaagtactgactaaaatagtcattgatctgaaaaatgctcctcccgctactgccttagagagtcagatgattctacaacaacaagaaaccttacagaatggtggcagctctaagtcgaatgcccaagatacgaaagccggaagtattcaaacacaatcgagatttgcagtggccaatttaagtacaatgtctctagtaaataaccctgctctccaatcaagaaaatctatatctttgcaaagctcacagcaacaattacagcagcagcaacaacaacaacaacaatttacaggattttttgaacaaaatttgactgcttttgaattgtggttgaaatatgcttcaaatgtcagacacccgcctgagcagcttcctatcgttttacaggttcttctttcgcaagtgcatcgtatacgtgcgttggtacttttatccagatttttagatttaggcccgtgggctgtctacctgtcactttcaataggtatcttcccctacgttttgaagctgctacaaagtccagcacctgagttgaagcccatcctagtttttatttgggcccgtatcatgtcaatagattacaaaaacacgcaaagtgaattaatcaaagaaaagggttatatgtattttgttacagtgttagtacctgattggggtgttaatggcatgtcagctacaaatggctcagccatgataaatagtgggaacccgttgacaatgactgcatcgcagaatataaatggtccatcttcaagatattatgaacgccagcaaggaaatagaacatccaacttgggccacaataatcttccattttatcattctaatgataccaccgatgaacaaaaagctatggctgtctttgttttggcatcattcgttcgaaactttcctctggggcaaaaaaattgttttagtttggaactggtcaacaagttgtgcttttatattgataattctgagatacccctactaagacagtggtgtgttattttattaggtttattgtttgctgataaccccttaaacaggtttgtatgtatgaatactggtgctgttgaaatattactaaaatctttgaaggaccctgtacctgaagttagaacagcttctatatttgcattgaagcatttcatatctggatttcaagatgcagaggtaattttgagattgcaacaagaatttgaagaacagtatcagcaattacattcgcaattacagcatctccaaaatcaatcccatctacaacaacaacagtcccagcaacagcagcagcatcttgagcagcagcagatgaaaattgaaaagcagattcgtcattgtcaagttatgcaaaatcaactagaagttattgatttgaggaagttaaaaagacaggaaattggcaacttgatctcaatcttacctttaatcaatgatggttcatcattagtccgtaaggaactagtcgtatatttttcgcatattgtgagtcgttactctaacttttttattgtagttgtattcaatgatttgttggaagaaataaaacttttagagaaaagtgatatcaatactcgaaacacttccgataagtattcagttagtcagggttccattttctacactgtttggaaatctctcttgattctagccgaagatccctttttagagaacaaggaattatccaagcaggttatagattatattttgcttgaattaagcgcccataaggaacttggtggaccatttgcagttatggaaaaatttttgttgaaaagaagctcgaaagctcaccaaactggtaaatttggatttaattcttcgcaggttcaatttgtaaaaagttcattacgatcattctcaccaaatgagagggtagataataatgcattcaaaaaagagcaacaacagcatgacccaaagatatctcatccaatgcggacatctttagctaaacttttccagagtcttggttttagcgaatccaatagtgactctgatactcaatcatcaaatacttcgatgaaatcgcatacctcaaaaaagggtccctcgggcttatatttattgaatggcaataataatatttatcctacagctgagactccaagattccggaagcatacagaacccttacaattgccattaaatagttcctttttagactattcacgtgaatattttcaagaaccacaaatgaaaaagcaagaggcggatgaacctggcagtgttgagtataatgctagattgtggagacgtaacagaaatgaaactattatccaggaaacacagggggagaaaaaattatcgatttatgggaattggtccaaaaaattgattagtttaaataacaaaagtcaaccaaaactgatgaagtttgcccagtttgaagatcagctgattactgcagatgatagaagtaccattacagtttttgattgggagaaaggaaagactttgtccaaattctccaatggtactccttttggcacaaaagttactgacctgaaactcattaacgaggatgactccgcccttttattgacaggttcttcagacggtgttatcaaaatatacagagactaccaagatgtcgacacctttaaaattgtatccgcctggagaggcttgaccgatatgttattgacacctagatccacaggtttactaaccgaatggttacaaataagaggatcattgttaacaactggtgatgttaaggttatccgtgtctgggatgcgcatacagaaacggttgaagtggacattcctgcaaaaacatcatctttaattacatccttgacggctgatcagctagcaggtaatatcttcgtagcagggtttgcagatggctccctgagagtatatgatcgccgtctcgatccaagagattccatgatacgtcgctggagagctggaaatgataagcagggagtttggattaacaatgttcatttacaaagaggtggttacagagaattggtcagtggagctaccaatggtgttgtagagttatgggatataaggtccgaagatccggtagaatcgtttgttgatcaaaacgtaacttctcagtacggttcgcaacaaaaaccaacgacaatgacgtgcatgcaggttcatgagcatgctccgataattgcgacagggactaaacaaataaagatatggacgacatctggagatcttttgaattcttttaaaaactcacataataatggcgtaacaagtacattagccgctacgggaatcccaaagtcactgtcctactcttccacttctgatgcatttttatcttcgatggctttccatcctcatagaatgatgattgcggccaccaattctcacgattctattgtaaatatctacaagtgtgaagacgagagaattgattatttttga

SEQ ID NO: 5216 - DNA, 4674 bp, Artificial Sequence
  Description of Artificial Sequence: Synthetic polynucleotide
atgccggagatttatggacctcagccattaaagccactcaatacggtgatgagacatgggtttgaagagcaataccaaagtgaccaacttttacaatctctcgcgaatgatttcatattctactttgatgataaaagacacaaaactaatggaaatccgattcctgaagaggataaacaaagagatgtaaatcgttattaccagccgattaccgattggaagattatgaaagatagacagaagacagtaagtgcggcccttttattatgcttgaatttaggtgtcgatccccctgatgttatgaagacacatccctgtgccagagttgaagcatgggtagacccattgaatttccaggactccaagaaagcaatagaacaaattggtaaaaacttacaagcacagtacgaaactttatctttgagaacacgctataaacaaagcttggatccttgtgtagaggatgtcaaaagattttgcaactctttgagaagaacttctaaggaagataggatacttttccactacaacggacatggtgtgcctaagcctacaaaatctggtgaaatttgggttttcaacagaggttatacacaatatattccggtatctttgtatgacttgcaaacttggttaggtgcgccatgtatatttgtctatgattgcaacagtgctgaaaatatattaatcaactttcagaagtttgtgcaaaagaggattaaagatgatgaagagggaaatcatgatgttgccgcgccatctccaactagtgcttatcaagattgtttccaattagcctcttgcacttccgatgaacttttacttatgagtccggaattgcccgcagatttgtttagttgttgtttgacctgtccaatagagattagcatccgtatctttctcatgcagtctcccttaaaagattctaaatataaaattttcttcgaaaatagtacttccaatcaaccgtttggtgatagtaagaactctttcaagtccaaaatacccaacgtcaatatccctggaatgttgagtgataggagaacgccgttgggagaattgaattggatttttacagctataacggacacaattgcatggacatccctccccagaccacttttcaaaaaattattcagacatgatttaatgattgctgcgcttttcagaaattttcttttagccaaaagaataatgccgtggtacaattgccatcctgtatctgatccagaattaccagatagtataaccacacatccaatgtggaaatcttgggatttagccatggatgaagtattgactaaaatagtcattgatttgaaaaatgctcctcccgctactgccttagagagtcagatgattttacaacaacaagaaaccttacagaatggtggcagctctaagagcaatgcccaagatacgaaagccggaagtattcaaacacaatctagatttgcagtggccaatttaagtacaatgtctttagtaaataaccctgctctccaatctagaaaatctatatctttgcaaagctctcagcaacaattacagcagcagcaacaacaacaacaacaatttacaggattttttgaacaaaatttgactgcttttgaattgtggttgaaatatgcttctaatgtcagacacccgcctgagcagcttcctatcgttttacaggttcttctttctcaagtgcatcgtatacgtgcgttggtacttttatccagatttttagatttaggcccgtgggctgtctacctttctctttccataggtatcttcccctacgttttgaagttattacaaagtccagcacctgagttgaagcccatcttggtttttatttgggcccgtatcatgagtatagattacaaaaacacgcaaagtgaattaatcaaagaaaagggttatatgtattttgttacagtgttagtacctgattggggtgttaatggcatgtctgctacaaatggctctgccatgataaatagtgggaacccgttgacaatgactgcatcccagaatataaatggtccatcttctagatattatgaacgccagcaaggaaatagaacatccaacttgggccacaataatcttccattttatcattctaatgataccaccgatgaacaaaaagctatggctgtctttgttttggcatctttcgttagaaactttcctttagggcaaaaaaattgttttagtttggaattggtcaacaagttgtgcttttatattgataattctgagatacccttattaagacagtggtgtgttattttattaggtttattgtttgctgataaccccttaaacaggtttgtatgtatgaatactggtgctgttgaaatattattgaaatctttgaaggaccctgtacctgaagttagaacagcttctatatttgcattgaagcatttcatatctggatttcaagatgcagaggtaattttgagattgcaacaagaatttgaagaacagtatcagcaattacattctcaattacagcatctccaaaatcaatcccatttacaacaacaacagtcccagcaacagcagcagcatcttgagcagcagcagatgaaaattgaaaagcagattcgtcattgtcaagttatgcaaaatcaattggaagttattgatttgaggaagttaaaaagacaggaaattggcaacttgatctccatcttacctttaatcaatgatggttcttctttagtccgtaaggaattggtcgtatatttttctcatattgtgagtcgttactctaacttttttattgtagttgtattcaatgatttgttggaagaaataaaacttttagagaaaagtgatatcaatactagaaacacttccgataagtattctgttagtcagggttccattttctacactgtttggaaatctctcttgattttagccgaagatccctttttagagaacaaggaattatccaagcaggttatagattatattttgcttgaattaagcgcccataaggaacttggtggaccatttgcagttatggaaaaatttttgttgaaaagaagcagtaaagctcaccaaactggtaaatttggatttaattcttctcaggttcaatttgtaaaaagttctttaagatctttctctccaaatgagagggtagataataatgcattcaaaaaagagcaacaacagcatgacccaaagatatctcatccaatgagaacatctttagctaaacttttccagagtcttggttttagcgaatccaatagtgactctgatactcaatcttccaatacttctatgaaatctcatacctccaaaaagggtccctctggcttatatttattgaatggcaataataatatttatcctacagctgagactccaagattcagaaagcatacagaacccttacaattgccattaaatagttcctttttagactattctcgtgaatattttcaagaaccacaaatgaaaaagcaagaggcggatgaacctggcagtgttgagtataatgctagattgtggagacgtaacagaaatgaaactattatccaggaaacacagggggagaaaaaattatccatttatgggaattggtccaaaaaattgattagtttaaataacaaaagtcaaccaaaattaatgaagtttgcccagtttgaagatcagttgattactgcagatgatagaagtaccattacagtttttgattgggagaaaggaaagactttgtccaaattctccaatggtactccttttggcacaaaagttactgacttgaaactcattaacgaggatgactccgcccttttattgacaggttcttctgacggtgttatcaaaatatacagagactaccaagatgtcgacacctttaaaattgtatccgcctggagaggcttgaccgatatgttattgacacctagatccacaggtttattaaccgaatggttacaaataagaggatctttgttaacaactggtgatgttaaggttatccgtgtctgggatgcgcatacagaaacggttgaagtggacattcctgcaaaaacatcttctttaattacatccttgacggctgatcagttagcaggtaatatcttcgtagcagggtttgcagatggctccttgagagtatatgatcgccgtctcgatccaagagattccatgatacgtcgctggagagctggaaatgataagcagggagtttggattaacaatgttcatttacaaagaggtggttacagagaattggtcagtggagctaccaatggtgttgtagagttatgggatataaggtccgaagatccggtagaaagttttgttgatcaaaacgtaacttctcagtacggttctcaacaaaaaccaacgacaatgacgtgcatgcaggttcatgagcatgctccgataattgcgacagggactaaacaaataaagatatggacgacatctggagatcttttgaattcttttaaaaactctcataataatggcgtaacaagtacattagccgctacgggaatcccaaagtctttatcctactcttccacttctgatgcatttttatcttctatggctttccatcctcatagaatgatgattgcggccaccaattctcacgattctattgtaaatatctacaagtgtgaagacgagagaattgattatttttga

SEQ ID NO: 5217 - DNA, 930 bp, Saccharomyces cerevisiae
atggccagttcgtcacataaccctgtcattcttttgaaaagaatcttatcgctcacagaaagctcccctttcattttgtgcttagattctattgcccagacctcatacaagctcatccaagaattcgtccaccagagcaagagtaaaggaaatgagtatccaattgtgtacatttcgttcgaaacagtgaataaaccatcgtactgtactcaatttattgacgctacgcagatggattttgtacatttagtgaaacaaattatatcatatctaccggctgctactgccacacaggcaaaaaagcacatggtcattatcgattcattgaactatatttctacagaatacataacaaggtttttgtctgagatcgcctctcctcactgcacgatggttgcgacttatcataaagacatcaaagatgagaaccgtacggtaatacctgattggaataacaattatcctgataagttgactttactgcagtttatggccactacaatagtagatattgatgtggtattaacaggcactctcgatactgaggaggtgagtgaattgttaaacgaatttagaattcctcgcgggttaaataacgatatatttcaattacgacttgttaataaaagaaagtccggcaggtcattggaatacgacttcatagtaaattcaaacacccacgaatatgaattattatcaaccactaagcaagaagaggagagcagtagtaacggactggagacacccgaaatgttgcaaggattaacaacattcaacctaggaacatccaacaaacagaagctggccaaagatcaagtcgcattgccttttctggaggcacaaagctttggacaagggggtgctattgtttatgagtacgaaaaggatgacgattatgatgaagaggatccatatgaggatcccttttaa

SEQ ID NO: 5218 - DNA, 930 bp, Artificial Sequence
  Description of Artificial Sequence: Synthetic polynucleotide
atggccagttcttctcataaccctgtcattcttttgaaaagaatcttatctctcacagaaagctcccctttcattttgtgcttagattctattgcccagacctcttacaagctcatccaagaattcgtccaccagagcaagagtaaaggaaatgagtatccaattgtgtacatttctttcgaaacagtgaataaaccatcttactgtactcaatttattgacgctacgcagatggattttgtacatttagtgaaacaaattatatcttatttaccggctgctactgccacacaggcaaaaaagcacatggtcattatcgattctttgaactatatttctacagaatacataacaaggtttttgtctgagatcgcctctcctcactgcacgatggttgcgacttatcataaagacatcaaagatgagaaccgtacggtaatacctgattggaataacaattatcctgataagttgactttattgcagtttatggccactacaatagtagatattgatgtggtattaacaggcactctcgatactgaggaggtgagtgaattgttaaacgaatttagaattcctcgcgggttaaataacgatatatttcaattaagacttgttaataaaagaaagtccggcaggtctttggaatacgacttcatagtaaatagcaacacccacgaatatgaattattatctaccactaagcaagaagaggagagcagtagtaacggattggagacacccgaaatgttgcaaggattaacaacattcaacttgggaacatccaacaaacagaagttggccaaagatcaagtcgcattgccttttttggaggcacaaagctttggacaagggggtgctattgtttatgagtacgaaaaggatgacgattatgatgaagaggatccatatgaggatcccttttga

SEQ ID NO: 5219 - DNA, 1833 bp, Saccharomyces cerevisiae
atgatcctcacactggcctatttcatgctgggcactctactactgggtgtgttcgcagaagacacggtgtcgcagattggtataaatgacagtttatggtatccgtacgacgaagcactggtgttgaagccgctgcccaacaatgatctgctactctcatttgcattccaactgcaatcggaaccgtttgacccggccgtatcatccatgtcatatgatgcgtatgagcactacacgactttcccacgggccatcccaccattgttggaatctactgccacgcgtcagtttcatttaagatttaccagaggattctgggatgccctgtcgtggggacagttgccacatgctggaaaagaggcaggtgcctcaggtgtggaattgtggtcgcaagtgcaggccatggatcaggaacaggcgttccataattggaaaaaactgtccaattcattgagcggattgttttgttcttctttaaattttatcgacgagtcaaggacgacctttccccggcggtcatatgcttctgatataggagctcctcttttcaatagcaccgagaaactgtacctgatgcgagcatcgttgcccaatgaacccatctgtaccgagaacttgacgccgttcataaaactattgcctactaggggcaaatccggtttgacatctctcttggatggtcataaattgttcgactctctatggaatagtatttccttggatattgccactatttgttctgaagatgaagatgctctttgtcactacgagatggacgcacgcatagaaatggtaacacacgttccctccgccttggcaagaggtgagagacctatccccaaacctttggatgggaacacattgcgttgtgacacggataaaccctttgattcttaccaatgcttccctctaccggaaccttcgcagactcacttcaagctgtctcagctgtttgccagaccaataaacaatggcaacctgtttgctaataggcccacaagaatttgtgcagaagttgaccgttctacctggactgcgtttttgtcagttgacgatactattttcagcacacatgataattgctttgacttatcaaacgatcaaaatgagggtggttcgggctacgactttattttagaatcgacggacactactaaagttactcccatagttcctgtcccaattcacgtaagcagatctctgactggtaatggacaagatcgtggtggaatgcgtattgttttccataacgacaatgatacccctgtgaagttgatttatttcgaatcattgccatggttcatgagagtttacctatcctctcttcaaattacttctactacctctccgcaattgcaagaaaacgatatcatcttagataaatactatttacaagcggccgatagaaaaagacctggccacttggagttcacgatgttaattccagctaatacggacattgtaatgacttatcaattcgataaagctcttctgcaatttgccgagtatccaccagatgcaaaccatggttttgaaatcgatgcagctgtaatcaccgtgctatctttggagtcctcatcgtctctttatgaaatgagaacctctaccctattgttatccctgtctacaccggattttagtatgccgtataacgtcatcattctaacatctacaatcatgggactcatattcggtatgctatacaatttgatggtgaagagaatggtcaccgtcgaagaggccgataagattacgttgcaatctggcttaaaatacaaattgctaaagctaaaggaaaagttcctagggaaaaaaaagactaaaacagactaa

SEQ ID NO: 5220 - DNA, 1833 bp, Artificial Sequence
  Description of Artificial Sequence: Synthetic polynucleotide
atgatcctcacattggcctatttcatgcttggcactttattattgggtgtgttcgcagaagacacggtgtcccagattggtataaatgacagtttatggtatccgtacgacgaagcattggtgttgaagccgttgcccaacaatgatttacttctcagttttgcattccaattacaaagtgaaccgtttgacccggccgtatcttccatgtcttatgatgcgtatgagcactacacgactttcccaagagccatcccaccattgttggaatctactgccacgcgtcagtttcatttaagatttaccagaggattctgggatgccctttcttggggacagttgccacatgctggaaaagaggcaggtgcctctggtgtggaattgtggtctcaagtgcaggccatggatcaggaacaggcgttccataattggaaaaaactttccaattctttgagcggattgttttgttcttctttaaattttatcgacgagtccaggacgacctttccccgtagatcttatgcttctgatataggagctcctcttttcaatagcaccgagaaactttacttgatgagagcaagtttgcccaatgaacccatctgtaccgagaacttgacgccgttcataaaacttttgcctactaggggcaaatccggtttgacatctctcttggatggtcataaattgttcgactctctttggaatagtatttccttggatattgccactatttgttctgaagatgaagatgctctttgtcactacgagatggacgcacgcatagaaatggtaacacacgttccctccgccttggcaagaggtgagagacctatccccaaacctttggatgggaacacattgcgttgtgacacggataaaccctttgattcttaccaatgcttccctttgccggaaccttctcagactcacttcaagttatctcagttatttgccagaccaataaacaatggcaacttgtttgctaataggcccacaagaatttgtgcagaagttgaccgttctacctggactgcgtttttgagtgttgacgatactattttcagcacacatgataattgctttgacttatctaacgatcaaaatgagggtggttctggctacgactttattttagaaagtacggacactactaaagttactcccatagttcctgtcccaattcacgtaagcagatctttgactggtaatggacaagatcgtggtggaatgcgtattgttttccataacgacaatgatacccctgtgaagttgatttatttcgaatctttgccatggttcatgagagtttacttgtcctctcttcaaattacttctactacctctccgcaattgcaagaaaacgatatcatcttagataaatactatttacaagcggccgatagaaaaagacctggccacttggagttcacgatgttaattccagctaatacggacattgtaatgacttatcaattcgataaagctcttttacaatttgccgagtatccaccagatgcaaaccatggttttgaaatcgatgcagctgtaatcaccgtgttatctttggagtcctcttcttctctttatgaaatgagaacctctacccttttgttatccttatctacaccggattttagtatgccgtataacgtcatcattttaacatctacaatcatgggactcatattcggtatgctttacaatttgatggtgaagagaatggtcaccgtcgaagaggccgataagattacgttgcaatctggcttaaaatacaaattgttgaagttgaaggaaaagttcttggggaaaaaaaagactaaaacagactga

SEQ ID NO: 5221 - DNA, 573 bp, Saccharomyces cerevisiae
atgtccggtaaatggagactagtgctgaccgggataggcaatccagagcctcagtacgctggtacccgtcacaatgtagggctatatatgctggagctgctacgaaagcggcttggtctgcaggggagaacttattcccctgtgcctaatacgggcggcaaagtgcattatatagaagacgaacattgtacgatactaagatcggatggccagtacatgaatctaagtggagaacaggtgtgcaaggtctgggcccggtacgccaagtaccaagcccgacacgtagttattcatgacgagttaagtgtggcgtgtggaaaagtgcagctcagagcccccagcaccagtattagaggtcataatgggctgcgaagcctgctaaaatgcagtggaggccgtgtaccctttgccaaattggctattggaatcggcagagaacctgggtcccgttctagagaccctgcgagcgtgtcccggtgggttctgggagctctaactccgcaggaactacaaaccttgcttacacagagtgaacctgctgcctggcgtgctctgactcagtacatttcatag

SEQ ID NO: 5222 - DNA, 573 bp, Artificial Sequence
  Description of Artificial Sequence: Synthetic polynucleotide
atgtccggtaaatggagattagtgttgaccgggataggcaatccagagcctcagtacgctggtacccgtcacaatgtagggttatatatgttagagttacttagaaagagacttggtttacaggggagaacttattcccctgtgcctaatacgggcggcaaagtgcattatatagaagacgaacattgtacgatattaagaagtgatggccagtacatgaatttgagtggagaacaggtgtgcaaggtctgggccagatacgccaagtaccaagccagacacgtagttattcatgacgagttaagtgtggcgtgtggaaaagtgcagctcagagcccccagcaccagtattagaggtcataatgggttaagaagcttgttgaaatgcagtggaggccgtgtaccctttgccaaattggctattggaatcggcagagaacctgggtcccgttctagagaccctgcgagcgtgtccagatgggttttaggagctttgactccgcaggaattacaaaccttgcttacacagagtgaacctgctgcctggcgtgctttgactcagtacattagttga

SEQ ID NO: 5223 - DNA, 1335 bp, Saccharomyces cerevisiae
atgggaaagctattacaattggcattgcatccggtcgagatgaaggcagctttgaagctgaagttttgcagaacaccgctattctccatctatgatcagtccacgtctccatatctcttgcactgtttcgaactgttgaacttgacctccagatcgtttgctgctgtgatcagagagctgcatccagaattgagaaactgtgttactctcttttatttgattttaagggctttggataccatcgaagacgatatgtccatcgaacacgatttgaaaattgacttgttgcgtcacttccacgagaaattgttgttaactaaatggagtttcgacggaaatgcccccgatgtgaaggacagagccgttttgacagatttcgaatcgattcttattgaattccacaaattgaaaccagaatatcaagaagtcatcaaggagatcaccgagaaaatgggtaatggtatggccgactacatcttagatgaaaattacaacttgaatgggttgcaaaccgtccacgactacgacgtgtactgtcactacgtagctggtttggtcggtgatggtttgacccgtttgattgtcattgccaagtttgccaacgaatctttgtattctaatgagcaattgtatgaaagcatgggtcttttcctacaaaaaaccaacatcatcagagattacaatgaagatttggtcgatggtagatccttctggcccaaggaaatctggtcacaatacgctcctcagttgaaggacttcatgaaacctgaaaacgaacaactggggttggactgtataaaccacctcgtcttaaacgcattgagtcatgttatcgatgtgttgacttatttggccggtatccacgagcaatccactttccaattttgtgccattccccaagttatggccattgcaaccttggctttggtattcaacaaccgtgaagtgctacatggcaatgtaaagattcgtaagggtactacctgctatttaattttgaaatcaaggactttgcgtggctgtgtcgagatttttgactattacttacgtgatatcaaatctaaattggctgtgcaagatccaaatttcttaaaattgaacattcaaatctccaagatcgaacagtttatggaagaaatgtaccaggataaattacctcctaacgtgaagccaaatgaaactccaattttcttgaaagttaaagaaagatccagatacgatgatgaattggttccaacccaacaagaagaagagtacaagttcaatatggttttatctatcatcttgtccgttcttcttgggttttattatatatacactttacacagagcgtga

SEQ ID NO: 5224 - DNA, 1335 bp, Artificial Sequence
  Description of Artificial Sequence: Synthetic polynucleotide
atgggaaagcttttacaattggcattgcatccggtcgagatgaaggcagctttgaagttgaagttttgcagaacaccgcttttctccatctatgatcagtccacgtctccatatctcttgcactgtttcgaattattgaacttgacctccagatcttttgctgctgtgatcagagagttacatccagaattgagaaactgtgttactctcttttatttgattttaagggctttggataccatcgaagacgatatgtccatcgaacacgatttgaaaattgacttgttgcgtcacttccacgagaaattgttgttaactaaatggagtttcgacggaaatgcccccgatgtgaaggacagagccgttttgacagatttcgaaagtattcttattgaattccacaaattgaaaccagaatatcaagaagtcatcaaggagatcaccgagaaaatgggtaatggtatggccgactacatcttagatgaaaattacaacttgaatgggttgcaaaccgtccacgactacgacgtgtactgtcactacgtagctggtttggtcggtgatggtttgacccgtttgattgtcattgccaagtttgccaacgaatctttgtattctaatgagcaattgtatgaaagcatgggtcttttcttacaaaaaaccaacatcatcagagattacaatgaagatttggtcgatggtagatccttctggcccaaggaaatctggtctcaatacgctcctcagttgaaggacttcatgaaacctgaaaacgaacaattagggttggactgtataaaccacctcgtcttaaacgcattgagtcatgttatcgatgtgttgacttatttggccggtatccacgagcaatccactttccaattttgtgccattccccaagttatggccattgcaaccttggctttggtattcaacaaccgtgaagtgttacatggcaatgtaaagattcgtaagggtactacctgctatttaattttgaaatctaggactttgcgtggctgtgtcgagatttttgactattacttacgtgatatcaaatctaaattggctgtgcaagatccaaatttcttaaaattgaacattcaaatctccaagatcgaacagtttatggaagaaatgtaccaggataaattacctcctaacgtgaagccaaatgaaactccaattttcttgaaagttaaagaaagatccagatacgatgatgaattggttccaacccaacaagaagaagagtacaagttcaatatggttttatctatcatcttgtccgttcttcttgggttttattatatatacactttacacagagcgtga

SEQ ID NO: 5225 - DNA, 402 bp, Saccharomyces cerevisiae
atgcctagtgtagatatagatgctagtcaatggcagaagttgacacagtcaagagaaaagcagaccacggtgataacaccgcttgggatgatgatgctggagattcaaggtgaactagagttgcctaaggactttgcgtcgctggcgaggagagattctccaaatgagggaaggttcagtgaacaggacggcgaaactttaatacgatttgggtcgttacagattgacggagagagggccacattgtttgtcggcaagaaacagcgtttactggggaaggtgacaaagctagacgtaccgatgggtataatgcatttcaattcgaaagataataaggtcgaattagttgatgtaatgaaatataaggttatctttaaggataggcctctacctattatgtaa

SEQ ID NO: 5226 - DNA, 402 bp, Artificial Sequence
  Description of Artificial Sequence: Synthetic polynucleotide
atgcctagtgtagatatagatgctagtcaatggcagaagttgacacagtctagagaaaagcagaccacggtgataacaccgcttgggatgatgatgttagagattcaaggtgaattagagttgcctaaggactttgcgtctttagcgaggagagattctccaaatgagggaaggttcagtgaacaggacggcgaaactttaataagatttgggtctttacagattgacggagagagggccacattgtttgtcggcaagaaacagcgtttattagggaaggtgacaaagttggacgtaccgatgggtataatgcatttcaattctaaagataataaggtcgaattagttgatgtaatgaaatataaggttatctttaaggataggcctttgcctattatgtga

SEQ ID NO: 5227 - DNA, 837 bp, Saccharomyces cerevisiae
atgtttagtgcattaggtaaatgggtccgaggctctcgcaatgataaggactttgtgacgaagtataccgcagatttatcacaaataacttcacagatccatcaattagatgtcgcgttaaagaaaagccaatccatcttgagtcaatggcaatcaaatctgaccttttatggtattgcgttaacggtattggccctgagctacacatattgggagtaccatggttatcgaccataccttgtggtgactgcgctactatgcataggctcgctaatcttgttcaaatgggcattaaccaaactctatgcattttataacaacaataggttacgcaagttggcaaaactccgtgcaattcatcaaaagaaactggaaaagttaaaggaagagacccactataatgctacaagctcaatcatccaacggttttcttccggtgaagatcaaaacgacgatgccatggtacttctagatgatgaattaaatgctaaataccaagaattaaacaatctaaagacagagctagaaaaatttaagaaggaaagccatgtaaagggcctaaagaaggaagacagcgatgcatggttcgacaaaatcatcagcgtactggcaggcggtaatgaattggactcaacaagttcgctctctcccttcaaaaaaatcatatgtccacagtgtcattggaaatccaattgctacagattggccagtaagccaatcatctttatctgtcctcactgtaaccacaaaatagacgaagtaaaggaaagagaagacgccattgaagcaaaacaaccggcacagccttcgcagtcggagaaggaaaaaacaaaatga

SEQ ID NO: 5228 - DNA, 837 bp, Artificial Sequence
  Description of Artificial Sequence: Synthetic polynucleotide
atgtttagtgcattaggtaaatgggtcagaggctctcgcaatgataaggactttgtgacgaagtataccgcagatttatctcaaataacttctcagatccatcaattagatgtcgcgttaaagaaaagccaatccatcttgagtcaatggcaaagcaatttgaccttttatggtattgcgttaacggtattggccttgagctacacatattgggagtaccatggttataggccataccttgtggtgactgcgttattatgcataggctccttaatcttgttcaaatgggcattaaccaaactctatgcattttataacaacaataggttacgcaagttggcaaaactccgtgcaattcatcaaaagaaattagaaaagttaaaggaagagacccactataatgctacaagctctatcatccaaagattttcttccggtgaagatcaaaacgacgatgccatggtacttttagatgatgaattaaatgctaaataccaagaattaaacaatttgaagacagagttagaaaaatttaagaaggaaagccatgtaaagggcttgaagaaggaagacagcgatgcatggttcgacaaaatcatcagcgtattggcaggcggtaatgaattggactctacaagtagcctctctcccttcaaaaaaatcatatgtccacagtgtcattggaaatccaattgctacagattggccagtaagccaatcatctttatctgtcctcactgtaaccacaaaatagacgaagtaaaggaaagagaagacgccattgaagcaaaacaaccggcacagccttctcagtctgagaaggaaaaaacaaaatga

SEQ ID NO: 5229 - DNA, 525 bp, Saccharomyces cerevisiae
atgtctgctatcccagaaaacgccaacgttaccgtcttaaacaagaacgaaaagaaagccagagaattgattggcaaattgggtttgaagcaaatcccaggtatcatcagagtcactttcaggaagaaggacaaccaaatctatgctattgaaaagccagaagtcttcagatctgccggtggtaactacgttgtcttcggtgaagctaaggttgacaactttacccaaaagctagccgctgctcaacaacaagctcaagctagcggtattatgccatctaacgaagacgtcgctaccaagtccccagaagacatccaagctgacatgcaagccgccgcagaaggcagtgtcaacgccgcagcagaagaagatgacgaagaaggtgaagttgatgccggtgacttgaataaggatgatatcgagttagtcgttcaacaaactaacgtttccaaaaaccaagccatcaaagccctgaaagctcacaatggtgacttagtcaacgctatcatgtccttgtctaaataa

SEQ ID NO: 5230 - DNA, 525 bp, Artificial Sequence
  Description of Artificial Sequence: Synthetic polynucleotide
atgtctgctatcccagaaaacgccaacgttaccgtcttaaacaagaacgaaaagaaagccagagaattgattggcaaattgggtttgaagcaaatcccaggtatcatcagagtcactttcaggaagaaggacaaccaaatctatgctattgaaaagccagaagtcttcagatctgccggtggtaactacgttgtcttcggtgaagctaaggttgacaactttacccaaaagttggccgctgctcaacaacaagctcaagctagcggtattatgccatctaacgaagacgtcgctaccaagtccccagaagacatccaagctgacatgcaagccgccgcagaaggcagtgtcaacgccgcagcagaagaagatgacgaagaaggtgaagttgatgccggtgacttgaataaggatgatatcgagttagtcgttcaacaaactaacgtttccaaaaaccaagccatcaaagccttgaaagctcacaatggtgacttagtcaacgctatcatgtccttgtctaaatga

SEQ ID NO: 5231 - DNA, 1740 bp, Saccharomyces cerevisiae
atgtccctttttaccaggccttttctaaggagcccccggcagttttctgtagcaaggtatgtgtattgggctagaagccctgcccttcgaagtaacttgagaataccgtcaatagcagcggcatcgctaagagcatattctaatgagtctaaaactggaagggatgctcctcccgacaaaaaatcaaaaaagctatcaaacctgaaatacattactgaaagggattccctgctggtgcagaccaacaatatttttactaagctcaaaataaacatacgatggttcttgaaaaagtccacccggccgttcaattcagacgatataagtgcgttcatctcatggatcctcgtgagcaacattttcatattcatcttctggacaaccacctttgtatctttgatcctttacttaatcaataccgtgtttgcacaagaatacctcgcaagcaagattggtaaatttattactaagaatgagtcgttgtcaatcgttttcgagagtgccattgtaccagactggtcgtctgggaaaatcagctttcaaaaagtcttcgtctccaggagaccaaaggtctcgcgcggctttaccaagggttcacagcaggatgccctgcaaagggcgaagttggcccttagtgagagaatattggttaaccaacaggactttgataatggcaattatacacagtttgatctgaccattgaccaagtcgacatatcgttgaatttcagaaagtggataaatgggaagggtatcctagacgaagtgaccataaatgggcttagaggagtcatagacagaacacacgtggtgtggaaaaaggacgacgatcctaagaactatctgaacgtctaccagccgggcgactttgaaatatcaaaattcaccatgaacgatgtcctttgtacactgtaccagccaaatgggttcaggccattccaggtgagtatatttaattgcgatctaccgcaattgagaaaacattggttgttctacgatatcttgaatgcgaacaatatcaatgggacctacgacaattcaatgttcactatccacaagaagttcagaaccgatgatcagcatcaggaccccacgctgctatggaagcaaatgacaaggtttagggtagacaatctcgacatcgatcacctgaacgccggtatcgaaggaccctttggatggatcaacgaaggtcgcgtgaacatgattggcgacgttcttttaccagatgacgatgccgcgtctgactcgctgcaactgacagaaatcctcacagagatcggtgaccgcttaatcaaaaaagcgaaaaggtacacttcatcccttcctctggttgggccaggattctccccggccgttgatgaaattgacccgaacgactactttattatggacttttctttaagactatacaatgtcaaagccgaagtccctctgttcacttctggcttaacgtatatcaatagtgcattgataaggcctattgtcgggtacatcaattctcacaggacatacatcccaatcaaatgccgcattgtaaagaaaaagtctgattttgagggctcctggaccatatatgattcataccttatgcgggatctaagtgcggaagcgtacgatgccttcgccgactacgtcgctgacgatgaaaagaggacattacgcttgagaagggtgggcttttggtcactgcaacttatactccaggtgattttgatgagtctcggtgctatcgcgtga

SEQ ID NO: 5232 - DNA, 1740 bp, Artificial Sequence
  Description of Artificial Sequence: Synthetic polynucleotide
atgtccctttttaccaggccttttttaaggagccccagacagttttctgtagcaaggtatgtgtattgggctagaagccctgcccttaggagtaacttgagaataccgagcatagcagcggcatctttgagagcatattctaatgagtctaaaactggaagggatgctcctcccgacaaaaaatctaaaaagttatctaacttgaaatacattactgaaagggattccttattggtgcagaccaacaatatttttactaagctcaaaataaacataagatggttcttgaaaaagtccacccgtccgttcaatagtgacgatataagtgcgttcatcagttggatcctcgtgagcaacattttcatattcatcttctggacaaccacctttgtatctttgatcctttacttaatcaataccgtgtttgcacaagaatacctcgcaagcaagattggtaaatttattactaagaatgagtctttgtccatcgttttcgagagtgccattgtaccagactggtcttctgggaaaatcagctttcaaaaagtcttcgtctccaggagaccaaaggtctctcgcggctttaccaagggttctcagcaggatgccttgcaaagggcgaagttggcccttagtgagagaatattggttaaccaacaggactttgataatggcaattatacacagtttgatttgaccattgaccaagtcgacatatctttgaatttcagaaagtggataaatgggaagggtatcttggacgaagtgaccataaatgggcttagaggagtcatagacagaacacacgtggtgtggaaaaaggacgacgatcctaagaactatttgaacgtctaccagccgggcgactttgaaatatccaaattcaccatgaacgatgtcctttgtacattgtaccagccaaatgggttcaggccattccaggtgagtatatttaattgcgatttaccgcaattgagaaaacattggttgttctacgatatcttgaatgcgaacaatatcaatgggacctacgacaattctatgttcactatccacaagaagttcagaaccgatgatcagcatcaggaccccacgttattatggaagcaaatgacaaggtttagggtagacaatctcgacatcgatcacttgaacgccggtatcgaaggaccctttggatggatcaacgaaggtcgcgtgaacatgattggcgacgttcttttaccagatgacgatgccgcgtctgactctttacaattgacagaaatcctcacagagatcggtgaccgcttaatcaaaaaagcgaaaaggtacacttcttcccttcctttggttgggccaggattctccccggccgttgatgaaattgacccgaacgactactttattatggacttttctttaagattatacaatgtcaaagccgaagtccctcttttcacttctggcttaacgtatatcaatagtgcattgataaggcctattgtcgggtacatcaattctcacaggacatacatcccaatcaaatgccgcattgtaaagaaaaagtctgattttgagggctcctggaccatatatgattcttaccttatgagagatttgagtgcggaagcgtacgatgccttcgccgactacgtcgctgacgatgaaaagaggacattacgcttgagaagggtgggcttttggtctttacaacttatactccaggtgattttgatgagtctcggtgctatcgcgtga

SEQ ID NO: 5233 - DNA, 966 bp, Saccharomyces cerevisiae
atgactcgtcccccattggttcgtggaatcttttcgttaggtctttctgtagccgttttgaaaggtgttgaaaaaacagttcgtaagcatttggaaagacagggatggatagagccccagaaagtggactatgagttaattttcactatagataggttgaaaaacttggtagataataagcgtgaggctttaactgcggaacaacccgacgctggtgaactgagctggcgtaaagtatttaatttcatttccagacaatccagcgaattggacacacgaatatacgttcttatactactcctatcctttctactacctatcgcgtggactgtactggacggtgatcgcgagaccacgctagaagataaggataacgattgtaatgtagatcttattgaaaacgaaaggaggctgaagcattacaacgatggtgaaagagcagtattgcaatttggtaaaaatagatccgaacctattatattaagctataaggacatgaacgttttggaaggggaacatgagtttacctccaaagaggaacacagtaacagccatttgacaagcaagagcgaaaatgcactaaaccaagtagggagtgaagatttgttaggttgtcacctggaaaagcaattggaagaagacaaaaatgaaccgaatggagaagcagacggtgaggatgataataaccgggaaaaggattgcagctccagttcagaagttgagtcgcagagtaaatgccgaaaggaaagtactgcagagcctgactctctctcacgggataccagaacaacctcttcccttaaatcaagtacatcattccccatatcattcaagggctcgatagaccttaagtcgttaaaccagccttcatcattgttgcatatacaagtatctcccacaaaatctagtaatctagatgcacaagtgaacactgaacaagcatactctcaaccatttagatactaa

SEQ ID NO: 5234 - DNA, 966 bp, Artificial Sequence
  Description of Artificial Sequence: Synthetic polynucleotide
atgactcgtcccccattggttcgtggaatcttttctttaggtctttctgtagccgttttgaaaggtgttgaaaaaacagttcgtaagcatttggaaagacagggatggatagagccccagaaagtggactatgagttaattttcactatagataggttgaaaaacttggtagataataagcgtgaggctttaactgcggaacaacccgacgctggtgaattgagctggcgtaaagtatttaatttcatttccagacaatccagcgaattggacacaagaatatacgttcttatattactcttatcctttttattgcctatcgcgtggactgtattggacggtgatcgcgagaccacgttagaagataaggataacgattgtaatgtagatcttattgaaaacgaaaggaggttaaagcattacaacgatggtgaaagagcagtattgcaatttggtaaaaatagatccgaacctattatattaagctataaggacatgaacgttttggaaggggaacatgagtttacctccaaagaggaacacagtaacagccatttgacaagcaagagcgaaaatgcattgaaccaagtagggagtgaagatttgttaggttgtcacttggaaaagcaattggaagaagacaaaaatgaaccgaatggagaagcagacggtgaggatgataataacagagaaaaggattgcagctccagttctgaagttgagagccagagtaaatgcagaaaggaaagtactgcagagcctgactctctctccagagataccagaacaacctcttcccttaaatctagtacatctttccccatatctttcaagggctctatagaccttaagtctttaaaccagccttcttctttgttgcatatacaagtatctcccacaaaatctagtaatttggatgcacaagtgaacactgaacaagcatactctcaaccatttagatactga

SEQ ID NO: 5235 - DNA, 1728 bp, Saccharomyces cerevisiae
atgggctcctctttggatttggtggcgagcttctcgcatgattccactcgttttgcattccaagcaagcgtcgcacaaaagaacaatgtggatatttatccattaaatgaaactaaggattatgtggtcaatagttcattagtgagtcatattgactatgagacaaacgatatgaaggtttcagatgtaatcttctttgggtggtgtagtgatttgatagatacgcagtcatccaatatcaaaagaaaattagatgaagatgaaggaactggtgaatcaagtgagcaaagatgtgaaaactttttcgttaacggatttcctgacggaagaattgttgtttactcttctaatggtaaggatatagttaatatcatcaagaataaaaaagagattttgggagcagacacagacgagtctgatatatggattttggatagtgataaagtcgttaagaaattacagtataacaattcgaaacctctaaagacttttacgctagttgatggtaaagatgacgaaatagttcatttccaaattttgcaccaaaatggcactttattggtatgcattattactaaacagatggtttatattgttgatccatcaaagagaagaccctctactaagtatagttttgaaatatcagacgctgtagcatgtgaattttcttcagacggtaagtatctgttaattgccaacaacgaagaattaatagcttacgacttgaaggaagattcaaagctgatccaatcatggcctgtccaagtgaagacattgaaaactttagatgatttgataatggctttgactactgatggtaaaattaataattataagattggcgaagccgacaaagtttgttctatagttgtaaatgaagatttggaaattatagatttcacgccaataaacagcaagcaacaggttctaatttcatggctaaatgtcaatgaacccaactttgaatctatttctttaaaagaaattgaaactcaggggtatattacaataaacaaaaatgaaaaaaataatgctgatgaagcggaccaaaagaaattagaagagaaagaagaagaagctcagcctgaagttcaacatgagaagaaggagactgaaactaagataaacaagaaagttagtaaatcagatcaagttgaaattgctaatattctctcatcgcatttagaagctaattcaacagaaatattggatgatctgatgtctggaagttggacagaaccagagattaaaaaattcatcttaaccaagatcaatacagtagatcatctaagtaagatatttttgactatatcaaagtcaataacacaaaatccatggaatgaagaaaatttacttccgttgtggcttaagtggttgctgactttgaaaagtggggagttaaattctataaaggataaacatacaaagaaaaattgcaagcatttaaaatctgcattaagatcttcagaggagatcttgcctgttctactcggtatacaaggtagattagaaatgttgaggaggcaagcaaaattgagagaggatcttgcacaactatctatgcaagagggtgaagatgatgaaatagaagttatagagcattcaaatgtaattagtaatcctttgcaggatcaagcatcgcctgttgaaaagcttgaaccagattcaattgtttatgcaaatggagaaagtgacgaatttgtcgacgcatcggaatacaaagattga

SEQ ID NO: 5236 - DNA, 1728 bp, Artificial Sequence
  Description of Artificial Sequence: Synthetic polynucleotide
atgggctcctctttggatttggtggcgagcttctctcatgattccactcgttttgcattccaagcaagcgtcgcacaaaagaacaatgtggatatttatccattaaatgaaactaaggattatgtggtcaatagttctttagtgagtcatattgactatgagacaaacgatatgaaggtttctgatgtaatcttctttgggtggtgtagtgatttgatagatacgcagtcttccaatatcaaaagaaaattagatgaagatgaaggaactggtgaaagtagtgagcaaagatgtgaaaactttttcgttaacggatttcctgacggaagaattgttgtttactcttctaatggtaaggatatagttaatatcatcaagaataaaaaagagattttgggagcagacacagacgagtctgatatatggattttggatagtgataaagtcgttaagaaattacagtataacaattctaaacctttgaagacttttacgttagttgatggtaaagatgacgaaatagttcatttccaaattttgcaccaaaatggcactttattggtatgcattattactaaacagatggtttatattgttgatccatctaagagaagaccctctactaagtatagttttgaaatatctgacgctgtagcatgtgaattttcttctgacggtaagtatcttttaattgccaacaacgaagaattaatagcttacgacttgaaggaagattctaagttaatccaaagttggcctgtccaagtgaagacattgaaaactttagatgatttgataatggctttgactactgatggtaaaattaataattataagattggcgaagccgacaaagtttgttctatagttgtaaatgaagatttggaaattatagatttcacgccaataaacagcaagcaacaggttttgatttcttggttaaatgtcaatgaacccaactttgaatctatttctttaaaagaaattgaaactcaggggtatattacaataaacaaaaatgaaaaaaataatgctgatgaagcggaccaaaagaaattagaagagaaagaagaagaagctcagcctgaagttcaacatgagaagaaggagactgaaactaagataaacaagaaagttagtaaatctgatcaagttgaaattgctaatattctctcttctcatttagaagctaattctacagaaatattggatgatttgatgtctggaagttggacagaaccagagattaaaaaattcatcttaaccaagatcaatacagtagatcatttgagtaagatatttttgactatatccaagagtataacacaaaatccatggaatgaagaaaatttacttccgttgtggcttaagtggttgttgactttgaaaagtggggagttaaattctataaaggataaacatacaaagaaaaattgcaagcatttaaaatctgcattaagatcttctgaggagatcttgcctgttttactcggtatacaaggtagattagaaatgttgaggaggcaagcaaaattgagagaggatcttgcacaattatctatgcaagagggtgaagatgatgaaatagaagttatagagcattctaatgtaattagtaatcctttgcaggatcaagcatctcctgttgaaaagcttgaaccagattctattgtttatgcaaatggagaaagtgacgaatttgtcgacgcatctgaatacaaagattga

SEQ ID NO: 5237 - DNA, 2292 bp, Saccharomyces cerevisiae
atgtcagaggaatttatcgcagtttctactttggctagaaacctggaaattgccaagggtaatgagtttcataccattttggcgactttaagatcaccagtttatatcaatgaacagctgctaaaatccgaattgagcttccttgttacaaaaatcctaaaacttatcagatcaggcaatgactttgatctttggaaaggatgtcacacctctgttgtgacttgcgcctataatccactggtcttatcgactcatggaggtcaattgcttgctgccatttattccagattggaacagaagacgggtttctattcttcggttatttcttcatcacatggaaagcagctattcaatacccttatttcttctgtagcgattatcattgatttaatgaagaataaacctacgttatcgagagaagcactggttcccaaattaaaggctatcattccaacgttaattacattgtctcaatacgagcccgaacttgttctaccagtactacagaggatattgaagagaaacactacaacatttaagccatttaccaacaaattccgcactgtgttaatcaatttaatcatatcagactatgcttctttaggcactaagacgcagaggcttgtttgcgaaaactttgcttatttgcatttgctgaaaattcaggttagtgatactagcgatgacgaaactcaagcacatcacaaaatatatgctgattctaattggagaacaggattaatgtccatcttatcacaattcaagcccataattcaattatgtggagaaatcttggattttgaacaagataatgagctgtataaactaattaaaagtttaccggttatcgatgaatccaataacaaagaagaatttttaccctcattgaaattagacttcaacgcacctttaactttatgggaaattccacaacgtttgtccttattggctgacatgcttgttgctttcatctctttaccaactccctttcccattcgagttccgctgggtggtattaattccctttgtgaagttttgttgggagttagtaacaaatatttaccgttaaaaaaagaattgcgtcatgataatgaactaaatggggtcatcaataccatcttacctcaaatacaatttcaaggcattaggttatgggaaattatggtttcaaaatatggcaaatgcggtttatcatttttcgaaggaatcctttcttccattgaacttttcattccattaaaaaagaaaagtaacaatgaaattgattttaatgttgttgggtctttaaaatttgagtttgctactgttttcagattggtaaatatgattttgtctcatttaggccaccaactgaacataatcagcgtcatatcccaattaatcgaagtggcgttgttcttatctcatgataaaacattgattgattctttattcaaaaatcgtaaaagcatcatgaaacaacagactaaaacaaaacaatcaaagaggagtaaaagtgccgaaggtgcattttctgatatttatacgcacccagagctatttgtgtgtaaaaattccatgaattggttcaatgaaatcaatgatttttttattactgcactaaataattggattttgccttcaactccacatattcaaattttgaaatatagtatcacgcaatctttaagattaaaggaaagatttggttatattccagaaagctttgttaatctcctgcgttgcgaggttcttcacccaggtagtgaacgtgtttcaattttaccgattgcaatatcactattaaagaatatcaatgatgatatgtttgaattactgtgtcatccaaaagtgccagtcggtatggtgtaccagttgcacaaacctttggacttaggcgaagacggggaagtaagggatgatatcaacaagaaggaggttgaaacgaacgaatcatcctcaaacgccaatactggcctggagactttaaaagcgttagaaaatttggaaaatgttacaatccctgaacccaaacacgaagtcccaaaggtcgtcgatgatactgccatattcaagaaaaggtcagtagaagaagtcattgaaagagagtctacatcttcacataagaaagtgaaattcgttgaagaaacaaccgtggataatggcgaagaattgattgtaaaaaaagctgtaagccaaactaaggaagaagagaagccaatggaggacagtgaagatgaagaacaggaggagtttgaaattcccgctatcgaattaagtgatgacgaagaggaggaggaagaagaagaataa

SEQ ID NO: 5238 - DNA, 2292 bp, Artificial Sequence
  Description of Artificial Sequence: Synthetic polynucleotide
atgtctgaggaatttatcgcagtttctactttggctagaaacttggaaattgccaagggtaatgagtttcataccattttggcgactttaagatctccagtttatatcaatgaacagttgttgaaatccgaattgagcttccttgttacaaaaatcttgaaacttatcagaagcggcaatgactttgatctttggaaaggatgtcacacctctgttgtgacttgcgcctataatccattagtcttatctactcatggaggtcaattgcttgctgccatttattccagattggaacagaagacgggtttctattcttctgttatttcttcttctcatggaaagcagttattcaatacccttatttcttctgtagcgattatcattgatttaatgaagaataaacctacgttatctagagaagcattggttcccaaattaaaggctatcattccaacgttaattacattgtctcaatacgagcccgaacttgttttgccagtattacagaggatattgaagagaaacactacaacatttaagccatttaccaacaaattccgcactgtgttaatcaatttaatcatatctgactatgcttctttaggcactaagacgcagaggcttgtttgcgaaaactttgcttatttgcatttgttgaaaattcaggttagtgatactagcgatgacgaaactcaagcacatcacaaaatatatgctgattctaattggagaacaggattaatgtccatcttatctcaattcaagcccataattcaattatgtggagaaatcttggattttgaacaagataatgagttgtataaattgattaaaagtttaccggttatcgatgaatccaataacaaagaagaatttttaccctctttgaaattagacttcaacgcacctttaactttatgggaaattccacaacgtttgtccttattggctgacatgcttgttgctttcatctctttaccaactccctttcccattagagttccgttgggtggtattaattccctttgtgaagttttgttgggagttagtaacaaatatttaccgttaaaaaaagaattgcgtcatgataatgaattgaatggggtcatcaataccatcttacctcaaatacaatttcaaggcattaggttatgggaaattatggtttccaaatatggcaaatgcggtttatcttttttcgaaggaatcctttcttccattgaacttttcattccattaaaaaagaaaagtaacaatgaaattgattttaatgttgttgggtctttaaaatttgagtttgctactgttttcagattggtaaatatgattttgtctcatttaggccaccaattgaacataatcagcgtcatatcccaattaatcgaagtggcgttgttcttatctcatgataaaacattgattgattctttattcaaaaatcgtaaaagcatcatgaaacaacagactaaaacaaaacaatccaagaggagtaaaagtgccgaaggtgcattttctgatatttatacgcacccagagttatttgtgtgtaaaaattccatgaattggttcaatgaaatcaatgatttttttattactgcattgaataattggattttgccttccactccacatattcaaattttgaaatatagtatcacgcaatctttaagattaaaggaaagatttggttatattccagaaagctttgttaatctcttacgttgcgaggttcttcacccaggtagtgaacgtgtttctattttaccgattgcaatatctttattaaagaatatcaatgatgatatgtttgaattattatgtcatccaaaagtgccagtcggtatggtgtaccagttgcacaaacctttggacttaggcgaagacggggaagtaagggatgatatcaacaagaaggaggttgaaacgaacgaatcttccagtaacgccaatactggcttagagactttaaaagcgttagaaaatttggaaaatgttacaatccctgaacccaaacacgaagtcccaaaggtcgtcgatgatactgccatattcaagaaaaggtctgtagaagaagtcattgaaagagagtctacatcttctcataagaaagtgaaattcgttgaagaaacaaccgtggataatggcgaagaattgattgtaaaaaaagctgtaagccaaactaaggaagaagagaagccaatggaggacagtgaagatgaagaacaggaggagtttgaaattcccgctatcgaattaagtgatgacgaagaggaggaggaagaagaagaatga

SEQ ID NO: 5239 - DNA, 966 bp, Saccharomyces cerevisiae
atggacagaggaaggtgcgccaatatgctaaaatcactccagcgaacactagctaaatgtcagaaatctccatcaaccaaccattggcaatgtttcaaaagaaattttactagtatacgagccactaaataccctgggcgttctaattcgacgttccactattggccctggtttgcggcgtcaacattgctcgctacttcgttatactaccgtgatcgtccggtacaaaatgacgataaaactgatgcttttccttctcatactgaatcgatacaggtagactctagcgtatcagatttcccactaacgattactgctttaaatttccctgtctctacaacttttaaattactgggatatggtcaaaggcacgtcacgtttttgaggttcaaggtctatgccttgggtctttatctagctgaaaatgacgaaaaccttgtttcagacactctaaatgaaacttatttacataaatatttccttgatgtggatgattctaagactcctaaggagaatctagctagattattgaaacgtgatgactcaaaatccgttatgatgattgatgacttactggattctggaatgagaatgctagccaagataactcccgtaaggaatacagattttaagcatcttaaggagggcctggtcaaaactatttctaaacatcccgatgtggccaataataaagacacactggcgaagggcctaagtgagttaaatgatgccttttcacgtaagggatccgtcaggaaaaatgacgatttgatcatcgaattattagccaacggcgctttacaattttcatatcatgacagtaaaaacaacgaatttgaggtcatgggagtagttaataatcaactcgtcggaaaattcttatttagccaatatttatgtggcgaaaaatctccttctccacaagccaaaaaaacagctatcgacaaattgatcacactcctctaa

SEQ ID NO: 5240 - DNA, 966 bp, Artificial Sequence
  Description of Artificial Sequence: Synthetic polynucleotide
atggacagaggaaggtgcgccaatatgttgaaatctctccagagaacattggctaaatgtcagaaatctccatctaccaaccattggcaatgtttcaaaagaaattttactagtataagagccactaaataccctgggcgttctaattctacgttccactattggccctggtttgcggcgtctacattgctcgctacttctttatactaccgtgatcgtccggtacaaaatgacgataaaactgatgcttttccttctcatactgaaagtatacaggtagactctagcgtatctgatttcccattaacgattactgctttaaatttccctgtctctacaacttttaaattattaggatatggtcaaaggcacgtcacgtttttgaggttcaaggtctatgccttgggtctttatttggctgaaaatgacgaaaaccttgtttctgacactttgaatgaaacttatttacataaatatttccttgatgtggatgattctaagactcctaaggagaatttggctagattattgaaacgtgatgactctaaatccgttatgatgattgatgacttattagattctggaatgagaatgttggccaagataactcccgtaaggaatacagattttaagcatcttaaggagggccttgtcaaaactatttctaaacatcccgatgtggccaataataaagacacattagcgaagggcttaagtgagttaaatgatgccttttctcgtaagggatccgtcaggaaaaatgacgatttgatcatcgaattattagccaacggcgctttacaattttcttatcatgacagtaaaaacaacgaatttgaggtcatgggagtagttaataatcaactcgtcggaaaattcttatttagccaatatttatgtggcgaaaaatctccttctccacaagccaaaaaaacagctatcgacaaattgatcacactcctctga

SEQ ID NO: 5241 - DNA, 933 bp, Saccharomyces cerevisiae
atgcgtttaatcagtaaagttttggtgaaaacaaattgcctagaggtaggtatgaggagggccccacaatggtattctcactactctactacagcgggcaatgctcgtgtgaacaagaagggcagcaaagtagtgcctgtgttaacagggttagcactggcatccatattcgcgaagaaatggtatgacgattcccagatcaaaaaggcggatgccaccagcgttgcagtggacgcatccatctctgcgttccctaagaagatgggccccccacagtggcccttctccacgcaatatgagctgattggtaagggtgtacgttgtgtctcatcgatcactttcaaagcatatggtctgggcatatatgtggccgctgaagacaaacatctggtctctgaagtactggactcaaagttcctgtctcaggcgttcatcgacactgcggcacccccatcaccggaaaactcacatcaggataatttgcgtgcggctttgaacgatcctgctaaggcccctatcctgattaataacctcttagacagcggaatcagactaatgtccaagaatactccgataaaagcaggttccttcaagttattgatggacggcaccaaaaagagcgtcctaaagaacccagattctcagtctcaagacaaagaccggctggaagctggattccaagaattgcatgactgtttcaggagcgtaaaaggacttgtggctcgagatgatgattttttcattgagctgaataaggactgctctatgaatttgtcttactacgcaagaaagaaggatgaatttgtgatattgggcacagtgaaggaaccccttattggaaagctcttatttgcccactacctagctgctgtggatcctccttctccggaggctaggaaggaagtaatcgatgcactcgtctctctatcttag

SEQ ID NO: 5242 - DNA, 933 bp, Artificial Sequence
  Description of Artificial Sequence: Synthetic polynucleotide
atgcgtttaatcagtaaagttttggtgaaaacaaattgcttagaggtaggtatgaggagggccccacaatggtattctcactactctactacagcgggcaatgctcgtgtgaacaagaagggcagcaaagtagtgcctgtgttaacagggttagcattggcatccatattcgcgaagaaatggtatgacgattcccagatcaaaaaggcggatgccaccagcgttgcagtggacgcatccatctctgcgttccctaagaagatgggccccccacagtggcccttctccacgcaatatgagttgattggtaagggtgtacgttgtgtctcttctatcactttcaaagcatatggtcttggcatatatgtggccgctgaagacaaacatttggtctctgaagtattggactccaagttcttatctcaggcgttcatcgacactgcggcacccccatctccggaaaactctcatcaggataatttgcgtgcggctttgaacgatcctgctaaggcccctatcttgattaataacctcttagacagcggaatcagattaatgtccaagaatactccgataaaagcaggttccttcaagttattgatggacggcaccaaaaagagcgtcttgaagaacccagattctcagtctcaagacaaagacagattagaagctggattccaagaattgcatgactgtttcaggagcgtaaaaggacttgtggctagagatgatgattttttcattgagttgaataaggactgctctatgaatttgtcttactacgcaagaaagaaggatgaatttgtgatattgggcacagtgaaggaaccccttattggaaagctcttatttgcccactacttggctgctgtggatcctccttctccggaggctaggaaggaagtaatcgatgcactcgtctctttatcttga

SEQ ID NO: 5243 - DNA, 222 bp, Saccharomyces cerevisiae
atgataccggctctcactcccgaagaacggcagaagttgcgcagcgcaatactacatcgaatgcagctggaactggaaacaacagaaaaactgatcgaaaatattaaagaggagacgttaaagaaactaaatctgctccagcagcctgatgcaacatcagcgcctcaatcaaaggaactaatcagagaggtgcttgaacaggaaggacgccgtatagaatga

SEQ ID NO: 5244 - DNA, 222 bp, Artificial Sequence
  Description of Artificial Sequence: Synthetic polynucleotide
atgataccggctctcactcccgaagaaagacagaagttgcgcagcgcaatattacatagaatgcagttagaattggaaacaacagaaaaattaatcgaaaatattaaagaggagacgttaaagaaattgaatttactccagcagcctgatgcaacatctgcgcctcaatccaaggaattgatcagagaggtgcttgaacaggaaggacgccgtatagaatga

SEQ ID NO: 5245 - DNA, 807 bp, Saccharomyces cerevisiae
atggtattggaagctacagtgttagtgattgataattcagagtactctcgcaatggcgactttcctaggacaaggtttgaagcccagatcgactcggtagagttcatatttcaagccaagagaaacagcaatcctgagaatacagtgggtcttatctctggtgctggcgccaaccccagggtgttatctacgtttaccgccgagtttgggaagattcttgctggactacacgacacgcagatcgagggtaagctgcatatggccactgcgttgcagatcgctcagctgactttgaagcatcgccagaataaggtccaacatcaaaggattgtggcatttgtgtgtagcccaataagtgattctcgagacgaattgatcagattggcaaaaacactgaaaaagaataatgttgccgtggacatcatcaattttggagagattgaacagaacacggagcttttggatgagttcatagctgcagtgaacaaccctcaagaagaaactagtcatttgcttactgtgacgcctggccccagactgctgtacgagaacatcgcatcttcacccataattctcgaagaaggatcctccggtatgggcgcctttggtgggtctggcggtgattccgatgccaatggcacatttatggacttcggggtagacccatcaatggacccagaactggcaatggccttgcgtctgtctatggaagaagagcagcaaagacaggaaaggttaagacagcagcaacaacaacaagatcagcctgagcagtctgaacagcctgaacaacaccaagacaaatag

SEQ ID NO: 5246 - DNA, 807 bp, Artificial Sequence
  Description of Artificial Sequence: Synthetic polynucleotide
atggtattggaagctacagtgttagtgattgataattctgagtactctcgcaatggcgactttcctaggacaaggtttgaagcccagatcgactctgtagagttcatatttcaagccaagagaaacagcaatcctgagaatacagtgggtcttatctctggtgctggcgccaaccccagggtgttatctacgtttaccgccgagtttgggaagattcttgctggattgcacgacacgcagatcgagggtaagttgcatatggccactgcgttgcagatcgctcagttgactttgaagcatcgccagaataaggtccaacatcaaaggattgtggcatttgtgtgtagcccaataagtgattctagagacgaattgatcagattggcaaaaacattaaaaaagaataatgttgccgtggacatcatcaattttggagagattgaacagaacacggagcttttggatgagttcatagctgcagtgaacaaccctcaagaagaaactagtcatttgcttactgtgacgcctggccccagattattgtacgagaacatcgcatcttctcccataattctcgaagaaggatcctccggtatgggcgcctttggtgggtctggcggtgattccgatgccaatggcacatttatggacttcggggtagacccaagcatggacccagaattggcaatggccttgcgtttatctatggaagaagagcagcaaagacaggaaaggttaagacagcagcaacaacaacaagatcagcctgagcagtctgaacagcctgaacaacaccaagacaaatga

SEQ ID NO: 5247 - DNA, 1194 bp, Saccharomyces cerevisiae
atgtcgcctttgagaaagacggttcctgaatttttggcacacttaaaatcactgccaatttcaaaaattgcaagcaacgatgtgttaacaatatgtgttggtaacgagtcagcagatatggactcaattgctagtgcaatcacttattcgtactgccaatacatatataatgaaggtacttactcggaggagaaaaagaaaggaagctttattgtcccaattatcgacattcctagagaagacctcagtttaagaagagacgtaatgtatgtcctagaaaaactgaaaattaaggaggaggaattattcttcattgaagatttaaagagcttgaagcaaaatgtctcccagggtactgaattaaactcttacttggtagataataacgatacaccaaagaatttgaaaaattatatagataacgtcgttggcattatagaccaccattttgacttgcaaaaacatttggatgctgaacctcggattgtaaaagtgtccggcagttgctcatcgctggtttttaactactggtatgaaaaattgcaaggtgaccgtgaagtggtgatgaacattgcaccacttttgatgggggccatcttaatagacacttcaaatatgaggcgcaaagtcgaggaaagtgataaattagctatcgagagatgccaagctgttcttagtggtgcggttaatgaagtgtctgcgcaaggtttagaggacagcagtgagttttataaagagataaaatcaagaaagaacgatattaaaggattttcggtaagcgatattctaaagaaggactacaaacaattcaatttccaaggaaagggacacaaagggttagagattggtctttcatcaatagtaaaaagaatgtcttggctattcaatgaacacggtggtgaagcagatttcgtcaaccaatgcagaagatttcaggcggagagggggctcgatgtattggttctgttgacttcatggaggaaagctggtgattcacacagagaattggtcatattgggagactctaacgtggtacgtgaactcattgaaagggttagcgacaagctccaacttcaattatttgggggcaatcttgatggaggtgtggcgatgtttaagcaactgaacgtcgaggccaccagaaagcaagtcgtcccctatttagaggaagcgtactcaaacctggaagagtga

SEQ ID NO: 5248 - DNA, 1194 bp, Artificial Sequence
  Description of Artificial Sequence: Synthetic polynucleotide
atgtctcctttgagaaagacggttcctgaatttttggcacacttaaaatctttaccaatttccaaaattgcaagcaacgatgtgttaacaatatgtgttggtaacgagtctgcagatatggacagtattgctagtgcaatcacttattcttactgccaatacatatataatgaaggtacttactctgaggagaaaaagaaaggaagctttattgtcccaattatcgacattcctagagaagacctcagtttaagaagagacgtaatgtatgtcttggaaaaattgaaaattaaggaggaggaattattcttcattgaagatttaaagagcttgaagcaaaatgtctcccagggtactgaattaaactcttacttggtagataataacgatacaccaaagaatttgaaaaattatatagataacgtcgttggcattatagaccaccattttgacttgcaaaaacatttggatgctgaacctagaattgtaaaagtgtccggcagttgcagttctttggtttttaactactggtatgaaaaattgcaaggtgaccgtgaagtggtgatgaacattgcaccacttttgatgggggccatcttaatagacacttccaatatgaggcgcaaagtcgaggaaagtgataaattagctatcgagagatgccaagctgttcttagtggtgcggttaatgaagtgtctgcgcaaggtttagaggacagcagtgagttttataaagagataaaatctagaaagaacgatattaaaggatttagcgtaagcgatattttgaagaaggactacaaacaattcaatttccaaggaaagggacacaaagggttagagattggtctttcttctatagtaaaaagaatgtcttggcttttcaatgaacacggtggtgaagcagatttcgtcaaccaatgcagaagatttcaggcggagagggggctcgatgtattggttttattgacttcttggaggaaagctggtgattctcacagagaattggtcatattgggagactctaacgtggtacgtgaactcattgaaagggttagcgacaagctccaacttcaattatttgggggcaatcttgatggaggtgtggcgatgtttaagcaattgaacgtcgaggccaccagaaagcaagtcgtcccctatttagaggaagcgtactctaacttggaagagtga

SEQ ID NO: 5249 - DNA, 1809 bp, Saccharomyces cerevisiae
atgatactaaagcttgtacactgtttagttgctcttacaggattaatctttgcaaagccgtatcaacaacaacaggcagttttagcgccgtcgcaggatgtaccattaagagatatccatataggggatataaattttatccatacaaccgatactcatggctggttggggtcccatctatcacaaaacgactatgatgctgactggggagatttcgttgcatttgtagatatacttagagaaaaaattttacgacagtccagagacgtaatagtcatcgacactggcgacaaacgagacggtaatggtttgagtgatgctacttggccccccggcctacgaagctcggagatattcaacatgatggattacgatcttttaacgttaggtaatcatgagctatatacagctgaaagtgccatactagagtatagaggaacttctcagtcctcaaaattcaaagacaaatatgtttgcagcaacgtagaatttattgaagatgacggaacaagggttcctttcgggaataaatacattacattcgagactcccataatgaaacaaagagtcctggcattatcatttttgtttagttttcaaagagcaaataacagagccatcgtaacaccaccattggaagaaataactcaaaaaagctggttccaaaatatggttgagacaaacagagaggaggaaatcgacctaattattgtctttggtcatttgcctgccactgaccctacagagcgtgaaatgcacaaaattcatgctctaataaggaaatactacccaaatactgttatacaatattttggagggcacactcatatcagggattttgtacagctggactcaaaatctacttgtttacaaagtggtagatttgcggaaactgtgggattcttgtcaattaatatgactgaccctgtggacgccgaaagtcctattttctcaagaaggtatattgactttaacaaggaagctttcaaataccatttgagcaaactagggcatgactcgaatgttccagtctcaacgaaaaagggtaaaactatttctcgtttggtgaatgatctgcgccatgaactaaatttgaacgagaaactggggtacattcctcaaacttactacgtttcaacaaggccattaaactccgaagagaatctttatcatttgatcacgcataagattttacccaatttaattcctcccaaaaactatgaaccttcgatgagtcgtttcattttgattaacactggctctgtcaggtacgatctttacaaaggcccatttacaaaggatactgagtatatagtgatgccattcaataatgattggcgcttcatcacagttccattggtcgttgcctccagggtggaaacctatttgaacaagggccctgtcattgcctcattaggaataccatcatcgtctcatcacaaacagcattttggcggttttcagaagtgtcccttcatcaataatccaaatttaagcgaaggctacaccacagaagacgatttcgggtgtcatggtgatgacacacctcacaattcacaaagagaatacgatatccccaatgtagtgcaatgtaaagaggtgaagaaagtgcaagaagaggaagctgatccgtcgaagatggttcatgttatcttctattcctttatggaactcgatatattaaacgccgtaaattctatcataaatgatttaggattacgtatggagaacttgaccaccaatgactgctcccattatggtggtgattcaaccaaaaagttattacgggattacttttctcaattttag

SEQ ID NO: 5250 - DNA, 1809 bp, Artificial Sequence
  Description of Artificial Sequence: Synthetic polynucleotide
atgatattgaagcttgtacactgtttagttgctcttacaggattaatctttgcaaagccgtatcaacaacaacaggcagttttagcgccgtctcaggatgtaccattaagagatatccatataggggatataaattttatccatacaaccgatactcatggctggttggggtcccatttatctcaaaacgactatgatgctgactggggagatttcgttgcatttgtagatatacttagagaaaaaattttaagacagtccagagacgtaatagtcatcgacactggcgacaaaagagacggtaatggtttgagtgatgctacttggccccccggccttagaagctctgagatattcaacatgatggattacgatcttttaacgttaggtaatcatgagttgtatacagctgaaagtgccatattggagtatagaggaacttctcagtcctctaaattcaaagacaaatatgtttgcagcaacgtagaatttattgaagatgacggaacaagggttcctttcgggaataaatacattacattcgagactcccataatgaaacaaagagtcttggcattatcttttttgtttagttttcaaagagcaaataacagagccatcgtaacaccaccattggaagaaataactcaaaaaagctggttccaaaatatggttgagacaaacagagaggaggaaatcgacttgattattgtctttggtcatttgcctgccactgaccctacagagcgtgaaatgcacaaaattcatgctttaataaggaaatactacccaaatactgttatacaatattttggagggcacactcatatcagggattttgtacagttagactctaaatctacttgtttacaaagtggtagatttgcggaaactgtgggattcttgtctattaatatgactgaccctgtggacgccgaaagtcctattttcagtagaaggtatattgactttaacaaggaagctttcaaataccatttgagcaaattggggcatgactctaatgttccagtctctacgaaaaagggtaaaactatttctcgtttggtgaatgatttacgccatgaattgaatttgaacgagaaattggggtacattcctcaaacttactacgtttctacaaggccattaaactccgaagagaatctttatcatttgatcacgcataagattttacccaatttaattcctcccaaaaactatgaaccttctatgagtcgtttcattttgattaacactggctctgtcaggtacgatctttacaaaggcccatttacaaaggatactgagtatatagtgatgccattcaataatgattggcgcttcatcacagttccattggtcgttgcctccagggtggaaacctatttgaacaagggccctgtcattgcctctttaggaataccatcttcttctcatcacaaacagcattttggcggttttcagaagtgtcccttcatcaataatccaaatttaagcgaaggctacaccacagaagacgatttcgggtgtcatggtgatgacacacctcacaattctcaaagagaatacgatatccccaatgtagtgcaatgtaaagaggtgaagaaagtgcaagaagaggaagctgatccgtccaagatggttcatgttatcttctattcctttatggaactcgatatattaaacgccgtaaattctatcataaatgatttaggattacgtatggagaacttgaccaccaatgactgctcccattatggtggtgattctaccaaaaagttattaagagattacttttctcaattttga

SEQ ID NO: 5251 - DNA, 786 bp, Saccharomyces cerevisiae
atggctagaggaccaaagaagcatctaaagagattagcagctccacaccattggttattggacaagttgtccggttgttacgccccaagaccatctgctggtccacacaaattgcgtgaatccttgccattgattgtctttctaagaaacagattaaagtatgctttgaacggccgtgaagtcaaggctatcttgatgcaacgtcacgtcaaagttgacggtaaggttagaactgacaccacctacccagctggtttcatggacgtcatcactctagatgccaccaatgaaaacttcagattggtctacgatgtcaagggtagattcgctgtccaccgtatcaccgatgaagaagcctcttacaaattgggtaaggtcaagaaggtccaattaggtaagaagggtgttccatacgttgttacccacgatggtagaactatcagatacccagacccaaacatcaaggtcaatgacactgttaagattgatttggcctctggtaagattactgatttcatcaagttcgatgccggtaagttggtttacgttactggtggtcgtaacttgggtcgtatcggtactatcgttcacaaggaaagacacgatggtggtttcgatttggttcacatcaaggactccttggacaacactttcgtcactagattgaacaatgtcttcgtcattggtgaacaaggtaagccttacatttctttgccaaagggtaagggtatcaagttgtctattgctgaagaacgtgacagaagaagagctcaacaaggtttgtaa

SEQ ID NO: 5252 - DNA, 786 bp, Artificial Sequence
  Description of Artificial Sequence: Synthetic polynucleotide
atggctagaggaccaaagaagcatttgaagagattagcagctccacaccattggttattggacaagttgtccggttgttacgccccaagaccatctgctggtccacacaaattgcgtgaatccttgccattgattgtctttttaagaaacagattaaagtatgctttgaacggccgtgaagtcaaggctatcttgatgcaacgtcacgtcaaagttgacggtaaggttagaactgacaccacctacccagctggtttcatggacgtcatcactttagatgccaccaatgaaaacttcagattggtctacgatgtcaagggtagattcgctgtccaccgtatcaccgatgaagaagcctcttacaaattgggtaaggtcaagaaggtccaattaggtaagaagggtgttccatacgttgttacccacgatggtagaactatcagatacccagacccaaacatcaaggtcaatgacactgttaagattgatttggcctctggtaagattactgatttcatcaagttcgatgccggtaagttggtttacgttactggtggtcgtaacttgggtcgtatcggtactatcgttcacaaggaaagacacgatggtggtttcgatttggttcacatcaaggactccttggacaacactttcgtcactagattgaacaatgtcttcgtcattggtgaacaaggtaagccttacatttctttgccaaagggtaagggtatcaagttgtctattgctgaagaacgtgacagaagaagagctcaacaaggtttgtga

SEQ ID NO: 5253 - DNA, 2391 bp, Saccharomyces cerevisiae
atggtttgctgcttatgggtgcttctagcattgttgcttcatctcgatcatgtagcatgcgaagacgatgcgtactcattcacttctaaagaacttaaggcttacaagcaggaagtgaaggagctgttttatttcggcttcgacaattatttagagcatgggtatccatatgatgaggtaaaacccatttcatgcgttcctaagaagagaaactttgaagatcctactgatcaaggcaccaacgatatattgggcaattttacaatcactttaatagattctttaaccactattgctatactggaagaccggccgcagtttttgaaagctgttcgacttgttgaaaggacatttcctgatggcaatttcgatattgattccacaatacaagtttttgaaattactatacgtgttatcggatcactactatcatcacatctttatgctacggatcccacaaaggcagtgtatttaggggacgattatgatggctcactgttacgtctcgcccagaatatggcagataggctcttacctgcatatttaacgtctaccggattacctatgccacggagaaacatcaaacgaaaatgggatgtctctgaatttccagaatttttggagacagagaataatgtggccgctatggcgtctcccatgttcgaattcactattttatcttacttgacaggcgatcccaagtatgagaaagttaccagatacgcatttgataaaacatggtctcttagaactggtttggatttgctacccatgtcctttcaccccgaaaaactaacaccatatacgcccatgactggaatcggcgcctccatcgactcccttttcgaatacgctttgaaaggtgctattttatttgatgattcagaattaatggaagtttggaacgtagcatacgaggcattaaagactaactgtaaaaacgattggttttttgctaatgtaatggctgacacagggcatttgtttgttccctggattgattctttgagtgcttttttctccggtttacaggtgcttgctggtgatttggatgatgccatagcgaaccatttaatgtttttaaaaatgtggaacacctttggcggtattcctgaaaggtggaactttagtcctccggagtttcccccactatctccattagagcgatcgggagctgttgctttggataatatcctccccttagaatggtacccattaagaccggaattttttgagtcaacctatttcttatatagagctacaaaagacccgttttacttaaatattggggtacatctgctaaaagacctcaagcaacgatttaagtctaactgcggatttgcaggtttccaaaatgtaatcacgggcgaactgcaagatagaatggaaacatttgtgttgagtgaaactttgaaatacctgtatttattatttgatgaagagaacgaattacataacagcgctagtgacgtaattttcagtacagaagcccatccaatgtggttgccccaagaagtgaggtccaactataaacgtaacgctaaatttaacaactctgtctactcgtcgcacttggaaatttgccagaaaaaggacagggaacaagctggagagaacacattgagccaaagaattgtggggttcgccaaatcgatctttcataaaggtccaccagacgaagaggctactgatccaattatagactataccattgatactgaacttcccggtacatgctctataaagcctcatcatgtaattggtgacgaattttggtattctccaatgttgagcaattttgacagattattcgagattgactcccggttcgctgccacgctaattaaaccttcacacatgcataactataatgcaattgaactagaacctggattttataacaggtggtccaatccgcaatttagcacgtgcctgatcccacccaccaccgaaattttcgaactactattcgaccttcctggatatcatcagttgaatccattaatgttagaaaacaaaactattacatttgaaacctttggaggtaggtcaaggttgaagatcgaaaaattgcaaatctaccaaattgattactatggagacttaatcactgcatcgacattccaagacgtctcccgcaaggatattttctcgaatgcatgcgatgcagtggcaagcttgtattctcccacttatctttacagagtagtagccatcaacggacgcatattgcctcgccatggaagtgtacaaatcaagaaacatagtcctgtgctcacttccaatggcacaagagaggaagacgaattcaaaatggatggcatcgggattaatgaccattcccaactcatgttagaatgcacgcccatcatcaacttatttattgtatga

SEQ ID NO: 5254 - DNA, 2391 bp, Artificial Sequence
  Description of Artificial Sequence: Synthetic polynucleotide
atggtttgctgcttatgggtgcttttagcattgttgcttcatctcgatcatgtagcatgcgaagacgatgcgtactctttcacttctaaagaacttaaggcttacaagcaggaagtgaaggagttattttatttcggcttcgacaattatttagagcatgggtatccatatgatgaggtaaaacccatttcttgcgttcctaagaagagaaactttgaagatcctactgatcaaggcaccaacgatatattgggcaattttacaatcactttaatagattctttaaccactattgctatattggaagaccgcccgcagtttttgaaagctgttcgtcttgttgaaaggacatttcctgatggcaatttcgatattgattccacaatacaagtttttgaaattactatacgtgttatcggatctttattatcttctcatctttatgctacggatcccacaaaggcagtgtatttaggggacgattatgatggctctttattacgtctcgcccagaatatggcagataggctcttacctgcatatttaacgtctaccggattacctatgccaagaagaaacatcaaaagaaaatgggatgtctctgaatttccagaatttttggagacagagaataatgtggccgctatggcgtctcccatgttcgaattcactattttatcttacttgacaggcgatcccaagtatgagaaagttaccagatacgcatttgataaaacatggtctcttagaactggtttggatttgttgcccatgtcctttcaccccgaaaaattaacaccatatacgcccatgactggaatcggcgcctccatcgactcccttttcgaatacgctttgaaaggtgctattttatttgatgattctgaattaatggaagtttggaacgtagcatacgaggcattaaagactaactgtaaaaacgattggttttttgctaatgtaatggctgacacagggcatttgtttgttccctggattgattctttgagtgcttttttctccggtttacaggtgcttgctggtgatttggatgatgccatagcgaaccatttaatgtttttaaaaatgtggaacacctttggcggtattcctgaaaggtggaactttagtcctccggagtttcccccattatctccattagagaggtctggagctgttgctttggataatatcctccccttagaatggtacccattaagaccggaattttttgagtctacctatttcttatatagagctacaaaagacccgttttacttaaatattggggtacatttattgaaagacctcaagcaaagatttaagtctaactgcggatttgcaggtttccaaaatgtaatcacgggcgaattacaagatagaatggaaacatttgtgttgagtgaaactttgaaatacttatatttattatttgatgaagagaacgaattacataacagcgctagtgacgtaattttcagtacagaagcccatccaatgtggttgccccaagaagtgaggtccaactataaacgtaacgctaaatttaacaactctgtctactcttctcacttggaaatttgccagaaaaaggacagggaacaagctggagagaacacattgagccaaagaattgtggggttcgccaaatctatctttcataaaggtccaccagacgaagaggctactgatccaattatagactataccattgatactgaacttcccggtacatgctctataaagcctcatcatgtaattggtgacgaattttggtattctccaatgttgagcaattttgacagattattcgagattgactccagattcgctgccacgttgattaaaccttctcacatgcataactataatgcaattgaattggaacctggattttataacaggtggtccaatccgcaatttagcacgtgcttgatcccacccaccaccgaaattttcgaattattattcgaccttcctggatatcatcagttgaatccattaatgttagaaaacaaaactattacatttgaaacctttggaggtaggagtaggttgaagatcgaaaaattgcaaatctaccaaattgattactatggagacttaatcactgcaagcacattccaagacgtctcccgcaaggatattttcagtaatgcatgcgatgcagtggcaagcttgtattctcccacttatctttacagagtagtagccatcaacggacgcatattgcctcgccatggaagtgtacaaatcaagaaacatagtcctgtgctcacttccaatggcacaagagaggaagacgaattcaaaatggatggcatcgggattaatgaccattcccaactcatgttagaatgcacgcccatcatcaacttatttattgtatga

SEQ ID NO: 5255 - DNA, 2475 bp, Saccharomyces cerevisiae
atgatgaatttttttacatcaaaatcgtcgaatcaggatactggatttagctctcaacaccaacatccaaatggacagaacaatggaaacaataatagcagcaccgctggcaacgacaacggatacccatgtaaactggtgtccagtgggccctgcgcttcatcaaataatggtgccctttttacgaattttactttacaaactgcaacgccgaccaccgctattagtcaggacttatatgcaatgggcacaacaggaataacatcagaaaatgccctttttcaaatgaagtcaatgaataatggaatatcatcagttaataataacaacagcaacacccctacgattattaccacgtcacaggaagaaactaatgctggaaatgtacatggcgataccggtggcaattctttgcaaaattctgaagatgacaacttttcttccagttctaccaccaaatgcttactctcttccacttcttcgctatcaataaatcaacgagaagcagcagcagctgcttatggtccagataccgatattcctaggggtaaactagaagttacaataatagaagcacgtgacctagtcactagatcaaaggattcacagccttatgttgtttgtacttttgagagttcagagttcatttctaatggtcctgagtcactaggcgccattaataataacaacaataacaacaacaataatcagcataatcaaaaccagcatattaacaacaacaacgaaaataccaaccctgacgctgctagccagcatcataataataacagtggttggaacggttctcagttaccatcgataaaagagcacttgaagaaaaaacccctttatacacacagatcatcttcccaattagatcagctaaactcttgctcttcagtaaccgatccgagcaaacgttcttctaattcttcgtcgggttcttcaaatggtccaaagaatgatagttcacatccaatatggcatcacaagacaacgtttgatgttttgggatctcactcggaattagatatttctgtttatgatgctgcccacgaccatatgttcttaggccaagttagactgtatccaatgattcataatttagcacatgcttcccaacaccaatggcacagtttgaaacctcgcgttattgatgaagttgtgtccggtgatattttaatcaaatggacttacaaacagacaaagaaaagacattatggcccacaagattttgaagttcttcgattattgggtaagggtacttttggccaagtctaccaagttaagaagaaagacactcaaagaatttatgcaatgaaagttctctccaagaaagttattgtcaagaaaaatgagatcgcccacacaattggcgaaagaaatatcctagtcacgacagcgtccaaatcgtccccattcattgtcggattgaagttttcctttcaaacaccaacagatctgtatttggtcactgattatatgagtggtggagaattattctggcatttacaaaaggagggccgtttttcggaagacagagcgaaattctatatcgctgagttagtcctagcgttagaacatttacacgataacgatatcgtttacagggacctaaagcctgaaaacattctactcgatgccaacggtaacatcgctctttgcgattttggtctttctaaagctgacttgaaggatagaacaaacacattttgcggcaccacggaatacctggcaccagaattgttactggacgaaaccggctacaccaaaatggtcgatttctggtctctaggtgttttgatatttgaaatgtgttgtggttggtcccctttctttgcggaaaataatcaaaaaatgtaccaaaaaattgcctttggtaaagtcaaattccccagagacgtactgtcacaagaggggaggtcttttgtaaagggtttactaaacagaaaccccaaacatagactcggtgccattgatgatggaagagaactacgagctcatccatttttcgcagatatcgactgggaggccttgaagcagaaaaaaattccaccacctttcaaacctcacctagtctcggagacggatacctcgaattttgacccagagttcacaacagcttcaacttcatacatgaacaagcaccagccgatgatgactgctaccccgctatctccagccatgcaagcaaagtttgctggtttcacctttgttgatgagtccgccatcgatgaacacgttaataacaacagaaaattcctacaaaactcgtactttatggaacctggttcctttatcccgggaaatccaaacttacctccagacgaagatgtcatcgatgatgacggggacgaggacatcaatgatggattcaaccaagagaaaaatatgaacaacagccattcgcagatggacttcgacggcgaccaacacatggatgacgaatttgtcagtggaagattcgaaatatga

SEQ ID NO: 5256 - DNA, 2475 bp, Artificial Sequence
  Description of Artificial Sequence: Synthetic polynucleotide
atgatgaatttttttacaagtaaaagcagtaatcaggatactggatttagctctcaacaccaacatccaaatggacagaacaatggaaacaataatagcagcaccgctggcaacgacaacggatacccatgtaaattagtgtccagtgggccctgcgcttcttccaataatggtgccctttttacgaattttactttacaaactgcaacgccgaccaccgctattagtcaggacttatatgcaatgggcacaacaggaataacaagtgaaaatgccctttttcaaatgaagtctatgaataatggaatatcttctgttaataataacaacagcaacacccctacgattattaccacgagccaggaagaaactaatgctggaaatgtacatggcgataccggtggcaattctttgcaaaattctgaagatgacaacttttcttccagttctaccaccaaatgcttactctcttccacttcttctttatctataaatcaaagagaagcagcagcagctgcttatggtccagataccgatattcctaggggtaaattagaagttacaataatagaagcacgtgacttggtcactagatccaaggattctcagccttatgttgtttgtacttttgagagtagtgagttcatttctaatggtcctgagtctttaggcgccattaataataacaacaataacaacaacaataatcagcataatcaaaaccagcatattaacaacaacaacgaaaataccaaccctgacgctgctagccagcatcataataataacagtggttggaacggttctcagttaccaagtataaaagagcacttgaagaaaaaacccctttatacacacagatcttcttcccaattagatcagttgaactcttgctcttctgtaaccgatccgagcaaacgttcttctaattcttcttctggttcttccaatggtccaaagaatgatagttctcatccaatatggcatcacaagacaacgtttgatgttttgggatctcacagtgaattagatatttctgtttatgatgctgcccacgaccatatgttcttaggccaagttagattatatccaatgattcataatttagcacatgcttcccaacaccaatggcacagtttgaaacctcgcgttattgatgaagttgtgtccggtgatattttaatcaaatggacttacaaacagacaaagaaaagacattatggcccacaagattttgaagttcttcgtttattgggtaagggtacttttggccaagtctaccaagttaagaagaaagacactcaaagaatttatgcaatgaaagttctctccaagaaagttattgtcaagaaaaatgagatcgcccacacaattggcgaaagaaatatcctcgtcacgacagcgtccaaatcttccccattcattgtcggattgaagttttcctttcaaacaccaacagatttatatttggtcactgattatatgagtggtggagaattattctggcatttacaaaaggagggccgtttttctgaagacagagcgaaattctatatcgctgagttagtcttggcgttagaacatttacacgataacgatatcgtttacagggacttgaagcctgaaaacattttactcgatgccaacggtaacatcgctctttgcgattttggtctttctaaagctgacttgaaggatagaacaaacacattttgcggcaccacggaatacttggcaccagaattgttattagacgaaaccggctacaccaaaatggtcgatttctggtctttgggtgttttgatatttgaaatgtgttgtggttggtcccctttctttgcggaaaataatcaaaaaatgtaccaaaaaattgcctttggtaaagtcaaattccccagagacgtattatctcaagaggggaggtcttttgtaaagggtttattaaacagaaaccccaaacatagactcggtgccattgatgatggaagagaattaagagctcatccatttttcgcagatatcgactgggaggccttgaagcagaaaaaaattccaccacctttcaaacctcacttggtcagtgagacggatacctctaattttgacccagagttcacaacagcttccacttcttacatgaacaagcaccagccgatgatgactgctaccccgttatctccagccatgcaagcaaagtttgctggtttcacctttgttgatgagtccgccatcgatgaacacgttaataacaacagaaaattcttacaaaactcttactttatggaacctggttcctttatcccgggaaatccaaacttacctccagacgaagatgtcatcgatgatgacggggacgaggacatcaatgatggattcaaccaagagaaaaatatgaacaacagccattctcagatggacttcgacggcgaccaacacatggatgacgaatttgtcagtggaagattcgaaatatga

SEQ ID NO: 5257 - DNA, 1869 bp, Saccharomyces cerevisiae
atgagcttttccaccataaatagcaacgtcaataaaaccaccggcgatagcaataataacaccaccgagaacagttcgactgcagaccttttaggaatggacttgttgcagagcgggcctcgactgatgaacacgatgcagccaaacaactcttctgacatgctgcacattaacaacaagactaataacgttcaacaaccagctggaaacacaaatatcagcagtgctaatgcgggagcaaaggctccagcaaatgagttcgtaagaaaactgttcaggatactggaaaacaatgaatatcctgacattgtaacttggactgagaacggcaaaagtttcgtcgttttggacacaggaaagttcactacgcatatattgcctaatcacttcaaacattcaaattttgcatcttttgtaaggcaactaaacaagtatgactttcacaaggttaagagaagtcccgaggaaagacagagatgtaaatatggcgaacaaagttgggagtttcagcatccagaatttagagtccattacggaaaaggtctcgataacatcaaaaggaaaattccggcgcaaaggaaagtgcttttggatgaatctcaaaaggctcttttgcatttcaatagtgaaggcactaaccccaacaatccttctgggtctcttttgaatgaatccaccacagagctgttgttaagcaataccgtaagtaaagatgcatttggaaatctaagaaggcgagtagacaaactacaaaaggagttggatatgtccaaaatggagagttatgctactaaagtagaactacaaaagttgaactcgaaatacaatacggttatcgaaagtttgataacattcaagaccataaatgaaaatttactcaacaacttcaacactctgtgttccactttggcaaataatggtattgaagtgccaatatttggcgacaatggaaaccgtaacccaactggtaataccaacccagcaacaacaacagctatccaaagcaacaacaacaccaacaatgcttctccggcaacatctacagtttccttacaactacctaatttacccgatcagaatagcctaacaccaaatgctcaaaataacacagtcacgctacgaaaaggtttccatgtactgttggtggaagatgacgcagtgtctatacagttgtgttcaaaatttttacggaaatatggctgtactgtccaagttgtcagcgacggtctttcagctatctcaacactagagaagtataggtatgatttggttttaatggacattgttatgccaaacctagatggtgccacagcgacatccattgtcagaagttttgataatgagactcccatcattgccatgacaggtaacattatgaatcaagacttgatcacatacttacaacatggaatgaatgatatcttggccaaaccattcacgagggatgatttacactcaattttaatacgttatctaaaggaccgtattcctttatgcgaacagcaattaccacctcgcaactcttcgccacaaactcattccaacaccaatactgctaattcgaatcctaatacgattaatgaacagtcgttagccatgttaccacaagataatccgtcaactactacccctgttaccccaggtgcctctatatcttctgcacagcatgttcaacaaggtcaacaagaacagcagcatcaaattttccatgctcagcagcagcagcagcatcacaacgccattgctaatgctaggtcagacgtagccataccgaatttggaacatgaaatcaacactgtaccacattcctcaatgggttccactccgcaattaccacaatctacacttcaagaaaaccagctatcataa

SEQ ID NO: 5258 - DNA, 1869 bp, Artificial Sequence
  Description of Artificial Sequence: Synthetic polynucleotide
atgagcttttccaccataaatagcaacgtcaataaaaccaccggcgatagcaataataacaccaccgagaacagttctactgcagaccttttaggaatggacttgttgcagagcgggcctagattaatgaacacgatgcagccaaacaactcttctgacatgttgcacattaacaacaagactaataacgttcaacaaccagctggaaacacaaatatcagcagtgctaatgcgggagcaaaggctccagcaaatgagttcgtaagaaaattattcaggatattggaaaacaatgaatatcctgacattgtaacttggactgagaacggcaaaagtttcgtcgttttggacacaggaaagttcactacgcatatattgcctaatcacttcaaacattctaattttgcatcttttgtaaggcaattgaacaagtatgactttcacaaggttaagagaagtcccgaggaaagacagagatgtaaatatggcgaacaaagttgggagtttcagcatccagaatttagagtccattacggaaaaggtctcgataacatcaaaaggaaaattccggcgcaaaggaaagtgcttttggatgaatctcaaaaggctcttttgcatttcaatagtgaaggcactaaccccaacaatccttctgggtctcttttgaatgaatccaccacagagttattgttaagcaataccgtaagtaaagatgcatttggaaatttaagaaggcgtgtagacaaattacaaaaggagttggatatgtccaaaatggagagttatgctactaaagtagaattacaaaagttgaactccaaatacaatacggttatcgaaagtttgataacattcaagaccataaatgaaaatttactcaacaacttcaacactttgtgttccactttggcaaataatggtattgaagtgccaatatttggcgacaatggaaaccgtaacccaactggtaataccaacccagcaacaacaacagctatccaaagcaacaacaacaccaacaatgcttctccggcaacatctacagtttccttacaattacctaatttacccgatcagaatagcttaacaccaaatgctcaaaataacacagtcacgcttagaaaaggtttccatgtacttttggtggaagatgacgcagtgtctatacagttgtgttctaaatttttaagaaaatatggctgtactgtccaagttgtcagcgacggtctttctgctatcagtacattagagaagtataggtatgatttggttttaatggacattgttatgccaaaccttgatggtgccacagcgacatccattgtcagaagttttgataatgagactcccatcattgccatgacaggtaacattatgaatcaagacttgatcacatacttacaacatggaatgaatgatatcttggccaaaccattcacgagggatgatttacactctattttaatacgttatttgaaggaccgtattcctttatgcgaacagcaattaccacctcgcaactcttctccacaaactcattccaacaccaatactgctaatagtaatcctaatacgattaatgaacagtctttagccatgttaccacaagataatccgtctactactacccctgttaccccaggtgcctctatatcttctgcacagcatgttcaacaaggtcaacaagaacagcagcatcaaattttccatgctcagcagcagcagcagcatcacaacgccattgctaatgctaggagtgacgtagccataccgaatttggaacatgaaatcaacactgtaccacattcctctatgggttccactccgcaattaccacaatctacacttcaagaaaaccagttatcttga

SEQ ID NO: 5259 - DNA, 1581 bp, Saccharomyces cerevisiae
atgacattgactatcaaaataggaaccttaaacgatagcgatcaatctgcagtgcataatggtacagaaaatggctctgattttcgaaagataactcccacagaggaagagatctgtgatgacgtagttttgttatggaaggaagagcccggaactgaagacgctacgattcagcatctttatgacaggattacggaaagaaatcaatcgtggaaattgagtgcttctcgttttcgaaaaattctaaatgagcaccatctttatgacacagatctagagaccgtttctctatataaagataaaatacattttccaaaagccctagattctgatgctaaggtcgaagtgaaatttattgatgacgaacatggaaggggccttttcgctaaaagagatttttccaagggccaaatcatcctgaaagaaaataaacctatcgtatatattccaccactggacaagctttttttaatatctaatggaaaggcatgtgctcgatgtggtaaggcgctatatgatttgacccagcacaaaattatggtccattatttggattgtgaagtttgcaaagctatttggtgcagtgaaaaatgtaaaaaagcacatgcgtcgttacatgagcttttataccactcatggagatcgaatagaatagacattcttcatgctggtaattggaaaagatttgttaactactgtgagaaatattgttttaccgctgccttttcagttggtcttatatatggatccatgcttttggatactacaggagaggtcaaagagcaatggcaaaaattggcaagcatctcacaaagggaaagaattaaattaagagacgccagcggtatcggcagtacgtttagtttactgaatggtacaactgtacatactgaagaggaatctgataatggtaccaaaaagggcgttgagaagaatattgatgacgagactgtttgggagaagtgctacgaattattttgcggtgcatttccaaaagcttctgaagaaatagatttcgagaaatttttgaccatgatcgggacgttcaatatcaatcaatataacggccaggtatatcattggatctccttcataaaccatgattgtgaaccaaacgcctatattgagcaagtagaagaacatgaggaactgaggttgcatgcaaggaaaccaataaagaagggggaacaaatacgtattacgtacgtcaatcccttacatggggtgaggttgaggcgtagggaattaagagttaactggggcttcttatgccagtgtgaccgctgtcaaaatgaactatctacatttgaaagagttccaaatctagagaaaaagaatgcggatgctaatttaggagtagaaaaaatagattccaatgatagtagtgaagatggctctaagaaatcaactggtaatcgtaaatcttccatgagagaggcccagccagatttaaaagaaatactgaagaatggaaaagaatttgaattagacataccagaaactgttgatacacaagggaatgtaagaaaaacctcagtcagattcgattcaaacgtttcggtcgcagtggatgaaagataa

SEQ ID NO: 5260 - DNA, 1581 bp, Artificial Sequence
  Description of Artificial Sequence: Synthetic polynucleotide
atgacattgactatcaaaataggaaccttaaacgatagcgatcaatctgcagtgcataatggtacagaaaatggctctgattttagaaagataactcccacagaggaagagatctgtgatgacgtagttttgttatggaaggaagagcccggaactgaagacgctacgattcagcatctttatgacaggattacggaaagaaatcaaagttggaaattgagtgcttctcgttttagaaaaattttgaatgagcaccatctttatgacacagatttagagaccgtttctttgtataaagataaaatacattttccaaaagccttggattctgatgctaaggtcgaagtgaaatttattgatgacgaacatggaaggggccttttcgctaaaagagatttttccaagggccaaatcatcttgaaagaaaataaacctatcgtatatattccaccattggacaagctttttttaatatctaatggaaaggcatgtgctcgttgtggtaaggcgttatatgatttgacccagcacaaaattatggtccattatttggattgtgaagtttgcaaagctatttggtgcagtgaaaaatgtaaaaaagcacatgcgtctttacatgagcttttataccactcttggagatctaatagaatagacattcttcatgctggtaattggaaaagatttgttaactactgtgagaaatattgttttaccgctgccttttctgttggtcttatatatggatccatgcttttggatactacaggagaggtcaaagagcaatggcaaaaattggcaagcatctctcaaagggaaagaattaaattaagagacgccagcggtatcggcagtacgtttagtttattgaatggtacaactgtacatactgaagaggaatctgataatggtaccaaaaagggcgttgagaagaatattgatgacgagactgtttgggagaagtgctacgaattattttgcggtgcatttccaaaagcttctgaagaaatagatttcgagaaatttttgaccatgatcgggacgttcaatatcaatcaatataacggccaggtatatcattggatctccttcataaaccatgattgtgaaccaaacgcctatattgagcaagtagaagaacatgaggaattgaggttgcatgcaaggaaaccaataaagaagggggaacaaatacgtattacgtacgtcaatcccttacatggggtgaggttgaggcgtagggaattaagagttaactggggcttcttatgccagtgtgaccgctgtcaaaatgaattatctacatttgaaagagttccaaatttggagaaaaagaatgcggatgctaatttaggagtagaaaaaatagattccaatgatagtagtgaagatggctctaagaaatctactggtaatcgtaaatcttccatgagagaggcccagccagatttaaaagaaatattgaagaatggaaaagaatttgaattagacataccagaaactgttgatacacaagggaatgtaagaaaaacctctgtcagattcgattccaacgtttctgtcgcagtggatgaaagatga

SEQ ID NO: 5261 - DNA, 1182 bp, Saccharomyces cerevisiae
atgttgcagagacattccttgaagttggggaaattctccatcagaacactcgctactggtgccccattagatgcatccaaactaaaaattactagaaacccaaatccatccaagccaagaccaaatgaagaattagtgttcggccagacattcaccgatcatatgttgaccattccttggtcagccaaagaagggtggggcactccacacatcaagccttacggtaatctttctcttgacccatctgcttgtgtattccattatgcatttgaattatttgaaggtttgaaagcctacagaactcctcaaaatactatcaccatgttccgtccggataagaacatggcccgtatgaacaagtctgccgctagaatttgtttgccaactttcgaatctgaagaattgatcaaacttaccgggaaattgatcgaacaagataaacacttggttcctcaaggtaatggttactcattatacatcagaccaacaatgattggtacatccaagggtttaggtgttggcactccctccgaggctcttctttatgttattacttctccagtcggtccttattataagactggtttcaaagccgtacgtcttgaagcaacagactatgctacaagagcttggccaggtggtgttggcgacaaaaaattgggtgctaactatgccccatgcatcttacctcaactacaagctgccaaaagagggtaccaacaaaatctatggttgttcggcccagaaaagaacatcactgaggttggtactatgaacgtgttcttcgttttcctcaacaaagtcactggcaagaaggaattggttaccgctccattagatggtaccattttagaaggtgttaccagagactctgttttaacattggctcgtgacaaactagatcctcaagaatgggacatcaacgagcgttattacactattactgaagtcgccactagagcaaaacaaggtgaactattagaagccttcggttctggtactgctgctgtcgtttcacctatcaaggaaattggctggaacaacgaagatattcatgttccactattgcctggtgaacaatgtggtgcattgaccaagcaagttgctcaatggattgctgatatccaatacggtagagtcaattatggtaactggtcaaaaactgttgccgacttgaactaa

SEQ ID NO: 5262 - DNA, 1182 bp, Artificial Sequence
  Description of Artificial Sequence: Synthetic polynucleotide
atgttgcagagacattccttgaagttggggaaattctccatcagaacactcgctactggtgccccattagatgcatccaaattgaaaattactagaaacccaaatccatccaagccaagaccaaatgaagaattagtgttcggccagacattcaccgatcatatgttgaccattccttggtctgccaaagaagggtggggcactccacacatcaagccttacggtaatctttctcttgacccatctgcttgtgtattccattatgcatttgaattatttgaaggtttgaaagcctacagaactcctcaaaatactatcaccatgttccgtccggataagaacatggcccgtatgaacaagtctgccgctagaatttgtttgccaactttcgaatctgaagaattgatcaaacttaccgggaaattgatcgaacaagataaacacttggttcctcaaggtaatggttactctttatacatcagaccaacaatgattggtacatccaagggtttaggtgttggcactccctccgaggctcttctttatgttattacttctccagtcggtccttattataagactggtttcaaagccgtacgtcttgaagcaacagactatgctacaagagcttggccaggtggtgttggcgacaaaaaattgggtgctaactatgccccatgcatcttacctcaattacaagctgccaaaagagggtaccaacaaaatttatggttgttcggcccagaaaagaacatcactgaggttggtactatgaacgtgttcttcgttttcctcaacaaagtcactggcaagaaggaattggttaccgctccattagatggtaccattttagaaggtgttaccagagactctgttttaacattggctcgtgacaaattggatcctcaagaatgggacatcaacgagcgttattacactattactgaagtcgccactagagcaaaacaaggtgaattattagaagccttcggttctggtactgctgctgtcgtttctcctatcaaggaaattggctggaacaacgaagatattcatgttccattgttgcctggtgaacaatgtggtgcattgaccaagcaagttgctcaatggattgctgatatccaatacggtagagtcaattatggtaactggtccaaaactgttgccgacttgaactga

SEQ ID NO: 5263 - DNA, 876 bp, Saccharomyces cerevisiae
atgcctaaaactagttatttaaacaaaaattttgaatctgctcactataataacgtacgtccctcttaccctttatctttagtcaatgagataatgaaatttcacaaaggcacacgcaaaagtttggttgatattggatgtggcacaggaaaagcaacttttgtcgttgaaccctattttaaggaagtgattgggattgatccttcttctgctatgctttcgattgctgagaaagaaacaaatgaacgtagattagataaaaagattagatttattaatgcgcctggtgaagatttatccagcattcgaccagaaagtgtagatatggttatttcagcagaagccatccattggtgcaatttagaaaggctgtttcagcaggtttcctctatattacgaagtgatggaacttttgcattctggttttatattcagccggaatttgtggactttcccgaagccttgaatgtatattacaaatatggatggagcaaggattatatgggtaaatatctgaacgacaaccaacgggaaattttgttgaattacggtggtgaaaagctacgttctttattgtcagatcgatttggagatattgaagtcacaatttacagtccttcggacccaaatgcatcaacagtaacggctgaaaacagtcagtttctctggagagcagctattactctcaatcaatttaaagagtttgtgaaaagctggagcatatacacttcttgggctagagataatccctcgaaaccggatattgccgatatattcattaacgagctcaaagaaatctgtcattgtgaagatttgaatgtacctttaaaaatagagtggtcaacgttttattacttatgtaggaaaagagaatga

SEQ ID NO: 5264 - DNA, 876 bp, Artificial Sequence
  Description of Artificial Sequence: Synthetic polynucleotide
atgcctaaaactagttatttaaacaaaaattttgaatctgctcactataataacgtacgtccctcttaccctttatctttagtcaatgagataatgaaatttcacaaaggcacacgcaaaagtttggttgatattggatgtggcacaggaaaagcaacttttgtcgttgaaccctattttaaggaagtgattgggattgatccttcttctgctatgctttctattgctgagaaagaaacaaatgaacgtagattagataaaaagattagatttattaatgcgcctggtgaagatttatccagcattagaccagaaagtgtagatatggttatttctgcagaagccatccattggtgcaatttagaaaggttatttcagcaggtttcctctatattaagaagtgatggaacttttgcattctggttttatattcagccggaatttgtggactttcccgaagccttgaatgtatattacaaatatggatggagcaaggattatatgggtaaatatttgaacgacaaccaaagagaaattttgttgaattacggtggtgaaaagttgcgttctttattgagtgatagatttggagatattgaagtcacaatttacagtccttctgacccaaatgcaagcacagtaacggctgaaaacagtcagtttctctggagagcagctattactctcaatcaatttaaagagtttgtgaaaagctggagcatatacacttcttgggctagagataatccctctaaaccggatattgccgatatattcattaacgagctcaaagaaatctgtcattgtgaagatttgaatgtacctttaaaaatagagtggtctacgttttattacttatgtaggaaaagagaatga

SEQ ID NO: 5265 - DNA, 1026 bp, Saccharomyces cerevisiae
atgtcaaataataaggctggcggtgaatatgaagtcatcactattggtgatgcaaaaaagcttcaagcaacaatttcagagcttggcgctactttgcttgacttgaaagtgaacaacgaatcgattgttctaggataccctgatattcatggctatatatcagatggctacaactacattggtgctactgttggccgttatgcaaatcgtatttacaagggcatgttcagtatggaagatggacctcatcagttgacagtgaacaattgtggaaacaccaaccacagtagcatcagctccttccatctcaagaagtataaggcatccaaagtccaaaatcctcttgatgacctttacattgttgaatttacgttattggatgaccgcacactgcccaatgaatttccgggagatctagctgtaaacttaaagtacacattgaacgttgctgacatgaccttggacttggaatacgaggcaaaactggtcagcggtgaggctactcccatcaacatgacgaatcacacgtacttcaatttaaacaaaactatggataaaaaatccattagcggtacggaggttaggctctgctcagataaatcattggaagtaagcgaaggagcactaattccaaccggtaaaatcgttcaaagaaaaattgctacttttgactcctccaaacctaccattctgcaggatgatggcccgatttatgactacgctttcattgttgatgaaaataagaatttgaaaacgacagactcagtaagtgtaaacaagctcgtccctgccttcaaggcttatcatccggcatcacgactttcattggaggtttcaacaacagaaccaactgtcctattttacacaggtgacaacttgtgtgatggatttacgccgagatctggctttgccgttgaacaaggcagatatgttgacgcaatcaaccgtgatggatggagagactgcgttcttttgagacgtggtgaggtatatacttctaagactcgatatcgttttgcggtgtag

SEQ ID NO: 5266 - DNA, 1026 bp, Artificial Sequence
  Description of Artificial Sequence: Synthetic polynucleotide
atgagtaataataaggctggcggtgaatatgaagtcatcactattggtgatgcaaaaaagcttcaagcaacaatttctgagcttggcgctactttgcttgacttgaaagtgaacaacgaaagtattgttttaggataccctgatattcatggctatatatctgatggctacaactacattggtgctactgttggccgttatgcaaatcgtatttacaagggcatgttcagtatggaagatggacctcatcagttgacagtgaacaattgtggaaacaccaaccacagtagcatcagctccttccatctcaagaagtataaggcatccaaagtccaaaatcctcttgatgacctttacattgttgaatttacgttattggatgaccgcacattacccaatgaatttccgggagatttggctgtaaacttaaagtacacattgaacgttgctgacatgaccttggacttggaatacgaggcaaaattggtcagcggtgaggctactcccatcaacatgacgaatcacacgtacttcaatttaaacaaaactatggataaaaaatccattagcggtacggaggttaggctctgctctgataaatctttggaagtaagcgaaggagcattgattccaaccggtaaaatcgttcaaagaaaaattgctacttttgactcctccaaacctaccattttacaggatgatggcccgatttatgactacgctttcattgttgatgaaaataagaatttgaaaacgacagactctgtaagtgtaaacaagctcgtccctgccttcaaggcttatcatccggcatctaggctttctttggaggtttctacaacagaaccaactgtcttgttttacacaggtgacaacttgtgtgatggatttacgccgagatctggctttgccgttgaacaaggcagatatgttgacgcaatcaaccgtgatggatggagagactgcgttcttttgagacgtggtgaggtatatacttctaagactagatatcgttttgcggtgtga

SEQ ID NO: 5267 - DNA, 3228 bp, Saccharomyces cerevisiae
atgacaattgcacaccactgcatatttttggtaatcttggcctttctggcactaattaatgtggcctcaggagccacagaggcgtgcttaccagcaggccagaggaaaagtgggatgaatataaatttttaccagtattcattgaaagattcctccacatattcgaatgcagcatatatggcttatggatatgcctcaaaaaccaaactaggttctgtcggaggacaaactgatatttcgattgattataatattccctgtgttagttcatcaggcacatttccttgtcctcaagaagattcctatggaaactggggatgcaaaggaatgggtgcttgttctaatagtcaaggaattgcatactggagtactgatttatttggtttctatactaccccaacaaacgtaaccctagaaatgacaggttattttttaccaccacagacgggttcttacacgttttcttttgcaacagtagatgattctgcaattttatcagtcggtggtagcattgcgttcgaatgttgtgcacaagaacaacctcccatcacgtcgactaacttcacaatcaatggtatcaagccatgggatggaagtctccctgacaatatcacagggactgtctacatgtatgcaggctactattatccgctgaaggttgtttactccaatgccgtttcctggggcacgcttccaattagcgtggaattgcctgatggtactactgttagtgataactttgaagggtacgtttactcttttgacgatgacctaagtcagtcaaattgtactatccctgatccttcaatacatactactagcactatcacaactaccaccgagccatggaccggtactttcacttctacatccactgagatgaccaccatcaccgatactaacggtcaattaactgatgaaactgtcattgtcatcagaactccaacaacagctagcaccatcacaactaccaccgagccatggaccggtactttcacctctacatccactgagatgactactgtcaccggtaccaacggtcaaccaactgacgaaactgttattgtcattagaactccaactagtgagggtttgattactacaactaccgaaccatggaccggtactttcacctctacatccactgagatgactactgtgaccggtaccaacggtcaaccaactgacgaaactgttattgtcattagaactccaactagtgagggtttgattactacaactaccgaaccatggaccggtactttcacctctacatccactgaggttaccaccatcactggtaccaacggtcaaccaactgacgaaaccgtgattgtcattagaactccaactagtgagggtttgattactacaactaccgaaccatggaccggtactttcacctctacatctactgagatgactactgtcaccggtaccaacggtcaaccaactgacgaaactgttattgttatcagaactccaaccagtgaaggtctaatcagcaccaccactgaaccatggactggtactttcacctctacatctactgaggttaccaccatcactggtaccaacggtcaaccaactgacgaaaccgtgattgtcattagaactccaactagtgagggtttgattactacaactaccgaaccatggaccggaactttcacctctacatccactgagatgactactgtgaccggtaccaacggtcaaccaactgacgaaactgttattgtcattagaactccaactagtgagggtttgattactagaactaccgaaccatggactggtactttcacttctacatctactgaggttaccaccatcaccggtaccaacggtcaaccaactgacgaaactgttattgtcatcagaactccaactactgccatctcatccagtttgtcatcttcttcaggacaaatcaccagctctatcacgtcttcgcgtccaattattaccccattctatcctagcaatggaacttctgtgatttcctcctcagtaatttcttcttcagtcacttcttctctagtcacctcttcttcattcatttcttcctctgtcatttcttcttctacaacaacctccacttctatattctctgaatcatctacatcatccgtcattccaaccagtagttccacctctggttcttctgagagcaaaacgagttcggctagttcttcctcttcttcctcttctatctcttctgaatcaccaaagtctcctacaaattcttcttcatcattaccacctgttaccagtgcgacaacaggccaggaaactgcttcttcattaccacctgctaccactacaaaaacgagcgaacaaaccactttggttaccgtgacatcctgcgaatctcatgtgtgtactgaatccatctcctctgctattgtttccacggccaccgttactgttagcggcgtcacaacagagtataccacgtggtgccctatttctaccacagagacaacaaagcaaaccaaggggacaacagagcaaaccaaggggacaacagagcaaaccacagaaacaacaaaacaaaccacagtagttacaatttcttcttgtgaatctgacatatgctctaagactgcttctccagccattgtgtctacaagcactgctactattaacggcgttaccacagaatacacaacatggtgtcctatttccaccacagaatcgaagcaacaaactacgctagttactgttacttcctgcgaatctggtgtgtgttccgaaactacttcacctgccattgtttcgacggccacggctactgtgaatgatgttgttacggtctatcctacatggagaccacagactacgaatgaacagtctgtcagctctaaaatgaacagtgctaccagtgagacaactaccaatactggggctgctgagacaaaaacagcagtcacctcttcactttcaagattcaatcacgctgaaacacagacagcttccgcgaccgatgtgattggtcacagcagtagtgttgtttctgtatccgaaactggcaacaccatgagtctaacaagttccgggttgagcactatgtcgcaacagcctcgtagcacaccagcaagtagcatggtaggatctagtacagcttctttagaaatttcaacgtatgctggcagtgccaacagcttactggccggtagtggtttaagtgtcttcattgcgtccttattgctggcaattatttaa

SEQ ID NO: 5268 - DNA, 3228 bp, Artificial Sequence
  Description of Artificial Sequence: Synthetic polynucleotide
atgacaattgcacaccactgcatatttttggtaatcttggcctttttggcattgattaatgtggccagtggagccacagaggcgtgcttaccagcaggccagaggaaaagtgggatgaatataaatttttaccagtattctttgaaagattcctccacatattctaatgcagcatatatggcttatggatatgcctccaaaaccaaattgggttctgtcggaggacaaactgatatttccattgattataatattccctgtgttagttcttctggcacatttccttgtcctcaagaagattcctatggaaactggggatgcaaaggaatgggtgcttgttctaatagtcaaggaattgcatactggagtactgatttatttggtttctatactaccccaacaaacgtaaccttagaaatgacaggttattttttaccaccacagacgggttcttacacgttttcttttgcaacagtagatgattctgcaattttaagtgtcggtggtagcattgcgttcgaatgttgtgcacaagaacaacctcccatcacgtctactaacttcacaatcaatggtatcaagccatgggatggaagtctccctgacaatatcacagggactgtctacatgtatgcaggctactattatccgttgaaggttgtttactccaatgccgtttcctggggcacgcttccaattagcgtggaattgcctgatggtactactgttagtgataactttgaagggtacgtttactcttttgacgatgacttgagtcagtctaattgtactatccctgatccttccatacatactactagcactatcacaactaccaccgagccatggaccggtactttcacttctacatccactgagatgaccaccatcaccgatactaacggtcaattaactgatgaaactgtcattgtcatcagaactccaacaacagctagcaccatcacaactaccaccgagccatggaccggtactttcacctctacatccactgagatgactactgtcaccggtaccaacggtcaaccaactgacgaaactgttattgtcattagaactccaactagtgagggtttgattactacaactaccgaaccatggaccggtactttcacctctacatccactgagatgactactgtgaccggtaccaacggtcaaccaactgacgaaactgttattgtcattagaactccaactagtgagggtttgattactacaactaccgaaccatggaccggtactttcacctctacatccactgaggttaccaccatcactggtaccaacggtcaaccaactgacgaaaccgtgattgtcattagaactccaactagtgagggtttgattactacaactaccgaaccatggaccggtactttcacctctacatctactgagatgactactgtcaccggtaccaacggtcaaccaactgacgaaactgttattgttatcagaactccaaccagtgaaggtttgatcagcaccaccactgaaccatggactggtactttcacctctacatctactgaggttaccaccatcactggtaccaacggtcaaccaactgacgaaaccgtgattgtcattagaactccaactagtgagggtttgattactacaactaccgaaccatggaccggaactttcacctctacatccactgagatgactactgtgaccggtaccaacggtcaaccaactgacgaaactgttattgtcattagaactccaactagtgagggtttgattactagaactaccgaaccatggactggtactttcacttctacatctactgaggttaccaccatcaccggtaccaacggtcaaccaactgacgaaactgttattgtcatcagaactccaactactgccatctcttccagtttgtcttcttcttctggacaaatcaccagctctatcacgtcttctcgtccaattattaccccattctatcctagcaatggaacttctgtgatttcctcctctgtaatttcttcttctgtcacttcttctttggtcacctcttcttctttcatttcttcctctgtcatttcttcttctacaacaacctccacttctatattctctgaaagctctacatcttccgtcattccaaccagtagttccacctctggttcttctgagagcaaaacgagttctgctagttcttcctcttcttcctcttctatctcttctgaatctccaaagtctcctacaaattcttcttcttctttaccacctgttaccagtgcgacaacaggccaggaaactgcttcttctttaccacctgctaccactacaaaaacgagcgaacaaaccactttggttaccgtgacatcctgcgaatctcatgtgtgtactgaatccatctcctctgctattgtttccacggccaccgttactgttagcggcgtcacaacagagtataccacgtggtgccctatttctaccacagagacaacaaagcaaaccaaggggacaacagagcaaaccaaggggacaacagagcaaaccacagaaacaacaaaacaaaccacagtagttacaatttcttcttgtgaatctgacatatgctctaagactgcttctccagccattgtgtctacaagcactgctactattaacggcgttaccacagaatacacaacatggtgtcctatttccaccacagaatccaagcaacaaactacgttagttactgttacttcctgcgaatctggtgtgtgttccgaaactacttctcctgccattgtttccacggccacggctactgtgaatgatgttgttacggtctatcctacatggagaccacagactacgaatgaacagtctgtcagctctaaaatgaacagtgctaccagtgagacaactaccaatactggggctgctgagacaaaaacagcagtcacctcttctctttctagattcaatcacgctgaaacacagacagcttccgcgaccgatgtgattggtcacagcagtagtgttgtttctgtatccgaaactggcaacaccatgagtttgacaagttccgggttgagcactatgtctcaacagcctcgtagcacaccagcaagtagcatggtaggatctagtacagcttctttagaaatttctacgtatgctggcagtgccaacagcttattagccggtagtggtttaagtgtcttcattgcgtccttattgttggcaattatttga

SEQ ID NO: 5269 - DNA, 204 bp, Saccharomyces cerevisiae
atgccttatcactatttatttttggcactcttcacctacctggccacgtccaatgttgtttcaggaagtacacaagcatgcctgccagtgggcccgaggaaaaatgggatgaatgtcaacttttataaatactcattactggattcaacaacgtattcctacccgcaatatatgacttctggatatgcctcgaattggaattag

SEQ ID NO: 5270 - DNA, 204 bp, Artificial Sequence
  Description of Artificial Sequence: Synthetic polynucleotide
atgccttatcactatttatttttggcactcttcacctacttggccacgtccaatgttgtttctggaagtacacaagcatgcttaccagtgggcccgaggaaaaatgggatgaatgtcaacttttataaatactctttattagattctacaacgtattcctacccgcaatatatgacttctggatatgcctctaattggaattga

SEQ ID NO: 5271 - DNA, 597 bp, Saccharomyces cerevisiae
atgacaggttactttttaccaccacaaacaagttcttacacgttcaggtttgctaaggtcgatgactctgcaattctatcagtcggtggtaacgttgcgttcgaatgttgtgcacaagaacaacctccaattacatcgacggattttacaatcaatggtattaagccatggcaaggaagtttgcctgataacatcggagggactgtctacatgtatgcaggctactattatccgctgaaggttgtttactccaatgccgtttcctggggcacgcttccaattagcgtggaattgcctgatggtactactgttagtgatgactttgaagggtacgtttactcttttgacgatgatttaagtcagtcaaattgtactatccctgatccttcaaaacatactactagcatcgtcacaactactaccgaactgtggactggtacttttacttctacatctactgaaatgaccaccgtcaccggtactaatggtcaaccaactgacgaaaccgttattgttgccaaagctccaaccactgccacctcatccagtttgtcatcatcttcttcagaacaaatcaccagctctatcacgtcttag

SEQ ID NO: 5272 - DNA, 597 bp, Artificial Sequence
  Description of Artificial Sequence: Synthetic polynucleotide
atgacaggttactttttaccaccacaaacaagttcttacacgttcaggtttgctaaggtcgatgactctgcaattttaagtgtcggtggtaacgttgcgttcgaatgttgtgcacaagaacaacctccaattacaagtacggattttacaatcaatggtattaagccatggcaaggaagtttgcctgataacatcggagggactgtctacatgtatgcaggctactattatccgttgaaggttgtttactccaatgccgtttcctggggcacgcttccaattagcgtggaattgcctgatggtactactgttagtgatgactttgaagggtacgtttactcttttgacgatgatttaagtcagtctaattgtactatccctgatccttccaaacatactactagcatcgtcacaactactaccgaattatggactggtacttttacttctacatctactgaaatgaccaccgtcaccggtactaatggtcaaccaactgacgaaaccgttattgttgccaaagctccaaccactgccacctcttccagtttgagttcttcttcttctgaacaaatcaccagctctatcacgtcttga

SEQ ID NO: 5273 - DNA, 234 bp, Saccharomyces cerevisiae
atgctggcgaaaacgggcgatgtagtggtacagaaggtgccggttatccgtttgtccgtttttcttcattttttttttgtttttcccttttgtcttttgcaccgcttatatatgggtatgaaacaagttcaagaatttataatggaacccaaaggttcagtctttgtagttcgagcgacattgcgcgtttccttagaaaacgctggaaagatattctttaacgagacggagtaa

SEQ ID NO: 5274 - DNA, 234 bp, Artificial Sequence
  Description of Artificial Sequence: Synthetic polynucleotide
atgttggcgaaaacgggcgatgtagtggtacagaaggtgccggttatccgtttgtccgtttttcttcattttttttttgtttttcccttttgtcttttgcaccgcttatatatgggtatgaaacaagttcaagaatttataatggaacccaaaggttctgtctttgtagttagagcgacattgcgcgtttccttagaaaacgctggaaagatattctttaacgagacggagtga

SEQ ID NO: 5275 - DNA, 300 bp, Saccharomyces cerevisiae
atgttgattgatttttgctgtagttatatagcagggacccacggaagagagcgagcgccttctttcacagggacttttgtcagccacgtctccgcggaaaacaattgccgtccgcgtcgcagtgagattacgcagccgtgcgcttcagggacagaaaagaagcatttcgcggctacggagaaacagtgcactaactctctcgagggtagccgcaaagatttcttgtctcttccattaggacatagctatctttttcttttctgtttttggcgtatgatctgttctgagccaaagttatag

SEQ ID NO: 5276 - DNA, 300 bp, Artificial Sequence
  Description of Artificial Sequence: Synthetic polynucleotide
atgttgattgatttttgctgtagttatatagcagggacccacggaagagagagagcgccttctttcacagggacttttgtcagccacgtctccgcggaaaacaattgccgtccgcgtcgcagtgagattacgcagccgtgcgcttctgggacagaaaagaagcatttcgcggctacggagaaacagtgcactaactctctcgagggtagccgcaaagatttcttgtctcttccattaggacatagctatctttttcttttctgtttttggcgtatgatctgttctgagccaaagttatga

SEQ ID NO: 5277 - DNA, 612 bp, Saccharomyces cerevisiae
atgttcaatcgttttaacaaattccaagctgctgtcgctttggccctactctctcgcggcgctctcggtgactcttacaccaatagcacctcctccgcagacttgagttctatcacttccgtctcgtcagctagtgcaagtgccaccgcttccgactcactttcttccagtgacggtaccgtttatttgccatccacaacaattagcggtgatctcacagttactggtaaagtaattgcaaccgaggccgtggaagtcgctgccggtggtaagttgactttacttgacggtgaaaaatacgtcttctcatctgatctaaaagttcacggtgatttggttgtcgaaaagtctgaagcaagctacgaaggtaccgccttcgacgtttctggtgagacttttgaagtttccggtaacttcagtgctgaagaaactggcgctgtctccgcatctatctattcattcacacctagctcgttcaagagcagcggtgacatttctttgagtttgtcaaaggccaagaagggtgaagtcaccttttctccatactctaacgctggtaccttttctttgtcaaatgctattctcaacggtggttctgtttccggtttgtaa

SEQ ID NO: 5278 - DNA, 612 bp, Artificial Sequence
  Description of Artificial Sequence: Synthetic polynucleotide
atgttcaatcgttttaacaaattccaagctgctgtcgctttggccttactctctcgcggcgctctcggtgactcttacaccaatagcacctcctccgcagacttgagttctatcacttccgtcagttctgctagtgcaagtgccaccgcttccgactctctttcttccagtgacggtaccgtttatttgccatccacaacaattagcggtgatctcacagttactggtaaagtaattgcaaccgaggccgtggaagtcgctgccggtggtaagttgactttacttgacggtgaaaaatacgtcttcagttctgatttgaaagttcacggtgatttggttgtcgaaaagtctgaagcaagctacgaaggtaccgccttcgacgtttctggtgagacttttgaagtttccggtaacttcagtgctgaagaaactggcgctgtctccgcatctatctattctttcacacctagctctttcaagagcagcggtgacatttctttgagtttgtccaaggccaagaagggtgaagtcaccttttctccatactctaacgctggtaccttttctttgagcaatgctattctcaacggtggttctgtttccggtttgtga

SEQ ID NO: 5279 - DNA, 294 bp, Saccharomyces cerevisiae
atggaggaccacacccttgtggccatcgttgttttctttgggaatggtgaacctttccatgtgtcgttgtctgtagaaatggtgttcgtgctgcttctttcatccactagaattcatgaggtagtagttcttatatgttataaacttcaacacgccacctggtcttggggtaatatgagcaagaatttctctcttaaaccggatataagtctgagctttctgttggatataatttctataaatgatatatgcatctacggttgcattgcccttacagttgtgtttattttataa

SEQ ID NO: 5280 - DNA, 294 bp, Artificial Sequence
  Description of Artificial Sequence: Synthetic polynucleotide
atggaggaccacacccttgtggccatcgttgttttctttgggaatggtgaacctttccatgtgtctttgtctgtagaaatggtgttcgtgttgcttctttcctccactagaattcatgaggtagtagttcttatatgttataaacttcaacacgccacctggtcttggggtaatatgagcaagaatttctctcttaaaccggatataagtttaagctttttattggatataatttctataaatgatatatgcatctacggttgcattgcccttacagttgtgtttattttatga

SEQ ID NO: 5281 - DNA, 300 bp, Saccharomyces cerevisiae
atgtataaaataactactatatatttgtggctgaaatcatacctttcatttttcatcggcttagataatcttgattttctcaccttaatacgcttttttcaatgtcgtttacaaaacaagctaggtttgcaagatatcctggactttttttgtaatctatgtggccacagtatggttcgcacttgcaacatggtagaggctgcccaaaaacaaaaccgcatcacctttggcagcatttacgtgaaactccatcctcttgtcaaactttgcacaggaatcgtgtgggccccacgagtgtga

SEQ ID NO: 5282 - DNA, 300 bp, Artificial Sequence
  Description of Artificial Sequence: Synthetic polynucleotide
atgtataaaataactactatatatttgtggttgaaatcttacctttcttttttcatcggcttagataatcttgattttctcaccttaatacgcttttttcaatgtcgtttacaaaacaagttgggtttgcaagatatcttggactttttttgtaatttatgtggccacagtatggttcgcacttgcaacatggtagaggctgcccaaaaacaaaaccgcatcacctttggcagcatttacgtgaaactccatcctcttgtcaaactttgcacaggaatcgtgtgggccccaagagtgtga

SEQ ID NO: 5283 - DNA, 1404 bp, Saccharomyces cerevisiae
atgttgaagtcagccgtttattcaattttagccgcttctttggttaatgcaggtaccatacccctcggaaagttatctgacattgacaaaatcggaactcaaacggaaattttcccatttttgggtggttctgggccatactactctttccctggtgattatggtatttctcgtgatttgccggaaagttgtgaaatgaagcaagtgcaaatggttggtagacacggtgaaagataccccactgtcagcaaagccaaaagtatcatgacaacgtggtacaaattgagtaactataccggtcaattcagcggagcattgtctttcttgaacgatgactacgaatttttcattcgtgacaccaaaaacctagaaatggaaaccacacttgccaattcggtcaatgttttgaacccatataccggtgagatgaatgctaagagacacgctcgtgatttcttggcgcaatatggctacatggtcgaaaaccaaaccagttttgccgtttttacgtctaactcgaacagatgtcatgatactgcccagtatttcattgacggtttgggtgataaattcaacatatccttgcaaaccatcagtgaagccgagtctgctggtgccaatactctgagtgcccaccattcgtgtcctgcttgggacgatgatgtcaacgatgacattttgaaaaaatatgataccaaatatttgagtggtattgccaagagattaaacaaggaaaacaagggtttgaatctgacttcaagtgatgcaaacactttttttgcatggtgtgcatatgaaataaacgctagaggttacagtgacatctgtaacatcttcaccaaagatgaattggtccgtttctcctacggccaagacttggaaacttattatcaaacgggaccaggctatgacgtcgtcagatccgtcggtgccaacttgttcaacgcttcagtgaaactactaaaggaaagtgaggtccaggaccaaaaggtttggttgagtttcacccacgataccgatattctgaactatttgaccactatcggcataatcgatgaccaaaataacttgaccgccgaacatgttccattcatggaaaacactttccacagatcctggtacgttccacaaggtgctcgtgtttacactgaaaagttccagtgttccaatgacacctatgttagatacgtcatcaacgatgctgtcgttccaattgaaacctgttctactggtccagggttctcttgtgaaataaatgacttctacggctatgctgaaaagagagtagccggtactgacttcctaaaggtctgtaacgtcagcagcgtcagtaactctactgaattgacctttttctgggactggaataccaagcactacaacgacactttattaaaacagtaa

SEQ ID NO: 5284 - DNA, 1404 bp, Artificial Sequence
  Description of Artificial Sequence: Synthetic polynucleotide
atgttgaagtctgccgtttattctattttagccgcttctttggttaatgcaggtaccatacccctcggaaagttatctgacattgacaaaatcggaactcaaacggaaattttcccatttttgggtggttctgggccatactactctttccctggtgattatggtatttctcgtgatttgccggaaagttgtgaaatgaagcaagtgcaaatggttggtagacacggtgaaagataccccactgtcagcaaagccaaaagtatcatgacaacgtggtacaaattgagtaactataccggtcaattcagcggagcattgtctttcttgaacgatgactacgaatttttcattcgtgacaccaaaaacttggaaatggaaaccacacttgccaattctgtcaatgttttgaacccatataccggtgagatgaatgctaagagacacgctcgtgatttcttggcgcaatatggctacatggtcgaaaaccaaaccagttttgccgtttttacgtctaactccaacagatgtcatgatactgcccagtatttcattgacggtttgggtgataaattcaacatatccttgcaaaccatcagtgaagccgagtctgctggtgccaatactttaagtgcccaccattcttgtcctgcttgggacgatgatgtcaacgatgacattttgaaaaaatatgataccaaatatttgagtggtattgccaagagattaaacaaggaaaacaagggtttgaatttaacttctagtgatgcaaacactttttttgcatggtgtgcatatgaaataaacgctagaggttacagtgacatctgtaacatcttcaccaaagatgaattggtccgtttctcctacggccaagacttggaaacttattatcaaacgggaccaggctatgacgtcgtcagatccgtcggtgccaacttgttcaacgcttctgtgaaattattgaaggaaagtgaggtccaggaccaaaaggtttggttgagtttcacccacgataccgatattttgaactatttgaccactatcggcataatcgatgaccaaaataacttgaccgccgaacatgttccattcatggaaaacactttccacagatcctggtacgttccacaaggtgctcgtgtttacactgaaaagttccagtgttccaatgacacctatgttagatacgtcatcaacgatgctgtcgttccaattgaaacctgttctactggtccagggttctcttgtgaaataaatgacttctacggctatgctgaaaagagagtagccggtactgacttcttgaaggtctgtaacgtcagcagcgtcagtaactctactgaattgacctttttctgggactggaataccaagcactacaacgacactttattaaaacagtga

SEQ ID NO: 5285 - DNA, 1572 bp, Saccharomyces cerevisiae
atggccgccattagagactacaagaccgcactagactttaccaagagcctaccaagaccggatggtttgtcagtgcaggaattgatggactccaagatcagaggtgggttgacttataacgattttttaatcttaccaggtttagtcgattttgcgtcctctgaagttagcctacagaccaagctaaccaggaatattactttaaatattccattagtttcctctccaatggacacggtgacagagtcagaaatggccacttttatggctctgttgggtggtatcggtttcattcaccataactgtaccccagaggaccaagctgacatggtcagaagagtcaagaactatgaaaatgggtttattaacaaccctatagtgatttctccaactacgaccgttggtgaagctaagagcatgaaggaaaagtatggatttgcaggcttccctgtcacgacagatggaaagagaaatgcaaagttggtgggtgtcatcacctctcgtgatatacaattcgttgaggacaactctttactcgttcaggatgtcatgaccaaaaaccctgttaccggcgcacaaggtatcacattatcagaaggtaacgaaattctaaagaaaatcaaaaagggtaggctattggttgttgatgaaaagggtaacttagtttctatgctttcccgaactgatttaatgaaaaatcagaactacccattagcgtccaaatctgccaacaccaagcaactgttatgtggtgcttctattgggactatggacgctgataaagaaagactaagattattggtaaaagctgggttggatgtcgtcatattggattcatcccaaggaaactctatcttcgaattgaacatgctcaagtgggtcaaagagagtttcccaggtctggaagtcatcgctggtaacgttgtcaccagggaacaagctgccaatttgattgctgccggtgcggacggtttgagaattggtatgggaactggctctatttgtattacccaagaagttatggcttgtggtaggccacaaggtacagccgtctacaatgtgtgtgaatttgctaaccaattcggtgttccatgtatggctgatggtggtgttcaaaacattggtcatattaccaaagctttggctcttggttcttctactgttatgatgggtggtatgttggccggtactaccgaatcaccaggtgaatatttctatcaagatggtaaaagattgaaggcgtatcgtggtatgggctccattgacgccatgcaaaagactggtaccaaaggtaatgcatctacctcccgttacttttccgaatcagacagtgttttggtcgcacaaggtgtctccggtgctgtcgttgacaaaggatccattaagaaatttattccatatttgtacaatggtttacaacattcctgtcaagacatcggctgtaggtcgctaactttattaaagaataatgttcaaaggggtaaagttagatttgaattcagaaccgcttctgctcaactagaaggtggcgttcataatttacattcttacgaaaagcgtttacataactga

SEQ ID NO: 5286 - DNA, 1572 bp, Artificial Sequence
  Description of Artificial Sequence: Synthetic polynucleotide
atggccgccattagagactacaagaccgcattggactttaccaagagcttgccaagaccggatggtttgtctgtgcaggaattgatggactccaagatcagaggtgggttgacttataacgattttttaatcttaccaggtttagtcgattttgcgtcctctgaagttagcttacagaccaagttgaccaggaatattactttaaatattccattagtttcctctccaatggacacggtgacagagagtgaaatggccacttttatggctttattgggtggtatcggtttcattcaccataactgtaccccagaggaccaagctgacatggtcagaagagtcaagaactatgaaaatgggtttattaacaaccctatagtgatttctccaactacgaccgttggtgaagctaagagcatgaaggaaaagtatggatttgcaggcttccctgtcacgacagatggaaagagaaatgcaaagttggtgggtgtcatcacctctcgtgatatacaattcgttgaggacaactctttactcgttcaggatgtcatgaccaaaaaccctgttaccggcgcacaaggtatcacattatctgaaggtaacgaaattttgaagaaaatcaaaaagggtaggttattggttgttgatgaaaagggtaacttagtttctatgctttccagaactgatttaatgaaaaatcagaactacccattagcgtccaaatctgccaacaccaagcaattattatgtggtgcttctattgggactatggacgctgataaagaaagattgagattattggtaaaagctgggttggatgtcgtcatattggattcttcccaaggaaactctatcttcgaattgaacatgctcaagtgggtcaaagagagtttcccaggtttggaagtcatcgctggtaacgttgtcaccagggaacaagctgccaatttgattgctgccggtgcggacggtttgagaattggtatgggaactggctctatttgtattacccaagaagttatggcttgtggtaggccacaaggtacagccgtctacaatgtgtgtgaatttgctaaccaattcggtgttccatgtatggctgatggtggtgttcaaaacattggtcatattaccaaagctttggctcttggttcttctactgttatgatgggtggtatgttggccggtactaccgaatctccaggtgaatatttctatcaagatggtaaaagattgaaggcgtatcgtggtatgggctccattgacgccatgcaaaagactggtaccaaaggtaatgcatctacctcccgttacttttccgaaagtgacagtgttttggtcgcacaaggtgtctccggtgctgtcgttgacaaaggatccattaagaaatttattccatatttgtacaatggtttacaacattcctgtcaagacatcggctgtaggtccttgactttattaaagaataatgttcaaaggggtaaagttagatttgaattcagaaccgcttctgctcaattggaaggtggcgttcataatttacattcttacgaaaagcgtttacataactga

SEQ ID NO: 5287 - DNA, 1812 bp, Saccharomyces cerevisiae
atggataggaaaaggtcttttgaaaaaattgtcgtttccgtcatggtcgggaaaaatgtacaaaagttcctgacgtttgttgaagacgaaccagatttccagggcggaccaatcccttcaaagtatcttattcccaagaaaatcaacttgatggtctacacgttgtttcaagtgcatactttgaaattcaatagaaaggattacgataccctttctcttttttacctcaacagaggatactataatgagttgagtttccgtgtcctggaacgttgttacgaaatagcgagtgccaggccgaacgacagctctacgatgcgtactttcactgactttgtttctggcacacctattgtaaggagtcttcagaaaagcaccataaggaaatatggatacaatttggcaccctacatgttcttgttactacacgtagatgagctatcgattttttctgcataccaagcaagtttacctggcgaaaagaaagtcgacacagagcggctgaagcgtgatctatgcccacgtaaacccactgagataaagtacttttcacagatatgtaacgatatgatgaacaaaaaggaccgattgggtgatgttttagctacagcgcaacgtatacgtcgacgatacaacaagaacggttcatcggagcctcgactaaagacgcttgacggactcacttccgagcgctggattcaatggttaggccttgaaagcgactaccattgttcattctctagtactcggaatgcggaagacgtagtggcaggtgaggcggcgagttcagatcatgatcaaaaaatttcaagagtaacgcgaaaaaggccccgagagcccaagagtacaaacgatatcctcgtcgcaggccggaaactctttggcagctcctttgaattcagggacttgcatcagttgcgcttatgtcatgaaatatacatggcagacacaccctctgtggcagtacaggccccaccgggctatggtaagacggagttatttcatctccccttgatagcactggcatctaagggcgacgtgaaatatgtgtcgtttctgtttgtaccgtacacagtgttgcttgctaattgcatgatcaggttgggccgacgcggttgcttgaatgtggcccctgtaagaaactttattgaagaaggttgcgatggcgttactgatttatacgtggggatctacgatgatcttgctagcactaatttcacagacaggatagctgcgtgggagaatattgttgagtgcacctttaggaccaacaacgtaaaattgggttacctcattgtagatgagtttcacaactttgaaacggaggtctaccggcagtcgcaatttgggggcataactaaccttgattttgacgcttttgagaaagcaatctttttgagcggcacagcccctgaggctgttgctgatgctgcgttgcagcgtattgggcttacgggactggccaagaagtcgatggacatcaacgagctcaaacggtcggaagatctcagcagaggtctatccagctatccaacacggatgtttaatctaatcaaggagaaatccgaggtgcctttagggcatgttcataaaatttggaagaaagtggaatcacagcccgaagaagcactgaagcttcttttagccctctttgaaattgaaccagagtcgaaggccattgtagttgcaagcacaaccaacgaagtggaagaattggcctgctcttggagaaagtattttagggtggtatggatacacgggaagcttgggtgctgcagaaaaggtgtctcgcacaaaggagtttgtcactga

SEQ ID NO: 5288 - DNA, 1812 bp, Artificial Sequence
  Description of Artificial Sequence: Synthetic polynucleotide
atggataggaaaaggtcttttgaaaaaattgtcgtttccgtcatggtcgggaaaaatgtacaaaagttcttgacgtttgttgaagacgaaccagatttccagggcggaccaatcccttctaagtatcttattcccaagaaaatcaacttgatggtctacacgttgtttcaagtgcatactttgaaattcaatagaaaggattacgataccctttctcttttttacctcaacagaggatactataatgagttgagtttccgtgtcttggaacgttgttacgaaatagcgagtgccaggccgaacgacagctctacgatgcgtactttcactgactttgtttctggcacacctattgtaaggagtcttcagaaaagcaccataaggaaatatggatacaatttggcaccctacatgttcttgttattacacgtagatgagttatccattttttctgcataccaagcaagtttacctggcgaaaagaaagtcgacacagagaggttaaagcgtgatttatgcccacgtaaacccactgagataaagtacttttcccagatatgtaacgatatgatgaacaaaaaggacagattgggtgatgttttagctacagcgcaacgtatacgtaggcgttacaacaagaacggttcttctgagcctcgtttgaagacgcttgacggactcacttccgagcgctggattcaatggttaggccttgaaagcgactaccattgttctttctctagtactagaaatgcggaagacgtagtggcaggtgaggcggcgagttctgatcatgatcaaaaaatttctagagtaacgagaaaaaggcccagagagcccaagagtacaaacgatatcctcgtcgcaggcagaaaactctttggcagctcctttgaattcagggacttgcatcagttgcgcttatgtcatgaaatatacatggcagacacaccctctgtggcagtacaggccccaccgggctatggtaagacggagttatttcatctccccttgatagcattggcatctaagggcgacgtgaaatatgtgtcctttttgtttgtaccgtacacagtgttgcttgctaattgcatgatcaggttgggcaggcgcggttgcttgaatgtggcccctgtaagaaactttattgaagaaggttgcgatggcgttactgatttatacgtggggatctacgatgatcttgctagcactaatttcacagacaggatagctgcgtgggagaatattgttgagtgcacctttaggaccaacaacgtaaaattgggttacctcattgtagatgagtttcacaactttgaaacggaggtctacagacagtctcaatttgggggcataactaaccttgattttgacgcttttgagaaagcaatctttttgagcggcacagcccctgaggctgttgctgatgctgcgttgcagcgtattgggcttacgggattggccaagaagtctatggacatcaacgagctcaaaagaagtgaagatctcagcagaggtttatccagctatccaacaagaatgtttaatttgatcaaggagaaatccgaggtgcctttagggcatgttcataaaatttggaagaaagtggaatctcagcccgaagaagcattgaagcttcttttagccctctttgaaattgaaccagagtctaaggccattgtagttgcaagcacaaccaacgaagtggaagaattggcctgctcttggagaaagtattttagggtggtatggatacacgggaagcttgggtgctgcagaaaaggtgtctcccacaaaggagtttgtcactga

SEQ ID NO: 5289 - DNA, 1875 bp, Saccharomyces cerevisiae
atggacttgaatcaaagaaaggaaaaaaagggccagcatgttggatgctgtggctccaggacagacctgtctgctgacacagtggaactgatagaaagaatggacagattggctgaaaatcaggcgacagcttccatgtcgatcgttgcgttaccgtctagcttccaggagagcaatagcagtgacaggtgcagaaagtattgcagcagtgatgaggacagcgacacgtgcattcatggtagtgctaatgccagtaccaatgcgactaccaactccagcactaatgctactaccactgccagcatcaacgtcaggactagtgcgactaccactgccagcatcaacgtcaggactagtgcgactaccactgaaagtaccaactccaacactaatgctactaccactgaaagtaccaactccagcactaatgctactaccactgccagcatcaacgtcaggactagtgcgactaccactgaaagtaccaactccaacactagtgctactaccaccgaaagtaccgactccaacactagtgctactaccaccgaaagtaccgactccaacactagtgctactaccactgctagcaccaactccagcactaatgccactaccactgctagcaccaactccagcactaatgccactaccactgaaagtaccaacgctagtgccaaggaggacgccaataaagatggcaatgctgaggataatagattccatccagtcaccgacattaacaaagagtcgtataagcggaaagggagtcaaatggttttgctagagagaaagaaactgaaagcacaatttcccaatacttccgagaatatgaatgtcttacagtttcttggatttcggtctgacgaaattaaacatcttttcctctatggtattgacatatacttctgcccagagggagtattcacacaatacggattatgcaagggctgtcaaaagatgttcgagctctgtgtctgttgggctggccagaaagtatcgtatcggaggatggcttgggaagcactagctgtggagagaatgctgcgaaatgacgaggaatacaaagaatacttggaagacatcgagccatatcatggggaccctgtagggtatttgaaattttttagcgtaaaaaggggagagatctactctcagatacagagaaattatgcttggtacctggccattactagaagaagagaaacaattagtgtattggattcgacaagaggcaagcaagggagccaagttttccgcatgtctggaaggcagatcaaagagttgtattataaagtatggagcaacttgcgtgaatcgaagacagaggtgctgcagtactttttgaactgggacgaaaaaaagtgccgggaagaatgggaggcaaaagacgatacggtctttgtggaagcgctcgagaaagttggagtttttcagcgtttgcgttccatgacgagcgctggactgcagggtccgcagtacgtcaagctgcagtttagcaggcatcatcgacagttgaggagcagatatgaattaagtctaggaatgcacttgcgagatcagcttgcgctgggagttaccccatctaaagtgccgcattggacggcattcctgtcgatgctgatagggctgttctacaataaaacatttcggcagaaactggaatatcttttggagcagatttcggaggtgtggttgttaccacattgggttgatttggcaaacgttgaagttctcgctgcagataacacgagggtaccgctgtacatgctgatggtagcggttcacaaagagctggatagcgatgatgttccagacggtagatttgatataatattactatgtagagattcgagcagagaagttggagagtga

SEQ ID NO: 5290 - DNA, 1875 bp, Artificial Sequence
  Description of Artificial Sequence: Synthetic polynucleotide
atggacttgaatcaaagaaaggaaaaaaagggccagcatgttggatgctgtggctccaggacagacttgtctgctgacacagtggaattgatagaaagaatggacagattggctgaaaatcaggcgacagcttccatgtccatcgttgcgttaccgtctagcttccaggagagcaatagcagtgacaggtgcagaaagtattgcagcagtgatgaggacagcgacacgtgcattcatggtagtgctaatgccagtaccaatgcgactaccaactccagcactaatgctactaccactgccagcatcaacgtcaggactagtgcgactaccactgccagcatcaacgtcaggactagtgcgactaccactgaaagtaccaactccaacactaatgctactaccactgaaagtaccaactccagcactaatgctactaccactgccagcatcaacgtcaggactagtgcgactaccactgaaagtaccaactccaacactagtgctactaccaccgaaagtaccgactccaacactagtgctactaccaccgaaagtaccgactccaacactagtgctactaccactgctagcaccaactccagcactaatgccactaccactgctagcaccaactccagcactaatgccactaccactgaaagtaccaacgctagtgccaaggaggacgccaataaagatggcaatgctgaggataatagattccatccagtcaccgacattaacaaagagtcttataagagaaaagggagtcaaatggttttgttggagagaaagaaattgaaagcacaatttcccaatacttccgagaatatgaatgtcttacagtttcttggatttagatctgacgaaattaaacatcttttcctctatggtattgacatatacttctgcccagagggagtattcacacaatacggattatgcaagggctgtcaaaagatgttcgagctctgtgtctgttgggctggccagaaagtatcttatagaaggatggcttgggaagcattggctgtggagagaatgttaagaaatgacgaggaatacaaagaatacttggaagacatcgagccatatcatggggaccctgtagggtatttgaaattttttagcgtaaaaaggggagagatctactctcagatacagagaaattatgcttggtacttggccattactagaagaagagaaacaattagtgtattggattctacaagaggcaagcaagggagccaagttttccgcatgtctggaaggcagatcaaagagttgtattataaagtatggagcaacttgcgtgaatccaagacagaggtgttacagtactttttgaactgggacgaaaaaaagtgcagagaagaatgggaggcaaaagacgatacggtctttgtggaagcgctcgagaaagttggagtttttcagcgtttgcgttccatgacgagcgctggattacagggtccgcagtacgtcaagttacagtttagcaggcatcatagacagttgaggagcagatatgaattaagtttgggaatgcacttgagagatcagcttgcgttgggagttaccccatctaaagtgccgcattggacggcattcttgtccatgttgatagggcttttctacaataaaacatttagacagaaattagaatatcttttggagcagatttctgaggtgtggttgttaccacattgggttgatttggcaaacgttgaagttctcgctgcagataacacgagggtaccgttgtacatgttaatggtagcggttcacaaagagttagatagcgatgatgttccagacggtagatttgatataatattattatgtagagattctagcagagaagttggagagtga

SEQ ID NO: 5291 - DNA, 5277 bp, Saccharomyces cerevisiae
atgaaagtttccgataggcgtaagtttgaaaaagcaaactttgacgagtttgagtcggctctaaataacaaaaacgacttggtacattgtccctcaataactttatttgaatcgatccccacggaagtgcggtcattctacgaagacgaaaagtctggcctaatcaaagtggtaaaattcagaactggtgcaatggataggaaaaggtcttttgaaaaagttgtcatttccgtcatggtcgggaaaaatgtaaaaaagttcctgacgtttgttgaagacgaaccagatttccagggcggaccaatcccttcaaagtatcttattcccaagaaaatcaacttgatggtctacacgttgtttcaagtgcatactttgaaattcaatagaaaggattacgataccctttctcttttttacctcaacagaggatactataatgagttgagtttccgtgtcctggaacgttgtcacgaaatagcgagtgctaggccgaacgacagctctacgatgcgtactttcactgactttgtttccggcgcacctattgtaaggagtcttcagaaaagcaccataaggaaatatgggtacaatttggcaccctacatgtttttgttactacacgtagatgagctatcgattttttctgcataccaagcaagtttacctggcgaaaagaaagtcgacacagagcggctgaagcgtgatctatgcccacgtaaacccattgagataaagtacttttcacagatatgtaacgatatgatgaacaaaaaggaccgattgggtgatattttgcatattatcttgcgagcatgtgcactcaatttcggggcgggtccccgtggtggcgctggtgacgaagaggatcgatctattacgaatgaagaacccattattccctctgtggacgagcatggcctgaaagtatgtaagttgcgcagtcctaacactccacgaagactcagaaaaacactagatgccgtgaaagctttattggtgtcgtcttgtgcttgtaccgcaagggatttagatatatttgatgacaacaacggcgttgcaatgtggaaatggatcaaaattctgtaccacgaagtagcgcaggaaaccacgctgaaggactcttatagaataactttggtaccttcttctgatggtatatcactactcgcttttgccggtcctcagcgcaacgtatacgtcgatgatacaacaagacgcatccaactgtacactgattacaacaagaacggttcatcggagcctcgactaaagacgcttgacggactcacctcagattacgtgttttattttgtcactgtgctaaggcaaatgcaaatatgtgcgcttggtaacagttatgacgcttttaatcatgatccttggatggatgtggtgggatttgaggatccaaatcaagtaacaaatcgagacatttcgaggatagttttgtattcctacatgtttctgaataccgcgaagggctgtctggttgaatacgcaacttttcggcagtacatgagggaacttccgaagaatgcacctcagaagctgaattttcgggagatgcgtcaggggttgattgccctaggacggcactgcgtaggtagcagatttgaaacagatttgtacgagtcggcgacgagtgaactcatggccaatcattccgttcaaacagggcgaaatatttacggtgtggattccttttcgttaactagtgtcagtgggacgaccgccactttattgcaggaacgagcttccgagcgctggattcagtggttaggccttgaaagcgactaccattgttcattctccagtactcggaatgcggaagacgtagtggcaggtgaggcggcgagttcaaatcatcatcaaaaaatttcaagagtaacgcgaaaaaggccccgagagcccaagagtacaaacgatatcctcgtcgcaggccagaaactctttggcagctcctttgaattcagggacttgcatcagttgcgcttatgttatgaaatatacatggcagacacaccctctgtggcagtacaggccccaccgggctatggtaagacggagttatttcatctccccttgatagcactggcatctaagggcgacgtggaatatgtgtcgtttctgtttgtaccgtacacagtgttgcttgctaattgcatgatcaggttgggccgatgcggttgcttgaatgtggcccctgtaagaaactttattgaagaaggttacgatggcgttactgatttatacgtggggatctacgatgatcttgctagcactaatttcacagacaggatagctgcgtgggagaatattgttgagtgcacctttaggaccaacaacgtaaaattgggttacctcattgtagatgagtttcacaactttgaaacggaggtctaccggcagtcgcaatttgggggcataactaaccttgattttgacgcttttgagaaagcaatctttttgagcggcacagcccctgaggctgtagctgatgctgcgttgcagcgtattgggcttacgggactggccaagaaatcgatggacatcaacgagctcaaacggtcggaagatctcagcagaggtctatccagctatccaacacggatgtttaatctaatcaaggagaaatccgaggtgcctttagggcatgttcataaaattcggaagaaagtggaatcacagcccgaagaagcactgaagcttcttttagccctctttgaaagtgaaccagagtcgaaggccattgtagttgcaagcacaaccaacgaagtggaagaattggcctgctcttggagaaagtattttagggtggtatggatacacgggaagctgggtgctgcagaaaaggtgtctcgcacaaaggagtttgtcactgacggtagcatgcaagttctcatcggaacgaaattagtgactgaaggaattgacattaagcaattgatgatggtgatcatgcttgataatagacttaatattattgagctcattcaaggtgtagggagactaagagatgggggcctctgttatctattatctagaaaaaacagttgggcggcaaggaatcgtaagggtgaattaccaccgattaaggaaggctgtataaccgaacaggtacgcgagttctatggacttgaatcaaagaaaggaaaaaagggccagcatgttggatgctgtggctccaggacagacctgtctgctgacacagtggaactgatagaaagaatggacagattggctgaaaaacaggcgacagcttccatgtcgatcgttgcgttaccgtctagcttccaggagagcaatagcagtgacaggtacagaaagtattgcagcagtgatgaggacagcaacacgtgcattcatggtagtgctaatgccagtactaacgccagtactaatgcgattaccactgctagtaccaacgtcaggactaatgcgactaccaatgctagtactaatgcgactaccaatgccagtaccaatgccagtactaatgcgaccaccaatgccagtaccaatgcgactaccaactccagcactaatgctactaccactgccagcaccaacgtcaggactagtgctactaccactgccagcatcaacgtcaggactagtgctactaccactgaaagtaccaactccagcactaatgcgactaccactgaaagtaccaactccagcactaatgctactaccaccgaaagtaccaactccaacactagtgctactaccactgccagcatcaacgtcaggactagtgctactaccactgaaagtaccaactccagcactagtgcgactaccactgccagcatcaacgtcaggactagtgctactaccactaaaagtatcaactctagcactaatgctactaccactgaaagtaccaactccaacactaatgctactaccactgaaagtaccaactccagcactaatgctactaccactgaaagtaccaactccagcactaatgctactaccactgaaagtaccaactccaacactagtgctgctaccaccgaaagtaccaactccaacactagtgctactaccactgaaagtaccaacgctagtgccaaggaggacgccaataaagatggcaatgctgaggataatagattccatccagtcaccgacattaacaaagagtcgtataagcggaaagggagtcaaatggttttgctagagagaaagaaactgaaagcacaatttcccaatacttccgagaatatgaatgtcttacagtttcttggatttcggtctgacgaaattaaacatcttttcctctatggtattgacatatacttctgcccagagggagtgttcacacaatacggattatgcaagggctgtcaaaagatgttcgagctctgtgtctgttgggctggccagaaagtatcgtatcggaggatagcttgggaagcactagctgtggagagaatgctgcgaaatgacgaggaatacaaagaatacttggaagacatcgagccatatcatggggaccctgtaggatatttgaaatattttagcgtaaaaaggagagagatctactctcagatacagagaaattatgcttggtacctggccattactagaagaagagaaacaattagtgtattggattcgacaagaggcaagcaagggagccaagttttccgcatgtctggaaggcagatcaaagagttgtattttaaagtatggagcaacttgcgtgaatcgaagacagaggtgctgcagtactttttgaactgggacgaaaaaaagtgccaggaagaatgggaggcaaaagacgatacggttgttgtggaagcgctcgagaaaggtggagtttttcagcgtttgcgttccatgacgagcgctggactgcagggtccgcagtacgtcaagctgcagtttagcaggcatcatcgacagttgaggagcagatatgaattaagtctaggaatgcacttgcgagatcagattgcgctgggagttaccccatctaaagtgccgcattggacggcattcctctcgatgctgatagggctgttctacaataaaacatttcggcagaaactggagtatcttttggagcagatttcggaggtgtggttgttaccacattggcttgatttggcaaacgttgaagttctcgctgcagatgacacgagggtaccactgtacatgctgatggtagcggttcacaaagagctggatagcgatgatgttccagacggtagatttgatatattattatgtagggattcgagcagagaagttggagagtga

SEQ ID NO: 5292 - DNA, 5277 bp, Artificial Sequence
  Description of Artificial Sequence: Synthetic polynucleotide
atgaaagtttccgataggcgtaagtttgaaaaagcaaactttgacgagtttgagtctgctttgaataacaaaaacgacttggtacattgtccctccataactttatttgaaagtatccccacggaagtgagatctttctacgaagacgaaaagtctggcttaatcaaagtggtaaaattcagaactggtgcaatggataggaaaaggtcttttgaaaaagttgtcatttccgtcatggtcgggaaaaatgtaaaaaagttcttgacgtttgttgaagacgaaccagatttccagggcggaccaatcccttctaagtatcttattcccaagaaaatcaacttgatggtctacacgttgtttcaagtgcatactttgaaattcaatagaaaggattacgataccctttctcttttttacctcaacagaggatactataatgagttgagtttccgtgtcttggaacgttgtcacgaaatagcgagtgctaggccgaacgacagctctacgatgcgtactttcactgactttgtttccggcgcacctattgtaaggagtcttcagaaaagcaccataaggaaatatgggtacaatttggcaccctacatgtttttgttattacacgtagatgagttatccattttttctgcataccaagcaagtttacctggcgaaaagaaagtcgacacagagaggttaaagcgtgatttatgcccacgtaaacccattgagataaagtacttttcccagatatgtaacgatatgatgaacaaaaaggacagattgggtgatattttgcatattatcttgagagcatgtgcactcaatttcggggcgggtccccgtggtggcgctggtgacgaagaggatagatctattacgaatgaagaacccattattccctctgtggacgagcatggcttgaaagtatgtaagttgcgcagtcctaacactccaagaagactcagaaaaacattagatgccgtgaaagctttattggtgtcttcttgtgcttgtaccgcaagggatttagatatatttgatgacaacaacggcgttgcaatgtggaaatggatcaaaattttataccacgaagtagcgcaggaaaccacgttgaaggactcttatagaataactttggtaccttcttctgatggtatatctttactcgcttttgccggtcctcagcgcaacgtatacgtcgatgatacaacaagacgcatccaattgtacactgattacaacaagaacggttcttctgagcctcgtttgaagacgcttgacggactcacctctgattacgtgttttattttgtcactgtgttaaggcaaatgcaaatatgtgcgcttggtaacagttatgacgcttttaatcatgatccttggatggatgtggtgggatttgaggatccaaatcaagtaacaaatagagacatttctaggatagttttgtattcctacatgtttttgaataccgcgaagggctgtttggttgaatacgcaacttttagacagtacatgagggaacttccgaagaatgcacctcagaagttgaattttagagagatgcgtcaggggttgattgccttaggaagacactgcgtaggtagcagatttgaaacagatttgtacgagtctgcgacgagtgaactcatggccaatcattccgttcaaacagggagaaatatttacggtgtggattccttttctttaactagtgtcagtgggacgaccgccactttattgcaggaaagagcttccgagcgctggattcagtggttaggccttgaaagcgactaccattgttctttctccagtactagaaatgcggaagacgtagtggcaggtgaggcggcgagtagtaatcatcatcaaaaaatttctagagtaacgagaaaaaggcccagagagcccaagagtacaaacgatatcctcgtcgcaggccagaaactctttggcagctcctttgaattcagggacttgcatcagttgcgcttatgttatgaaatatacatggcagacacaccctctgtggcagtacaggccccaccgggctatggtaagacggagttatttcatctccccttgatagcattggcatctaagggcgacgtggaatatgtgtcctttttgtttgtaccgtacacagtgttgcttgctaattgcatgatcaggttgggccgttgcggttgcttgaatgtggcccctgtaagaaactttattgaagaaggttacgatggcgttactgatttatacgtggggatctacgatgatcttgctagcactaatttcacagacaggatagctgcgtgggagaatattgttgagtgcacctttaggaccaacaacgtaaaattgggttacctcattgtagatgagtttcacaactttgaaacggaggtctacagacagtctcaatttgggggcataactaaccttgattttgacgcttttgagaaagcaatctttttgagcggcacagcccctgaggctgtagctgatgctgcgttgcagcgtattgggcttacgggattggccaagaaatctatggacatcaacgagctcaaaagaagtgaagatctcagcagaggtttatccagctatccaacaagaatgtttaatttgatcaaggagaaatccgaggtgcctttagggcatgttcataaaattagaaagaaagtggaatctcagcccgaagaagcattgaagcttcttttagccctctttgaaagtgaaccagagtctaaggccattgtagttgcaagcacaaccaacgaagtggaagaattggcctgctcttggagaaagtattttagggtggtatggatacacgggaagttgggtgctgcagaaaaggtgtctcgcacaaaggagtttgtcactgacggtagcatgcaagttctcatcggaacgaaattagtgactgaaggaattgacattaagcaattgatgatggtgatcatgcttgataatagacttaatattattgagctcattcaaggtgtagggagattgagagatgggggcctctgttatcttttatctagaaaaaacagttgggcggcaaggaatcgtaagggtgaattaccaccgattaaggaaggctgtataaccgaacaggtacgcgagttctatggacttgaatccaagaaaggaaaaaagggccagcatgttggatgctgtggctccaggacagacttgtctgctgacacagtggaattgatagaaagaatggacagattggctgaaaaacaggcgacagcttccatgtccatcgttgcgttaccgtctagcttccaggagagcaatagcagtgacaggtacagaaagtattgcagcagtgatgaggacagcaacacgtgcattcatggtagtgctaatgccagtactaacgccagtactaatgcgattaccactgctagtaccaacgtcaggactaatgcgactaccaatgctagtactaatgcgactaccaatgccagtaccaatgccagtactaatgcgaccaccaatgccagtaccaatgcgactaccaactccagcactaatgctactaccactgccagcaccaacgtcaggactagtgctactaccactgccagcatcaacgtcaggactagtgctactaccactgaaagtaccaactccagcactaatgcgactaccactgaaagtaccaactccagcactaatgctactaccaccgaaagtaccaactccaacactagtgctactaccactgccagcatcaacgtcaggactagtgctactaccactgaaagtaccaactccagcactagtgcgactaccactgccagcatcaacgtcaggactagtgctactaccactaaaagtatcaactctagcactaatgctactaccactgaaagtaccaactccaacactaatgctactaccactgaaagtaccaactccagcactaatgctactaccactgaaagtaccaactccagcactaatgctactaccactgaaagtaccaactccaacactagtgctgctaccaccgaaagtaccaactccaacactagtgctactaccactgaaagtaccaacgctagtgccaaggaggacgccaataaagatggcaatgctgaggataatagattccatccagtcaccgacattaacaaagagtcttataagagaaaagggagtcaaatggttttgttggagagaaagaaattgaaagcacaatttcccaatacttccgagaatatgaatgtcttacagtttcttggatttagatctgacgaaattaaacatcttttcctctatggtattgacatatacttctgcccagagggagtgttcacacaatacggattatgcaagggctgtcaaaagatgttcgagctctgtgtctgttgggctggccagaaagtatcttatagaaggatagcttgggaagcattggctgtggagagaatgttaagaaatgacgaggaatacaaagaatacttggaagacatcgagccatatcatggggaccctgtaggatatttgaaatattttagcgtaaaaaggagagagatctactctcagatacagagaaattatgcttggtacttggccattactagaagaagagaaacaattagtgtattggattctacaagaggcaagcaagggagccaagttttccgcatgtctggaaggcagatcaaagagttgtattttaaagtatggagcaacttgcgtgaatccaagacagaggtgttacagtactttttgaactgggacgaaaaaaagtgccaggaagaatgggaggcaaaagacgatacggttgttgtggaagcgctcgagaaaggtggagtttttcagcgtttgcgttccatgacgagcgctggattacagggtccgcagtacgtcaagttacagtttagcaggcatcatagacagttgaggagcagatatgaattaagtttgggaatgcacttgagagatcagattgcgttgggagttaccccatctaaagtgccgcattggacggcattcctctctatgttgatagggcttttctacaataaaacatttagacagaaattagagtatcttttggagcagatttctgaggtgtggttgttaccacattggcttgatttggcaaacgttgaagttctcgctgcagatgacacgagggtaccattgtacatgttaatggtagcggttcacaaagagttagatagcgatgatgttccagacggtagatttgatatattattatgtagggattctagcagagaagttggagagtga

SEQ ID NO: 5293 - DNA, 363 bp, Saccharomyces cerevisiae
atggtcaaattaacttcaatcgctgctggtgtcgctgccatcgctgctactgcttccgcaaccaccactctagctcaatctgacgaaagagtcaacttggttgaattgggtgtctacgtctctgatatcagagctcacttggcccaatactacatgttccaagccgcacacccaactgaaacctacccagtcgaagttgctgaagccgttttcaactacggtgacttcaccaccatgttgactggtatttctccagaccaagtgaccagaatgatcaccggtgtcccatggtactccagcagattaaagccagccatctccagtgctctatccaaggacggtatctacactatcgcaaactag

SEQ ID NO: 5294 - DNA, 363 bp, Artificial Sequence
  Description of Artificial Sequence: Synthetic polynucleotide
atggtcaaattaacttctatcgctgctggtgtcgctgccatcgctgctactgcttccgcaaccaccactttggctcaatctgacgaaagagtcaacttggttgaattgggtgtctacgtctctgatatcagagctcacttggcccaatactacatgttccaagccgcacacccaactgaaacctacccagtcgaagttgctgaagccgttttcaactacggtgacttcaccaccatgttgactggtatttctccagaccaagtgaccagaatgatcaccggtgtcccatggtactccagcagattaaagccagccatctccagtgctttgtccaaggacggtatctacactatcgcaaactga

SEQ ID NO: 5295 - DNA, 4650 bp, Saccharomyces cerevisiae
atggcattgtttcgtgccctgtatattatttgggtattcctactcattccactgtccaatgcagaagaattcacccccaaggttaccagaactttgtcaagatatgtattcgatatagtaaactttgatgattcaaacactttgatcagagcagaagaagactctgtcgagataagttttgatgctggagaaaattggaaaacaatagatgagattgaagagcctatcgagtcatttgttgttgatcccttccgtgggcatgatagagcttttgctttcgtgaaaacggcaccaaaattttacgtcacggatgatcaaggtaaatcgtggaggcctttgactatacccatttctgagaaagcatcgaattatttttgcgacgtaactactcaccctataaaaaagaagcatcttattattcgttgtgatttgttgacaataaaaaactcaggcttaatgtatgttggaagagagatttacacaactaatgatggagtatccttttcccaagttaaaccttcttttggaaaaattgatggtcatattagcacggcacgctgtgactttattaaatctagtgaggattctgatctgggcggtaatgatgcttcgatactctgtcttttccgaaacactgagtacattgaaagtacaggctcaactattgacaagtctgaattgattttaagtgccgatggaggtgaaacattcaaagaattagtccagttcaaagataaggttgttagtcgatacgagatacttaagcatcatgtgatcgttttgacacaagatgatatgtataatgaaatgtcatcaacaaacatttggatatccaatgatgtatccacttttcaagtggctcgtacacctactaagatacggcacgttaatatgggacaaattcatgaagattccatcggaagaatcgttttacctgtatctagagaaagagatgatgaagacagcaaccaaccgggagctgctgaagtgttaatatcagattctgaaggactaaaatttttgcctataaattggataccaaacaatcagtttggatatatcaatgtagcttatccaggtttcttaaaaggaacattttttggttcgtttcatcccttcattgaatattctgatagaaaaaggaaatacagccgacagaaagtaagagaggaaactaaagtatctgttgataacggtctcacatggacaaacttgaaagttgttgaccgggaaaatgtagatttatttggttgtgatgtcactaaacccgagagatgttcgcttcagactcatttctatgatctaagaaatttaaatccctctgccggaatcatgatgatatcgggtattgttggcgacggcagtgcatacaattggaaagaagaaaaaactttcatctccagggatagtggtttaacatggaggttagtccataattccactggtttatatactactggtgatctgggaaatattatcatgtatattccatatcgttcgaatgaaaatggcgatgtgccttctaaattttattattccttggatcaaggtaagacatggggtgaatatgatctaatcatgcctatttatccatacagattagtcagcacaatatcagatggatctggttcaaaatttattctaacaggaacgtccattacagaagatccaatattcattacatattcaattgatttttcagcggtatttgattataaatcatgtgaagagggtgattttgaagattggaatctagcagatggaaaatgtgttaatggcgccaaatacaagtacagaaggaggaaacaggacgcccagtgtttggtaaaaaaagcattcaaagatttgagtttagatgaaacgccttgtaacagttgtactggatccgactacgaatgttcgtttgaattcgttagagatgcgaagggtgactgtataccagattataatctgattgccctttccgatatatgtgacaaatcgaagggtaaatctgtgttagtaaagccactacaattaatcaaaggtgataaatgtaaaacacctatgaaaattgaatccgtagacattccgtgtgacgaaattccaaaggagggttcgagtgacaaggaaatagtgactactgaaaacaaattcgactttgaaattaaattttaccaatacttcgatacagttgccgacgaatctttggtcatgctgaattcgataggagacgcctatatatcccacgatggtggacaaacgataaaaaggtttgacactgacggcgaaaaaattgtcgaaatcgtgtttaacccatacttcaattcttcagcatatttgtttggctctaaaggtaacatattcttaacacacgatagaggatactctttcatgatagctaaattacctgaagccaggcaattaggcatgccactagattttagtgctaaagcacaggatacttttatttactatggtggtaagaattgtgaatcaattttaagtccagaatgtcatgcagtggcatacctcaccaaagatgggggtgaaacttttacagaaatgcttgataatgcaattcattgtgagtttgcaggaacactattcaaatatccgtcaaatgacgatatggttatgtgccaagtaaaggaaaagttttcgcaaacaagaagtttagtttcttctactgactttttccaagatgatagaaaaactgtctttgaaaacattatcggctacttgtctactggtggctatatcattgttgccgtacctcatgaagacaatgaattgagggcgtatgtaactaatgatggtgctgagtttaccgaggcaaaattcccatatgatgaagatattggtaagcaagacgcattcactattttaggatctgaggaaggatcaatatttttacatttagcaacaaacttggaatcaggacacgatttcggaaaccttttgaaatccaactcgaatggtacttcttttgtcaccttagagcatgccgttaatagaaacacattcggttatgtggactttgaaaaagttcaaggtcttgaaggtattattatcaccaacatcgtttcgaatagcgaaaaggttggcgagaacaaggaagacgaacaattgaagacgaaaatcaccttcaatgacggttcagattggaactttttgaagcctccaaagaaggattcggaagggaaaaagtttccctgtgattctgtgtcattagataaatgttctctacatttgcatggttacactgaacgtaaggatatcagggatacatattcctctggctccgcgttaggaatgatgtttggtgtcggaaatgttggcgataggcttctaccatatgaggagtgttccacttttctaaccactgatggaggagagacgtggactgaggttaaaaaaggcccccatcaatgggagtacggtgatcatggtggagtcttggttttggtccccgaaaacgcagaaactgattctatttcttactccaccgattttggtaaaacatggaaagattataaattctgtggcgacaaagtcctcgtaaaggatataatcaccgttcccagagattctgctttgaggtttttgctatttggagaagcaaaaaacatgggtagtggttcattcagaacgtatacaattgattttagaaacatcttcgagaggcaatgtgagtttgatattaccggtagaaaaagggcagattttaagtactctcctctgggttccagaactggttgtttgtttggccataaaacagaatttttacgtaaaaccgatgaaaaatgttttattgggaatattccactttctgaattttcgaggaacgtcaaaaactgtccatgtacaagacaagatttcgaatgtgactataatttttataaagccagtgatggtacttgtaaattagtcaaaggcttaagttcggcgaatggtgccgatatctgcaaaaaggaacccgacttaattgaatactatgattcctccggctatcggaaaattcccttatcaacctgtaaaggtgggctgaaattggatgcacatttagcaccacatccttgtccgggaaaagaaaaggcattcagggaaaaatactctataaacaccggcgcttatgcgctggtttttgttacaattcttctcgttattttctttgtcgcatggtttgtatacgatagaggtatcaggagaaatgggggattttcaagatttgaagaaatcagattaggagacgatgggctgatagaaaacaataggaccgatagagttgtcaacatcattgtaagactaggattatgcatttctttaatcaccaagtctgcgtttcaacgcgcgaaggcaggtacagcgcaactttcttcaaaatttagggcaaggtttggcaacaaaaaaggtgccacttactcttcgctgcttcatgatcagctttcagatgaaccagatggcttccatgaagattccaacgatttatccagtttcagaggtcaaggtagtaattctgaaattgagcaagaagatgttgacacatctcaacaagagcatacgttgcggacagacctacttggtgctagcaatattccagacgctttgccagcgcgtagtgcttctcacgagtccgatttagcagctgcacgcagcgaagacaagtag

SEQ ID NO: 5296 - DNA, 4650 bp, Artificial Sequence
  Description of Artificial Sequence: Synthetic polynucleotide
atggcattgtttcgtgccttatatattatttgggtattcttactcattccattgtccaatgcagaagaattcacccccaaggttaccagaactttgtccagatatgtattcgatatagtaaactttgatgattccaacactttgatcagagcagaagaagactctgtcgagataagttttgatgctggagaaaattggaaaacaatagatgagattgaagagcctatcgagtcttttgttgttgatcccttccgtgggcatgatagagcttttgctttcgtgaaaacggcaccaaaattttacgtcacggatgatcaaggtaaaagttggaggcctttgactatacccatttctgagaaagcatctaattatttttgcgacgtaactactcaccctataaaaaagaagcatcttattattcgttgtgatttgttgacaataaaaaacagtggcttaatgtatgttggaagagagatttacacaactaatgatggagtatccttttcccaagttaaaccttcttttggaaaaattgatggtcatattagcacggcacgctgtgactttattaaatctagtgaggattctgatttgggcggtaatgatgcttctatactctgtcttttcagaaacactgagtacattgaaagtacaggctccactattgacaagtctgaattgattttaagtgccgatggaggtgaaacattcaaagaattagtccagttcaaagataaggttgttagtagatacgagatacttaagcatcatgtgatcgttttgacacaagatgatatgtataatgaaatgtcttctacaaacatttggatatccaatgatgtatccacttttcaagtggctcgtacacctactaagatacgtcacgttaatatgggacaaattcatgaagattccatcggaagaatcgttttacctgtatctagagaaagagatgatgaagacagcaaccaaccgggagctgctgaagtgttaatatctgattctgaaggattgaaatttttgcctataaattggataccaaacaatcagtttggatatatcaatgtagcttatccaggtttcttaaaaggaacattttttggttcttttcatcccttcattgaatattctgatagaaaaaggaaatacagcagacagaaagtaagagaggaaactaaagtatctgttgataacggtctcacatggacaaacttgaaagttgttgacagagaaaatgtagatttatttggttgtgatgtcactaaacccgagagatgttctcttcagactcatttctatgatttgagaaatttaaatccctctgccggaatcatgatgatatctggtattgttggcgacggcagtgcatacaattggaaagaagaaaaaactttcatctccagggatagtggtttaacatggaggttagtccataattccactggtttatatactactggtgatttgggaaatattatcatgtatattccatatcgttccaatgaaaatggcgatgtgccttctaaattttattattccttggatcaaggtaagacatggggtgaatatgatttgatcatgcctatttatccatacagattagtcagcacaatatctgatggatctggttccaaatttattttaacaggaacgtccattacagaagatccaatattcattacatattctattgatttttctgcggtatttgattataaaagttgtgaagagggtgattttgaagattggaatttggcagatggaaaatgtgttaatggcgccaaatacaagtacagaaggaggaaacaggacgcccagtgtttggtaaaaaaagcattcaaagatttgagtttagatgaaacgccttgtaacagttgtactggatccgactacgaatgttcctttgaattcgttagagatgcgaagggtgactgtataccagattataatttaattgccctttccgatatatgtgacaaatccaagggtaaatctgtgttagtaaagccattgcaattaatcaaaggtgataaatgtaaaacacctatgaaaattgaatccgtagacattccgtgtgacgaaattccaaaggagggtagtagtgacaaggaaatagtgactactgaaaacaaattcgactttgaaattaaattttaccaatacttcgatacagttgccgacgaatctttggtcatgttgaattctataggagacgcctatatatcccacgatggtggacaaacgataaaaaggtttgacactgacggcgaaaaaattgtcgaaatcgtgtttaacccatacttcaattcttctgcatatttgtttggctctaaaggtaacatattcttaacacacgatagaggatactctttcatgatagctaaattacctgaagccaggcaattaggcatgccattagattttagtgctaaagcacaggatacttttatttactatggtggtaagaattgtgaaagtattttaagtccagaatgtcatgcagtggcatacctcaccaaagatgggggtgaaacttttacagaaatgcttgataatgcaattcattgtgagtttgcaggaacattgttcaaatatccgtccaatgacgatatggttatgtgccaagtaaaggaaaagttttctcaaacaagaagtttagtttcttctactgactttttccaagatgatagaaaaactgtctttgaaaacattatcggctacttgtctactggtggctatatcattgttgccgtacctcatgaagacaatgaattgagggcgtatgtaactaatgatggtgctgagtttaccgaggcaaaattcccatatgatgaagatattggtaagcaagacgcattcactattttaggatctgaggaaggatccatatttttacatttagcaacaaacttggaatctggacacgatttcggaaaccttttgaaatccaacagtaatggtacttcttttgtcaccttagagcatgccgttaatagaaacacattcggttatgtggactttgaaaaagttcaaggtcttgaaggtattattatcaccaacatcgtttctaatagcgaaaaggttggcgagaacaaggaagacgaacaattgaagacgaaaatcaccttcaatgacggttctgattggaactttttgaagcctccaaagaaggattctgaagggaaaaagtttccctgtgattctgtgtctttagataaatgttctttgcatttgcatggttacactgaacgtaaggatatcagggatacatattcctctggctccgcgttaggaatgatgtttggtgtcggaaatgttggcgataggcttttaccatatgaggagtgttccacttttttaaccactgatggaggagagacgtggactgaggttaaaaaaggcccccatcaatgggagtacggtgatcatggtggagtcttggttttggtccccgaaaacgcagaaactgattctatttcttactccaccgattttggtaaaacatggaaagattataaattctgtggcgacaaagtcctcgtaaaggatataatcaccgttcccagagattctgctttgaggtttttgttatttggagaagcaaaaaacatgggtagtggttctttcagaacgtatacaattgattttagaaacatcttcgagaggcaatgtgagtttgatattaccggtagaaaaagggcagattttaagtactctcctttaggttccagaactggttgtttgtttggccataaaacagaatttttacgtaaaaccgatgaaaaatgttttattgggaatattccactttctgaatttagcaggaacgtcaaaaactgtccatgtacaagacaagatttcgaatgtgactataatttttataaagccagtgatggtacttgtaaattagtcaaaggcttaagttctgcgaatggtgccgatatctgcaaaaaggaacccgacttaattgaatactatgattcctccggctatagaaaaattcccttatctacctgtaaaggtgggttgaaattggatgcacatttagcaccacatccttgtccgggaaaagaaaaggcattcagggaaaaatactctataaacaccggcgcttatgcgttggtttttgttacaattcttctcgttattttctttgtcgcatggtttgtatacgatagaggtatcaggagaaatgggggattttccagatttgaagaaatcagattaggagacgatgggttgatagaaaacaataggaccgatagagttgtcaacatcattgtaagattaggattatgcatttctttaatcaccaagtctgcgtttcaacgcgcgaaggcaggtacagcgcaactttcttctaaatttagggcaaggtttggcaacaaaaaaggtgccacttactcttctttacttcatgatcagctttctgatgaaccagatggcttccatgaagattccaacgatttatccagtttcagaggtcaaggtagtaattctgaaattgagcaagaagatgttgacacatctcaacaagagcatacgttgagaacagacttacttggtgctagcaatattccagacgctttgccagcgcgtagtgcttctcacgagtccgatttagcagctgcacgcagcgaagacaagtga

SEQ ID NO: 5297 - DNA, 1770 bp, Saccharomyces cerevisiae
atgactatttcttctgcacatccagaaacagaacccaagtggtggaaagaggccacaatttatcaaatttatcccgcaagtttcaaagactccaacaacgatggttggggtgatatgaagggtattgcctccaagttggagtacatcaaagagcttggtaccgatgccatttggatctcgccattttacgactcgccacaagatgatatgggttacgatattgccaactacgaaaaggtctggccaacctacggtacgaacgaggactgctttgccttgatcgaaaagacacataagcttggtatgaaatttatcaccgacttagtcatcaaccattgctccagcgaacatgaatggttcaaagagagcagatcctcaaaaaccaatccaaaacgtgactggttcttctggagacctcctaagggttatgacgccgaaggcaagccaattcctccaaacaattggaggtcttacttcggtggttctgcatggacgttcgatgaaaagacacaagagttttacttgcgtttgttttgctccacccaacctgatctaaactgggagaacgaagactgcagaaaggcaatctacgaaagtgccgttggatactggttagaccatggtgtagacggctttagaattgatgtgggaagcttgtactccaaggttgctggtctaccagacgctcctgtgattgacgaaaactcaaagtggcaactcagtgatcctttcacaatgaacggaccacgtatccatgagtttcatcaagaaatgaacaagttcatcagaaacagagtgaaggatggcagagaaattatgacagttggtgaaatgcgacatgctactgatgagaccaagaggttgtatacaagtgcgtcaagacacgaacttagtgagttattcaacttttcccacactgatgtcgggacttcgcccaagttccgtcaaaatttgataccatatgaactaaaggattggaaggttgcccttgctgaacttttcagatacgttaacggaactgattgttggtcaacaatttatctggaaaatcacgaccaacctcgttcaattaccagatttggtgacgattctcccaaaaaccgtgttatttctggtaagttgttgtctgtgttgttggtgtcactgagcggtactctatatgtgtaccaaggacaggaactgggtgaaatcaatttcaagaactggcctatcgaaaaatacgaggatgtcgaagttagaaataactatgatgcgatcaaggaagagcatggagaaaactcgaaggagatgaagaggtttttggaagcaattgcccttatttccagagaccatgctagaacacctatgcaatggtctcgtgaggagccaaatgctggtttttctggtcctaatgctaaaccatggttttacttgaacgagtctttcagggaaggaattaacgctgaagacgaatccaaggaccccaactcggttttgaacttctggaaggaggccttgagatttagaaaggcacacaaggatattactgtgtatggatatgattttgagtttattgatttggacaataagaaactgttcagcttcacaaagaaatacgacaacaaaacattgtttgctgctttgaacttcagctctgattcgatcgacttcacgattccaaacaatagctcatcgtttaagttggaattcggaaactacccaagaagtgaagttgatgcgtcttccagaacattgaagccatgggagggcagaatttacatatctgaatga

SEQ ID NO: 5298 - DNA, 1770 bp, Artificial Sequence
  Description of Artificial Sequence: Synthetic polynucleotide
atgactatttcttctgcacatccagaaacagaacccaagtggtggaaagaggccacaatttatcaaatttatcccgcaagtttcaaagactccaacaacgatggttggggtgatatgaagggtattgcctccaagttggagtacatcaaagagcttggtaccgatgccatttggatctctccattttacgactctccacaagatgatatgggttacgatattgccaactacgaaaaggtctggccaacctacggtacgaacgaggactgctttgccttgatcgaaaagacacataagcttggtatgaaatttatcaccgacttagtcatcaaccattgctccagcgaacatgaatggttcaaagagagcagatcctctaaaaccaatccaaaacgtgactggttcttctggagacctcctaagggttatgacgccgaaggcaagccaattcctccaaacaattggaggtcttacttcggtggttctgcatggacgttcgatgaaaagacacaagagttttacttgcgtttgttttgctccacccaacctgatttgaactgggagaacgaagactgcagaaaggcaatctacgaaagtgccgttggatactggttagaccatggtgtagacggctttagaattgatgtgggaagcttgtactccaaggttgctggtttgccagacgctcctgtgattgacgaaaactccaagtggcaactcagtgatcctttcacaatgaacggaccacgtatccatgagtttcatcaagaaatgaacaagttcatcagaaacagagtgaaggatggcagagaaattatgacagttggtgaaatgagacatgctactgatgagaccaagaggttgtatacaagtgcgtccagacacgaacttagtgagttattcaacttttcccacactgatgtcgggacttctcccaagttccgtcaaaatttgataccatatgaattgaaggattggaaggttgcccttgctgaacttttcagatacgttaacggaactgattgttggtctacaatttatttggaaaatcacgaccaacctcgttctattaccagatttggtgacgattctcccaaaaaccgtgttatttctggtaagttgttgtctgtgttgttggtgtctttaagcggtactttatatgtgtaccaaggacaggaattgggtgaaatcaatttcaagaactggcctatcgaaaaatacgaggatgtcgaagttagaaataactatgatgcgatcaaggaagagcatggagaaaactccaaggagatgaagaggtttttggaagcaattgcccttatttccagagaccatgctagaacacctatgcaatggtctcgtgaggagccaaatgctggtttttctggtcctaatgctaaaccatggttttacttgaacgagtctttcagggaaggaattaacgctgaagacgaatccaaggaccccaactctgttttgaacttctggaaggaggccttgagatttagaaaggcacacaaggatattactgtgtatggatatgattttgagtttattgatttggacaataagaaattattcagcttcacaaagaaatacgacaacaaaacattgtttgctgctttgaacttcagctctgattctatcgacttcacgattccaaacaatagctcctcttttaagttggaattcggaaactacccaagaagtgaagttgatgcgtcttccagaacattgaagccatgggagggcagaatttacatatctgaatga

SEQ ID NO: 5299 - DNA, 2988 bp, Saccharomyces cerevisiae
atgttcaatcgtttaaacaaattccaagctgctttagctttggccctttactctcaaagtgcattgggtcagtactatagcaatagcacctcaatttcaagcaacagctcatccacctctgtggtatcaagttcctctggatccgtttcgatcagtagttctattgctgagacatcctcgtccgctaccgatatcttaagttctatcacacaatcagcttcatccacttctggtgtctcgagctctgtcggtccatcctcttcctctgttgtctcaagctctgtcagccaatcctcttcatccgtttctgatgtatcaagctctgtcagtcaatcttcttcttcagcttctgatgtctcaagctctgtcagtcaatcagcttcctctacttctgatgtctcaagctctgtcagtcaatcttcttcttcagcttctgatgtatcaagctctgtcagtcaatcttcttcctcagcttctgatgtctcaagctctgtcagtcaatcagcttcctcagcttctgatgtctcaagctctgtcagtcaatcagcttcctctacttctgatgtctcaagctctgtcagtcaatcttcttcttcagcttctgatgtatcaagctctgtcagtcaatcttcttcctcagcttctgatgtctcaagctctgtcagtcaatcagcttcctctacttctgatgtctcaagctctgtcagtcaatcagcttcctctacttctggtgtctcaagctctggcagccaatcagtctcatccgcttctggtagctcaagctcattccctcaatcaacctcatccgcttctactgcctccggttctgccacttccaattccttgagttccattacttcttcagcatctagtgcaagcgcaactgcttccaactccctttcttccagcgatggtactatctatctaccaactactacaatcagtggtgatctaactcttactggtaaagtaattgcaacagaaggtgttgtggtcgcagctggtgccaaattgactctacttgacggtgacaaatattctttctcagctgacctaaaagtctacggtgacttgcttgtgaaaaagtccaaagaaacctatccaggtaccgaattcgacatctccggtgaaaactttgacgtgaccggtaacttcaacgctgaagaatccgctgccacctctgcatccatctactccttcactccaagttcttttgacaacagtggtgacatttccttaagtctatcaaagtccaagaagggtgaagtcactttctctccatactccaattctggtgccttctctttctcgaacgctattctcaacggtggttctgtttccggtctacaacgtagagacgacactgaaggttcagtaaacaacggtgaaattaacctagacaatggaagtacctatgttattgtcgaaccagtttctggaaaaggtacagtcaacatcatttccggtaacctatacttacactaccctgacacatttactggccaaactgttgtattcaagggtgaaggtgtccttgctgttgacccaaccgaaaccaatgccactcctattcctgttgttggctacactggtaagaaccaaattgccattaccgctgacatcactgctctttcttatgacggtactaccggtgttctaactgcaacccaaggtaacagacaattctcttttgctattggtaccggattctccagctctgacttcagcgtctctgaaggaatctttgcaggtgcttacgcttactacctaaactacaatggtgttgtcgctactagtgccgcttcttcatccactgcatctggtgcttccgcttccgttaccggttctacttcattcggtgcttccgttaccggttcaactgcttccacttcattcggtgcttccgttaccggttcaactgcttccacttcatttggtgcttccgttaccggttcaacatctgtttacactacaacactagactatgtaaatgccacaagcacagtcgtagtttcttgttcagagacaactgactccaatggtaacgtctataccattaccacaaccgttccatgctcatccactaccgccactattacttcttgtgatgaaactggatgtcacgttagtacatcaaccggtgctgttgtaactgaaaccgtttcttccaaatcatacacaactgccactgtaactcactgtgacgataatggctgtaacaccaagactgtcacttctgaatgttccaaagaaacatcagcaacaactgcttctccaaaatcatacaccactgtcaccgtaacccactgtgacgacaatggctgtaacaccaagactgtcacctctgaagctcctgaagctaccaccacaactactgtttcttctcaatcgtacaccactgccaccgtcacccactgtgatgacaatggatgtaagaccaagactgtcacttctgaagctcctgaagccacaaccactactgtttctccaaagacatacaccaccgctactgttactcagtgtgatgacaatggatgtagcaccaagactgtcacttctgaatgtcctgaagaaacttcagcaactactacttctccaaaatcatacactactgttaccgttactcactgtgacgacaacggctgtaacactaagactgtcacctctgaggcccctgaagccacaaccactactgtttctccaaagacatacaccaccgctactgttactcagtgcgatgacaatggatgtagcaccaagactgtcacttctgaagctcctaaagaaacttcagaaacttcagaaaccagtgctgcccctaaggacatacactactgccactggttactcaatggtgatgacaatggttgtaacgtcaagataatcacctctaaaatacctgaagctacttcaaccgtcacgcaactagtgcttctccaaagtcatacactactgtcacttctgagggttctaaagcaacctcattga

SEQ ID NO: 5300 - DNA, 2988 bp, Artificial Sequence
  Description of Artificial Sequence: Synthetic polynucleotide
atgttcaatcgtttaaacaaattccaagctgctttagctttggccctttactctcaaagtgcattgggtcagtactatagcaatagcacctctatttctagcaacagctcttccacctctgtggtatctagttcctctggatccgtttccatcagtagttctattgctgagacatcctcctccgctaccgatatcttaagttctatcacacaatctgcttcttccacttctggtgtctccagctctgtcggtccatcctcttcctctgttgtctccagctctgtcagccaatcctcttcttccgtttctgatgtatccagctctgtcagtcaatcttcttcttctgcttctgatgtctccagctctgtcagtcaatctgcttcctctacttctgatgtctccagctctgtcagtcaatcttcttcttctgcttctgatgtatccagctctgtcagtcaatcttcttcctctgcttctgatgtctccagctctgtcagtcaatctgcttcctctgcttctgatgtctccagctctgtcagtcaatctgcttcctctacttctgatgtctccagctctgtcagtcaatcttcttcttctgcttctgatgtatccagctctgtcagtcaatcttcttcctctgcttctgatgtctccagctctgtcagtcaatctgcttcctctacttctgatgtctccagctctgtcagtcaatctgcttcctctacttctggtgtctccagctctggcagccaatctgtctcttccgcttctggtagcagcagctctttccctcaatccacctcttccgcttctactgcctccggttctgccacttccaattccttgagttccattacttcttctgcatctagtgcaagcgcaactgcttccaactccctttcttccagcgatggtactatctatttaccaactactacaatcagtggtgatttgactcttactggtaaagtaattgcaacagaaggtgttgtggtcgcagctggtgccaaattgactttacttgacggtgacaaatattctttcagtgctgacttgaaagtctacggtgacttgcttgtgaaaaagtccaaagaaacctatccaggtaccgaattcgacatctccggtgaaaactttgacgtgaccggtaacttcaacgctgaagaatccgctgccacctctgcatccatctactccttcactccaagttcttttgacaacagtggtgacatttccttaagtttatccaagtccaagaagggtgaagtcactttctctccatactccaattctggtgccttctctttcagtaacgctattctcaacggtggttctgtttccggtttacaacgtagagacgacactgaaggttctgtaaacaacggtgaaattaacttggacaatggaagtacctatgttattgtcgaaccagtttctggaaaaggtacagtcaacatcatttccggtaacctttacttacactaccctgacacatttactggccaaactgttgtattcaagggtgaaggtgtccttgctgttgacccaaccgaaaccaatgccactcctattcctgttgttggctacactggtaagaaccaaattgccattaccgctgacatcactgctctttcttatgacggtactaccggtgttttaactgcaacccaaggtaacagacaattctcttttgctattggtaccggattctccagctctgacttcagcgtctctgaaggaatctttgcaggtgcttacgcttactacttgaactacaatggtgttgtcgctactagtgccgcttcttcttccactgcatctggtgcttccgcttccgttaccggttctacttctttcggtgcttccgttaccggttctactgcttccacttctttcggtgcttccgttaccggttctactgcttccacttcttttggtgcttccgttaccggttctacatctgtttacactacaacattagactatgtaaatgccacaagcacagtcgtagtttcttgttctgagacaactgactccaatggtaacgtctataccattaccacaaccgttccatgctcttccactaccgccactattacttcttgtgatgaaactggatgtcacgttagtacatctaccggtgctgttgtaactgaaaccgtttcttccaaatcttacacaactgccactgtaactcactgtgacgataatggctgtaacaccaagactgtcacttctgaatgttccaaagaaacaagtgcaacaactgcttctccaaaatcttacaccactgtcaccgtaacccactgtgacgacaatggctgtaacaccaagactgtcacctctgaagctcctgaagctaccaccacaactactgtttcttctcaatcttacaccactgccaccgtcacccactgtgatgacaatggatgtaagaccaagactgtcacttctgaagctcctgaagccacaaccactactgtttctccaaagacatacaccaccgctactgttactcagtgtgatgacaatggatgtagcaccaagactgtcacttctgaatgtcctgaagaaacttctgcaactactacttctccaaaatcttacactactgttaccgttactcactgtgacgacaacggctgtaacactaagactgtcacctctgaggcccctgaagccacaaccactactgtttctccaaagacatacaccaccgctactgttactcagtgcgatgacaatggatgtagcaccaagactgtcacttctgaagctcctaaagaaacttctgaaacttctgaaaccagtgctgcccctaaggacatacactactgccactggttactcaatggtgatgacaatggttgtaacgtcaagataatcacctctaaaatacctgaagctacttctaccgtcacgcaattagtgcttctccaaagtcatacattattatctcttttgagggttttgaagcaacctcattga

SEQ ID NO: 5301 - DNA, 1629 bp, Saccharomyces cerevisiae
atgtccgtacaaaaagaagaatacgatattgtagaaaaggcccaattatctgtgtccgcagaaagcttaacatcagattcggagagtatttcacataacccatttgacgattttcataaagcagagcgttggagaaaagtctatgaatccagtggttatgaaggcttgtctaaattcgatcctgagtttacatggacaaaggatgaggaaaagaaattggtaagaaaaatggacttgaagatttttttgtgggtttttattatgtttgcctttttggatttaataaggaaaaatattgcaagggcagtttcagacaacttcattgttgacttgaaaatgaacacgaacgactacaaccttggccaaactgtttatctagttatatttctagcaagtgaactacccggcaatctgctgtccaaaagatttggtccagaaagggtcattccggttcaaattgtgttgtggagtgtaatttgtattactcaagctggtctgaaaaatcgaggtcaatttattgctactagatgcttattaggaatggtacagggcgggttcatcccggacaatattctatacttgtcatattattatactggagctgagctcacattccgcctaagtttcttttggtgtgctatacctcttttccaaattttaggctctcttttagcttccggaatcatagagatgaggggtattcataacttagctggctggcagtacctatttataattgaagggtttctgtccctttctgttggcgtggcatccttttatttaatgcgtagaggacctacgcaaactggtgagtctgcatttcacaaaggaaaatcgttattcactgagtatgaggagaaaattatggttaacagaattttaagggatgacccatcaaagggtgacatgagtaaccgacaaccagttaccttcaaggagattttgtacactctaacagaatttgatctatggccattgtttatccaaggtattacagcattcatatctcttcaaacagttggttcctatttatctttgatattaaagagtttaaattactctacatttctttcgaacattttagcaattccaggccaagccctgctgctaataaatttaccattagcggcactattatcgcgtaaattgaaagaaaaatcactttgtgtgggaattgccaacgtttgggtgctccctttcatagtttctctggtcgctttaccgactgacacaaacccctggatcaagtatatattactaaccggtatacttggtcttccctatacacattccattcttgctggttgggtctccgagatttcaaattcggtaagatcgcgtacagtgggcacagcgttatacaatatgagtgcccaagttggagcaatcattgcttctaacatgtatagaaatgatgataaaccttactatactagaggtaacaaaatacttctaggattcacttgcttcaacatttgtatggctgttgctactaagttttactatattagtaggaataaatacaaggaccgcaaatggaactctatgacaaaagaagagcagatcaattacttggacacaactaaagataagggaatgaagcgtcttgattataggtttattcactag

SEQ ID NO: 5302 - DNA, 1629 bp, Artificial Sequence
  Description of Artificial Sequence: Synthetic polynucleotide
atgtccgtacaaaaagaagaatacgatattgtagaaaaggcccaattatctgtgtccgcagaaagcttaacatctgattctgagagtatttctcataacccatttgacgattttcataaagcagagcgttggagaaaagtctatgaatccagtggttatgaaggcttgtctaaattcgatcctgagtttacatggacaaaggatgaggaaaagaaattggtaagaaaaatggacttgaagatttttttgtgggtttttattatgtttgcctttttggatttaataaggaaaaatattgcaagggcagtttctgacaacttcattgttgacttgaaaatgaacacgaacgactacaaccttggccaaactgtttatttggttatatttttggcaagtgaattgcccggcaatttattatccaaaagatttggtccagaaagggtcattccggttcaaattgtgttgtggagtgtaatttgtattactcaagctggtttgaaaaatagaggtcaatttattgctactagatgcttattaggaatggtacagggcgggttcatcccggacaatattttatacttgagttattattatactggagctgagctcacattccgcttaagtttcttttggtgtgctatacctcttttccaaattttaggctctcttttagcttccggaatcatagagatgaggggtattcataacttagctggctggcagtacttgtttataattgaagggtttctttccctttctgttggcgtggcatccttttatttaatgcgtagaggacctacgcaaactggtgagtctgcatttcacaaaggaaaatctttattcactgagtatgaggagaaaattatggttaacagaattttaagggatgacccatctaagggtgacatgagtaacagacaaccagttaccttcaaggagattttgtacactttgacagaatttgatttatggccattgtttatccaaggtattacagcattcatatctcttcaaacagttggttcctatttatctttgatattaaagagtttaaattactctacatttctttccaacattttagcaattccaggccaagccttattattgataaatttaccattagcggcattattatctcgtaaattgaaagaaaaatctctttgtgtgggaattgccaacgtttgggtgctccctttcatagtttctttggtcgctttaccgactgacacaaacccctggatcaagtatatattattaaccggtatacttggtcttccctatacacattccattcttgctggttgggtctccgagatttctaattctgtaagatctcgtacagtgggcacagcgttatacaatatgagtgcccaagttggagcaatcattgcttctaacatgtatagaaatgatgataaaccttactatactagaggtaacaaaatacttttgggattcacttgcttcaacatttgtatggctgttgctactaagttttactatattagtaggaataaatacaaggaccgcaaatggaactctatgacaaaagaagagcagatcaattacttggacacaactaaagataagggaatgaagcgtcttgattataggtttattcactga

SEQ ID NO: 5303 - DNA, 360 bp, Saccharomyces cerevisiae
atgaaaaatattgcatacgaaggtcgtctattcttgattagtgcagtgcagttcatgccagatgcgacagcaatgggctttggggagattattgaccaagctacaggtaagagaaaattacctggatggccatctgctgacgacaactgtattaatggaggtagtgttattattgatccttatggagagattattgcagggccattgctagggcaggagggccttttaaccgccgaaattaacactgacttgattgctgaagctcgctttgatcttgaccctgtcggacattatgctaggggagatgtcttccagttgactgtcaatgaaaggtcacacgatgtcaagtttacgaaatga

SEQ ID NO: 5304 - DNA, 360 bp, Artificial Sequence
  Description of Artificial Sequence: Synthetic polynucleotide
atgaaaaatattgcatacgaaggtcgtttattcttgattagtgcagtgcagttcatgccagatgcgacagcaatgggctttggggagattattgaccaagctacaggtaagagaaaattacctggatggccatctgctgacgacaactgtattaatggaggtagtgttattattgatccttatggagagattattgcagggccattgttggggcaggagggccttttaaccgccgaaattaacactgacttgattgctgaagctcgctttgatcttgaccctgtcggacattatgctaggggagatgtcttccagttgactgtcaatgaaaggtctcacgatgtcaagtttacgaaatga

SEQ ID NO: 5305 - DNA, 600 bp, Saccharomyces cerevisiae
atggcgaaacacattgttgctgcccttcaaatcggctcttgtccgggctctactaaggataccttgaaaaaaattttgtcatatgagaaggagatcaaggaatctggtgccaagttggtcgttatcccagaagccactcttggtggttatccaaagggatcgaactttggggtttatctaggctaccgtcttcaagaaggaagggaggagtatgctaagtatcttgccgaagcaattgagatcggaaacggagagaaatatccagaaattagtcagttgtgcgcactatcgaaggccaccgacgcatccttatgtgtggggtgtatagagcgcgatgggacgacattatattgtaccatggtttatatagatcctaaagatggctacgttgggaagcatcgaaaactgatgccgacagctggcgaaagactgatatggggtcaaggcgatggttcgactctgcctgtcgtggataccgctgctgggaagattggcggtgctatctgctgggagaacatgatgcctctactgagatacgccatgtataaaaaaggggttgagatctggtgtgccccaacggtggatgctaggcctatttag

SEQ ID NO: 5306 - DNA, 600 bp, Artificial Sequence
  Description of Artificial Sequence: Synthetic polynucleotide
atggcgaaacacattgttgctgcccttcaaatcggctcttgtccgggctctactaaggataccttgaaaaaaattttgagttatgagaaggagatcaaggaatctggtgccaagttggtcgttatcccagaagccactcttggtggttatccaaagggaagtaactttggggtttatttgggctaccgtcttcaagaaggaagggaggagtatgctaagtatcttgccgaagcaattgagatcggaaacggagagaaatatccagaaattagtcagttgtgcgcattatccaaggccaccgacgcatccttatgtgtggggtgtatagagcgcgatgggacgacattatattgtaccatggtttatatagatcctaaagatggctacgttgggaagcatagaaaattaatgccgacagctggcgaaagattaatatggggtcaaggcgatggttctactttacctgtcgtggataccgctgctgggaagattggcggtgctatctgctgggagaacatgatgcctttattaagatacgccatgtataaaaaaggggttgagatctggtgtgccccaacggtggatgctaggcctatttga

SEQ ID NO: 5307 - DNA, 354 bp, Saccharomyces cerevisiae
atgtttcttttcaggaggaaggattataggatcgaaatccaaaaaaaaaaagtcgtcaaatctttcttccaaatggtttactatagagcccttaggcaacatttttgtcaaacaaagtcgtttaagcattcctcgaaaagaaacgtctctatgatggtaataggcaaacatcgggcgtaccttaaaagtcttagacatcacataaagggatttataatcacattcctcgtcagtttttccagaaacctccatggaaaaaccctggacgtggggtcgattaacgctacgcgtatttcttcgcccccggataatttcctaaactgggttttttctttttattcctgttcagagtaa

SEQ ID NO: 5308 - DNA, 354 bp, Artificial Sequence
  Description of Artificial Sequence: Synthetic polynucleotide
atgtttcttttcaggaggaaggattataggatcgaaatccaaaaaaaaaaagtcgtcaaatctttcttccaaatggtttactatagagcccttaggcaacatttttgtcaaacaaagagctttaagcattcctctaaaagaaacgtctctatgatggtaataggcaaacatagagcgtaccttaaaagtcttagacatcacataaagggatttataatcacattcctcgtcagtttttccagaaacctccatggaaaaaccttagacgtggggtctattaacgctacgcgtatttcttctcccccggataatttcttgaactgggttttttctttttattcctgttctgagtga

SEQ ID NO: 5309 - DNA, 1599 bp, Saccharomyces cerevisiae
atgcttttgcaagctttccttttccttttggctggttttgcagccaaaatatctgcatcaatgacaaacgaaactagcgatagacctttggtccacttcacacccaacaagggctggatgaatgacccaaatgggttgtggtacgatgaaaaagatgccaaatggcatctgtactttcaatacaacccaaatgacaccgtatggggtacgccattgttttggggccatgctacttccgatgatttgactaattgggaagatcaacccattgctatcgctcccaagcgtaacgattcaggtgctttctctggctccatggtggttgattacaacaacacgagtgggtttttcaatgatactattgatccaagacaaagatgcgttgcgatttggacttataacactcctgaaagtgaagagcaatacattagctattctcttgatggtggttacacttttactgaataccaaaagaaccctgttttagctgccaactccactcaattcagagatccaaaggtgttctggtatgaaccttctcaaaaatggattatgacggctgccaaatcacaagactacaaaattgaaatttactcctctgatgacttgaagtcctggaagctagaatctgcatttgccaatgaaggtttcttaggctaccaatacgaatgtccaggtttgattgaagtcccaactgagcaagatccttccaaatcttattgggtcatgtttatttctatcaacccaggtgcacctgctggcggttccttcaaccaatattttgttggatccttcaatggtactcattttgaagcgtttgacaatcaatctagagtggtagattttggtaaggactactatgccttgcaaactttcttcaacactgacccaacctacggttcagcattaggtattgcctgggcttcaaactgggagtacagtgcctttgtcccaactaacccatggagatcatccatgtctttggtccgcaagttttctttgaacactgaatatcaagctaatccagagactgaattgatcaatttgaaagccgaaccaatattgaacattagtaatgctggtccctggtctcgttttgctactaacacaactctaactaaggccaattcttacaatgtcgatttgagcaactcgactggtaccctagagtttgagttggtttacgctgttaacaccacacaaaccatatccaaatccgtctttgccgacttatcactttggttcaagggtttagaagatcctgaagaatatttgagaatgggttttgaagtcagtgcttcttccttctttttggaccgtggtaactctaaggtcaagtttgtcaaggagaacccatatttcacaaacagaatgtctgtcaacaaccaaccattcaagtctgagaacgacctaagttactataaagtgtacggcctactggatcaaaacatcttggaattgtacttcaacgatggagatgtggtttctacaaatacctacttcatgaccaccggtaacgctctaggatctgtgaacatgaccactggtgtcgataatttgttctacattgacaagttccaagtaagggaagtaaaatag

SEQ ID NO: 5310 - DNA, 1599 bp, Artificial Sequence
  Description of Artificial Sequence: Synthetic polynucleotide
atgcttttgcaagctttccttttccttttggctggttttgcagccaaaatatctgcatctatgacaaacgaaactagcgatagacctttggtccacttcacacccaacaagggctggatgaatgacccaaatgggttgtggtacgatgaaaaagatgccaaatggcatctttactttcaatacaacccaaatgacaccgtatggggtacgccattgttttggggccatgctacttccgatgatttgactaattgggaagatcaacccattgctatcgctcccaagcgtaacgattctggtgctttctctggctccatggtggttgattacaacaacacgagtgggtttttcaatgatactattgatccaagacaaagatgcgttgcgatttggacttataacactcctgaaagtgaagagcaatacattagctattctcttgatggtggttacacttttactgaataccaaaagaaccctgttttagctgccaactccactcaattcagagatccaaaggtgttctggtatgaaccttctcaaaaatggattatgacggctgccaaatctcaagactacaaaattgaaatttactcctctgatgacttgaagtcctggaagttggaatctgcatttgccaatgaaggtttcttaggctaccaatacgaatgtccaggtttgattgaagtcccaactgagcaagatccttccaaatcttattgggtcatgtttatttctatcaacccaggtgcacctgctggcggttccttcaaccaatattttgttggatccttcaatggtactcattttgaagcgtttgacaatcaatctagagtggtagattttggtaaggactactatgccttgcaaactttcttcaacactgacccaacctacggttctgcattaggtattgcctgggcttctaactgggagtacagtgcctttgtcccaactaacccatggagaagttccatgtctttggtccgcaagttttctttgaacactgaatatcaagctaatccagagactgaattgatcaatttgaaagccgaaccaatattgaacattagtaatgctggtccctggtctcgttttgctactaacacaactttaactaaggccaattcttacaatgtcgatttgagcaactctactggtaccttagagtttgagttggtttacgctgttaacaccacacaaaccatatccaaatccgtctttgccgacttatctctttggttcaagggtttagaagatcctgaagaatatttgagaatgggttttgaagtcagtgcttcttccttctttttggaccgtggtaactctaaggtcaagtttgtcaaggagaacccatatttcacaaacagaatgtctgtcaacaaccaaccattcaagtctgagaacgacttgagttactataaagtgtacggcttattagatcaaaacatcttggaattgtacttcaacgatggagatgtggtttctacaaatacctacttcatgaccaccggtaacgctttaggatctgtgaacatgaccactggtgtcgataatttgttctacattgacaagttccaagtaagggaagtaaaatga

SEQ ID NO: 5311 - DNA, 708 bp, Saccharomyces cerevisiae
atggataccaagctatctgtaacaggagctaaaaaatctcagggaaaagcttctggtttgggaaacgaaggaactccaatcgggaatgaggagagcacaaataaagctaaaaatggaaataaaaagcggaataaaaatcgaaacagaaataagaagacagagacaaaggaacaaaatgaacctaaacctgtgactggaggggaagaagtgagagtcgagaaatctcaagcgaaaaacagaaggcggaaaaacaataatggagctaataaaaagaataccctacactactcaaaggaaattaatgtagaagagcgaaaacaaatcgcaaaaaggcaagaagaaatcgaacaatgcattcacaccttatccgattttaaactgtttaaaaagggtaagcacgttacctcatatggctatcgaatctcccccatgacagactccggtaagatttctttgaaaattttattcaacatacctttggattatccaaaggccccaataaaactaacgatgaaaagtaatgaagaagtttcctcttacatggacaccgtgatagcgaatttcaactggaaagcccgtcaattggttaaggaggactggaggatattatctcaaataaactatttggttagtgagttagaaatattgaaaatggaaaattataaacaaattgataaactacgtaatagcttttacaaaaccatataa

SEQ ID NO: 5312 - DNA, 708 bp, Artificial Sequence
  Description of Artificial Sequence: Synthetic polynucleotide
atggataccaagttatctgtaacaggagctaaaaaatctcagggaaaagcttctggtttgggaaacgaaggaactccaatcgggaatgaggagagcacaaataaagctaaaaatggaaataaaaagagaaataaaaatagaaacagaaataagaagacagagacaaaggaacaaaatgaacctaaacctgtgactggaggggaagaagtgagagtcgagaaatctcaagcgaaaaacagaaggagaaaaaacaataatggagctaataaaaagaataccttacactactccaaggaaattaatgtagaagagagaaaacaaatcgcaaaaaggcaagaagaaatcgaacaatgcattcacaccttatccgattttaaattatttaaaaagggtaagcacgttacctcttatggctatagaatctcccccatgacagactccggtaagatttctttgaaaattttattcaacatacctttggattatccaaaggccccaataaaattaacgatgaaaagtaatgaagaagtttcctcttacatggacaccgtgatagcgaatttcaactggaaagcccgtcaattggttaaggaggactggaggatattatctcaaataaactatttggttagtgagttagaaatattgaaaatggaaaattataaacaaattgataaattacgtaatagcttttacaaaaccatatga

SEQ ID NO: 5313 - DNA, 1254 bp, Saccharomyces cerevisiae
atgtctcaaagactacaaagtatcaaggatcatttggtggagagcgccatgggtaagggtgaatcgaagaggaagaactcgttgctggagaaaagacccgaagatgtagttattgtggctgctaacaggtctgccatcggtaaaggttttaaaggtgccttcaaagatgtaaacacagactacttattatacaactttctcaatgagttcatcgggaggtttccggaacctttgagggctgatttgaacttaatcgaagaagttgcctgtggaaatgttctcaatgttggagccggtgctacagaacacagggctgcatgcttggcaagtgggattccctactcgacgccatttgtcgctttaaacagacaatgttcttcaggtttaacggcggtgaacgatattgccaacaagattaaggttgggcaaattgatattggtttggcgctgggagtggaatcaatgaccaataactacaaaaacgtcaatcccttgggcatgatctcctctgaagagctgcaaaaaaaccgagaagcgaagaaatgtctaataccaatgggcattactaatgagaatgttgccgctaatttcaagatcagtagaaaggatcaagacgagttcgctgcgaattcatatcaaaaagcttacaaggcgaaaaatgaggggcttttcgaagatgaaattttacctataaaattaccagatggctcaatttgccagtcggacgaagggccacgccctaacgtcactgcggagtcgctttcaagcatcaggcctgcctttatcaaagacagaggaaccacaactgcgggcaatgcatcccaggtctccgatggtgtggcaggtgtcttgttagcccgcaggtccgtagccaaccagttaaatctgcctgtgctaggtcgctacatcgattttcaaacagtgggggttccccctgaaatcatgggtgtgggccctgcatacgccataccaaaagtcctggaagctactggcttgcaagtccaagatatcgatatttttgaaataaatgaagcattcgcggcccaagcattatactgcatccataaactgggcatcgatttgaataaagtaaatccaagaggtggtgcaatcgcgttaggccatcccttgggttgtactggcgcaaggcaagtagctaccatactaagagaactgaaaaaggatcaaatcggggttgttagtatgtgtatcggtactggtatgggtgccgccgccatctttattaaagaatag

SEQ ID NO: 5314 - DNA, 1254 bp, Artificial Sequence
  Description of Artificial Sequence: Synthetic polynucleotide
atgtctcaaagattacaaagtatcaaggatcatttggtggagagcgccatgggtaagggtgaatccaagaggaagaactctttgttggagaaaagacccgaagatgtagttattgtggctgctaacaggtctgccatcggtaaaggttttaaaggtgccttcaaagatgtaaacacagactacttattatacaactttctcaatgagttcatcgggaggtttccggaacctttgagggctgatttgaacttaatcgaagaagttgcctgtggaaatgttctcaatgttggagccggtgctacagaacacagggctgcatgcttggcaagtgggattccctactctacgccatttgtcgctttaaacagacaatgttcttctggtttaacggcggtgaacgatattgccaacaagattaaggttgggcaaattgatattggtttggcgttgggagtggaaagtatgaccaataactacaaaaacgtcaatcccttgggcatgatctcctctgaagagttacaaaaaaacagagaagcgaagaaatgtttgataccaatgggcattactaatgagaatgttgccgctaatttcaagatcagtagaaaggatcaagacgagttcgctgcgaattcttatcaaaaagcttacaaggcgaaaaatgaggggcttttcgaagatgaaattttacctataaaattaccagatggctccatttgccagagtgacgaagggccacgccctaacgtcactgcggagtctctttctagcatcaggcctgcctttatcaaagacagaggaaccacaactgcgggcaatgcatcccaggtctccgatggtgtggcaggtgtcttgttagcccgcaggtccgtagccaaccagttaaatttacctgtgttgggtcgctacatcgattttcaaacagtgggggttccccctgaaatcatgggtgtgggccctgcatacgccataccaaaagtcttggaagctactggcttgcaagtccaagatatcgatatttttgaaataaatgaagcattcgcggcccaagcattatactgcatccataaattgggcatcgatttgaataaagtaaatccaagaggtggtgcaatcgcgttaggccatcccttgggttgtactggcgcaaggcaagtagctaccatattaagagaattgaaaaaggatcaaatcggggttgttagtatgtgtatcggtactggtatgggtgccgccgccatctttattaaagaatga

SEQ ID NO: 5315 - DNA, 4128 bp, Saccharomyces cerevisiae
atggactcttccccgaacaagaagacgtaccgctaccctcgcagatcgctgtcacttcacgcgcgtgatagggtcagcgaagcccgtaaattggaagaattgaatttgaacgatgggctggttgccgctggcttgcagttggtcggtgtagcgttagagaaacaaggtacaggatcacatatatacatgaaacagaagaatttctcagctaatgacgtttcttcgtcaccaatggtttccgaagaagtgaacggatcggaaatggattttaatccgaagtgcatgcctcaggacgcatcactcgtcgaaagaatgtttgatgagcttttaaaagatggaacttttttttggggggctgcttataagaatttacaaaacatctctctacgaaggaaatggttattgatatgtaaaatccgtagttccaatcattgggggaaaaagaaagtgacttcgagcacgacatactctacacatttggccactaatgaactagctgaaaacgcacactttttggatggcctagttagaaacctttcaacaggtggcatgaagttatcgaaggctctatataaactagaaaaattcctgcgaaagcaaagctttttgcaactttttctcaaggatgaaatttacttgacgacattgatcgaaaagactttgccactcatatccaaggaattacaatttgtttatcttcggtgctttaaaatactgatgaacaacccactggcgagaataagagcactacattctgagcctttaattcgctggttcaccgagcttctgacggatcaaaattctaatttgaaatgtcagttactttctatggagttacttttattattaacgtatgttgagggttccacgggttgtgagttgatatgggaccagctttccatattattcaccgattggctagaatggtttgacaaaatccttgcggatgatattgcaattcattcatccctttatttgaactggaaccaattaaaaatagactattcgacaactttcctactgctaataaactccatactgcaaggtttcaacaacaagactgcactagaaattttgaattttttgaaaaagaataatatacataacactatcacatttttagaactggcctataaagatgatcctaatagtgtcgtgatcatggaacaaataaaacaattcaaatccaaagaatctgcgatatttgactcgatgataaaaactaccaacgatacgaattcgcttcacccaacaaaagatatcgcaagaatagaaagcgagcctctatgtcttgaaaattgcctgttattgaaggcaaaagatagtcccgtagaggcaccaataaacgagattattcaatcgctgtggaaaatcttagactctcaaaaaccatactcagaatctattaaactattaaaattgataaattctttgctgttttatctcatagattcctttcaagtgtcaacgaatccttcttttgatgaaaccttggagtccgcagaaaatgtggattatgtttttcaagattctgttaataaattgttggattctctacaatctgatgaaattgctagaagagcggtcacagaaattgatgatcttaatgctaagatttctcatttgaatgaaaaattaaatttagtagaaaatcatgataaagatcatttaatagcaaaactagatgaaagtgaatctttgatatctctgaaaaccaaggaaattgaaaatctgaaactgcagttgaaggcaaccaagaaaagactagaccaaattaccacgcatcaaaggttatatgaccagccaccttcattggcaagtagcaacttgagtattgccggctcgataataaaaaataatagtcatggaaatatcattttccaaaatttagcaaaaaagcaacagcagcagcaaaaaatttctctgcccaagcgttcaactagtctactaaaaagtaaaagagttacgtccctttcatcatatttaactgatgcaaataacgaaaatgagtcccaaaatgaatccgaagataaatcaaaagactcattatttcaaagatctacgtcaaccattaattttaatatcccttctatgaaaaatattactaatatgcaaaatgtctctctaaattcgatactttcagagttggaattttcaaatagcctaggaacacaacctaattaccaatcgtctcccgtgttgtcttcggtttcttcttcaccaaaacttttccctcgactttcctcagatagtcttgataatggaatccaactagtacctgaagttgttaaactacctcaacttccaccgccccctcctccacctccccctcctccacttccacagtctcttttgactgaagcagaagctaaaccggatggtgtttcctgtattgcagcacctgcaccgccaccccttccagatctatttaaaactaaaacttgtggcgccgttccaccaccaccaccgccaccgcctttacccgagtccttgtcgatgaacaaaggcccctccaatcacgatttagttactcctccagctccacctttaccaaatggtcttctttcttcctcctcagtgtctatcaatccaacgacaaccgatttaaaaccacctccaactgaaaagcgattgaagcaaatccactgggataaggtggaggatatcaaagacacactttgggaagacacgtttcaacgccaagaaacaatcaaagaattacaaactgatggtatattctctcagattgaagatatttttaagatgaaaagtccgactaagattgcaaataaaaggaacgcagaatcctcaattgccttgtcttcaaacaatggcaagtcttccaatgagctgaagaaaatttcattcttatcaagagatttggctcagcaatttggtattaatttacacatgttttcccaattatctgatatggaatttgttatgaaagtattgaactgtgataacgacattgtccaaaatgttaacatactgaaatttttttgtaaagaagagttagtaaatataccaaaaagtatgcttaataagtacgagccatattcacagggtaaggatggtaaagcagtaagtgacttacaaagagctgacagaatatttttggagttgtgtatcaatttaagattttattggaatgcaagatcaaagagtctgctgacattgtcaacatacgagagagattattacgatttgattttcaagttacaaaaaattgatgatgcaatttcacacttaaatcgttcacctaaatttaaaagtttgatgtttattatcacggaaataggcaatcatatgaataaaagaattgttaagggtatcaaattgaagtcattgactaaacttgcctttgtcagatccagtattgatcaaaatgtatcatttttgcattttattgaaaaagtcataagaataaaatatcctgatatatacggttttgtggatgatttgaagaacattgaagatttaggtaaaatctcactagaacacgttgaatcagagtgtcatgaatttcataaaaaaattgaggatttagttactcagtttcaagtaggaaagctatccaaagaggagaacttagaccccagagatcaaattattaaaaaggtcaagtttaagattaatcgggccaaaacaaaaagtgaattattgattggtcaatgtaaattaactttaatagatttgaataaactgatgaaatattacggtgaagatcccaaagataaagagagtaaaaacgaatttttccaaccctttattgaatttttagccatgtttaagaaatgtgccaaggaaaacattgaaaaggaggaaatggaaagagtgtacgaacaaaggaagagcttgttagatatgaggacaagcagtaataagaaaagcaatggaagtgatgaaaacgatggtgaaaaagtaaacagggatgctgttgatctactcatatctaaattacgcgaagtaaagaaggatccagaacctctaagaagaagaaagagtacaaaactcaatgaaatagccattaacgtacatgaaggagatgtaaaaacgagaaaggatgaagatcacgttttactagagagaacgcatgctatgctgaacgatattcaaaatatatag

SEQ ID NO: 5316 - DNA, 4128 bp, Artificial Sequence
  Description of Artificial Sequence: Synthetic polynucleotide
atggactcttccccgaacaagaagacgtaccgctaccctcgcagatctttatctcttcacgcgcgtgatagggtcagcgaagcccgtaaattggaagaattgaatttgaacgatgggttggttgccgctggcttgcagttggtcggtgtagcgttagagaaacaaggtacaggatctcatatatacatgaaacagaagaatttcagtgctaatgacgtttcttcttctccaatggtttccgaagaagtgaacggatctgaaatggattttaatccgaagtgcatgcctcaggacgcaagtctcgtcgaaagaatgtttgatgagcttttaaaagatggaacttttttttggggggctgcttataagaatttacaaaacatctctttaagaaggaaatggttattgatatgtaaaatccgtagttccaatcattgggggaaaaagaaagtgacttccagcacgacatactctacacatttggccactaatgaattggctgaaaacgcacactttttggatggccttgttagaaacctttctacaggtggcatgaagttatccaaggctttgtataaattagaaaaattcttaagaaagcaaagctttttgcaactttttctcaaggatgaaatttacttgacgacattgatcgaaaagactttgccactcatatccaaggaattacaatttgtttatcttagatgctttaaaatattaatgaacaacccattggcgagaataagagcattgcattctgagcctttaattcgctggttcaccgagcttttgacggatcaaaattctaatttgaaatgtcagttactttctatggagttacttttattattaacgtatgttgagggttccacgggttgtgagttgatatgggaccagctttccatattattcaccgattggttagaatggtttgacaaaatccttgcggatgatattgcaattcattcttccctttatttgaactggaaccaattaaaaatagactattctacaactttcttattattgataaactccatattgcaaggtttcaacaacaagactgcattggaaattttgaattttttgaaaaagaataatatacataacactatcacatttttagaattggcctataaagatgatcctaatagtgtcgtgatcatggaacaaataaaacaattcaaatccaaagaatctgcgatatttgactccatgataaaaactaccaacgatacgaattctcttcacccaacaaaagatatcgcaagaatagaaagcgagcctctttgtcttgaaaattgccttttattgaaggcaaaagatagtcccgtagaggcaccaataaacgagattattcaaagtttatggaaaatcttagactctcaaaaaccatactctgaatctattaaattattaaaattgataaattctttgttattttatctcatagattcctttcaagtgagtacgaatccttcttttgatgaaaccttggagtccgcagaaaatgtggattatgtttttcaagattctgttaataaattgttggattctttacaatctgatgaaattgctagaagagcggtcacagaaattgatgatcttaatgctaagatttctcatttgaatgaaaaattaaatttagtagaaaatcatgataaagatcatttaatagcaaaattggatgaaagtgaatctttgatatctttgaaaaccaaggaaattgaaaatttgaaattacagttgaaggcaaccaagaaaagattagaccaaattaccacgcatcaaaggttatatgaccagccaccttctttggcaagtagcaacttgagtattgccggctctataataaaaaataatagtcatggaaatatcattttccaaaatttagcaaaaaagcaacagcagcagcaaaaaatttctttacccaagcgttccactagtttattgaaaagtaaaagagttacgtccctttcttcttatttaactgatgcaaataacgaaaatgagtcccaaaatgaatccgaagataaatctaaagactctttatttcaaagatctacgtccaccattaattttaatatcccttctatgaaaaatattactaatatgcaaaatgtctctttgaattctatactttctgagttggaattttctaatagcttgggaacacaacctaattaccaatcttctcccgtgttgtcttctgtttcttcttctccaaaacttttccctcgtctttccagtgatagtcttgataatggaatccaattggtacctgaagttgttaaattacctcaacttccaccgccccctcctccacctccccctcctccacttccacagtctcttttgactgaagcagaagctaaaccggatggtgtttcctgtattgcagcacctgcaccgccaccccttccagatttatttaaaactaaaacttgtggcgccgttccaccaccaccaccgccaccgcctttacccgagtccttgtccatgaacaaaggcccctccaatcacgatttagttactcctccagctccacctttaccaaatggtcttctttcttcctcctctgtgtctatcaatccaacgacaaccgatttaaaaccacctccaactgaaaagagattgaagcaaatccactgggataaggtggaggatatcaaagacacactttgggaagacacgtttcaacgccaagaaacaatcaaagaattacaaactgatggtatattctctcagattgaagatatttttaagatgaaaagtccgactaagattgcaaataaaaggaacgcagaatccagtattgccttgtcttccaacaatggcaagtcttccaatgagttgaagaaaatttctttcttatctagagatttggctcagcaatttggtattaatttacacatgttttcccaattatctgatatggaatttgttatgaaagtattgaactgtgataacgacattgtccaaaatgttaacatattgaaatttttttgtaaagaagagttagtaaatataccaaaaagtatgcttaataagtacgagccatattctcagggtaaggatggtaaagcagtaagtgacttacaaagagctgacagaatatttttggagttgtgtatcaatttaagattttattggaatgcaagatccaagagtttattaacattgagtacatacgagagagattattacgatttgattttcaagttacaaaaaattgatgatgcaatttctcacttaaatcgtagtcctaaatttaaaagtttgatgtttattatcacggaaataggcaatcatatgaataaaagaattgttaagggtatcaaattgaagtctttgactaaacttgcctttgtcagatccagtattgatcaaaatgtatcctttttgcattttattgaaaaagtcataagaataaaatatcctgatatatacggttttgtggatgatttgaagaacattgaagatttaggtaaaatctctttggaacacgttgaaagtgagtgtcatgaatttcataaaaaaattgaggatttagttactcagtttcaagtaggaaagttatccaaagaggagaacttagaccccagagatcaaattattaaaaaggtcaagtttaagattaatagagccaaaacaaaaagtgaattattgattggtcaatgtaaattaactttaatagatttgaataaattaatgaaatattacggtgaagatcccaaagataaagagagtaaaaacgaatttttccaaccctttattgaatttttagccatgtttaagaaatgtgccaaggaaaacattgaaaaggaggaaatggaaagagtgtacgaacaaaggaagagcttgttagatatgaggacaagcagtaataagaaaagcaatggaagtgatgaaaacgatggtgaaaaagtaaacagggatgctgttgatttactcatatctaaattacgcgaagtaaagaaggatccagaacctttgagaagaagaaagagtacaaaactcaatgaaatagccattaacgtacatgaaggagatgtaaaaacgagaaaggatgaagatcacgttttattggagagaacgcatgctatgttgaacgatattcaaaatatatga

SEQ ID NO: 5317 - DNA, 615 bp, Saccharomyces cerevisiae
atgggcaatgtgtctgtggcagtgggaacggcagttgggattccaattgctgtgggcgtaataatagccctgatattttggtgtaaattacaacgacgttacaaaaaagaagagattagagatgctgatttggagaagatggtaatggaagaagtggcagtgtcggtatatgatggttttaaagccgaaattaacagctcaagtgaagcttccacgataaacgaaaaggaagcaaaccaggatcttaaaccctgccaagaaaaaaccgccaaggcagggtacacaccagcatacagaaggcaattgaacgctagtatggggactttgcgtccaaaaaagcagagcactgcatataccaatgtccccgtcattttcagcggcgaaaaggtgaattatgggatggtcagagatccttcctatagttttatgtatccactgacgctatcgcgcaaagaaacgagtagtttgagatcagcttctacgtcaaacttgtcatcgagcacagaaaatactgcgttacacgaagaaataaaactggatgacccatatgaaaacgattttacgaattatactgtcaacaagagagaatttattgacagcttacggccacactaa

SEQ ID NO: 5318 - DNA, 615 bp, Artificial Sequence
  Description of Artificial Sequence: Synthetic polynucleotide
atgggcaatgtgtctgtggcagtgggaacggcagttgggattccaattgctgtgggcgtaataatagccttaatattttggtgtaaattacaacgtcgttacaaaaaagaagagattagagatgctgatttggagaagatggtaatggaagaagtggcagtgtctgtatatgatggttttaaagccgaaattaacagcagtagtgaagcttccacgataaacgaaaaggaagcaaaccaggatcttaaaccctgccaagaaaaaaccgccaaggcagggtacacaccagcatacagaaggcaattgaacgctagtatggggactttgcgtccaaaaaagcagagcactgcatataccaatgtccccgtcattttcagcggcgaaaaggtgaattatgggatggtcagagatccttcctatagttttatgtatccattaacgttatctcgcaaagaaacgagtagtttgagatctgcttctacgtccaacttgtcttctagcacagaaaatactgcgttacacgaagaaataaaattggatgacccatatgaaaacgattttacgaattatactgtcaacaagagagaatttattgacagcttaagaccacactga

SEQ ID NO: 5319 - DNA, 594 bp, Saccharomyces cerevisiae
atgatgttaagactagtaactaaagggttgccgaaagtgacaccttctgcagctaaggctgtgctagtgcgtggttccttgctgcactcattctctaccagcgctagattcaataatagtgtcgctgaagatgaggccaagatcgttttgaaagacaagaacaggccattgagaattgacagagaattgcctgacccaaccacggagaggagaaagcgaatagctggatttttgttgttttctgtggccattgggtccgcactatctttgatcttcaactatgaaaagacggagtcccccattatctccaacacgctgtattatataagacggtctccagcaactaaaaacatactgggtgagagcatagaatttgatggtatcatcccttgggtctacggtgaactgaactctgtgaagggtaggattaacattacgttttatatcaagggggacaaaaacgttactggaaccgttagactggttgccgataggaacactcacgacgaagagtttttgattcatgaatggagcgtcactgccgctggccaaaagatcgatttgctagctgaaaataccaagacaccaatttaa

SEQ ID NO: 5320 - DNA, 594 bp, Artificial Sequence
  Description of Artificial Sequence: Synthetic polynucleotide
atgatgttaagattggtaactaaagggttgccgaaagtgacaccttctgcagctaaggctgtgttagtgcgtggttccttgttgcactctttctctaccagcgctagattcaataatagtgtcgctgaagatgaggccaagatcgttttgaaagacaagaacaggccattgagaattgacagagaattgcctgacccaaccacggagaggagaaagagaatagctggatttttgttgttttctgtggccattgggtccgcattatctttgatcttcaactatgaaaagacggagtcccccattatctccaacacgctttattatataagaagatctccagcaactaaaaacatattaggtgagagcatagaatttgatggtatcatcccttgggtctacggtgaattgaactctgtgaagggtaggattaacattacgttttatatcaagggggacaaaaacgttactggaaccgttagattggttgccgataggaacactcacgacgaagagtttttgattcatgaatggagcgtcactgccgctggccaaaagatcgatttgttggctgaaaataccaagacaccaatttga

SEQ ID NO: 5321 - DNA, 222 bp, Saccharomyces cerevisiae
atgacattagtagggaaactagtacacatatccatagatttggtcttggtatcaacgtgcctcgcggggattaaacgcaatacaggtttgacgcctaaactggagactctggacaatcagactatgagaaactacatgaagcggtacttgaacttgggagagtctgtatacgactattctgttgccacttgtggctcctcgacgtatttcgctaggaaatag

SEQ ID NO: 5322 - DNA, 222 bp, Artificial Sequence
  Description of Artificial Sequence: Synthetic polynucleotide
atgacattagtagggaaattagtacacatatccatagatttggtcttggtatctacgtgcctcgcggggattaaacgcaatacaggtttgacgcctaaattagagactttggacaatcagactatgagaaactacatgaagagatacttgaacttgggagagtctgtatacgactattctgttgccacttgtggctcctctacgtatttcgctaggaaatga

SEQ ID NO: 5323 - DNA, 3216 bp, Saccharomyces cerevisiae
atgctagacgatgataagggcacggccatgcatccacatataacgccgttcacgcctgagtactcaaatgaattactgcgaagggtccaggacctgtaccacgaagatatcaagcactactatccgcagctaaaactggagaagctgctggaccttctggagcatacagagtacctattcgagttatatctagattcaatccatcacgataggcccaacgatgcactgacagcgtttatcattggatgctactacgtgttcttaattattccacaatctttgcagttccaaacacgaaacaagtcctacagcatctatacagatctaaaaaagatgtatgagaatgaaatgaacatgaccaatgttgtgcttatggtgaagaaagaaatcggtgtggtcctagatgaatcggttaaacacggggccggtattgagcacagaatcaccaagaagagggcattttcagttccagctgacgatctttcaggtcaggtagcttcactatcacttgacaccgcggcaccgcaagatcatggcctcaaaggcacgtttactgaagacgacgcagaacaatcttcacctgtttggacagcaccaaacttagagcccaacgaccaattgaaactggctttattgcccgaagtgataccaacgccagcttttcgtgagcctgaaagaaagacaagtgttccagtgagaccatctgttttattggaagatgtaccctccatataccacgaggatgacactagtttcgcatctttgaacccaccatttcgagaaataaccgcagatagatcagtaactcatcgaaaggattcttaccattctgtttatatggtggatagcggcaacctcaaggaagacaatgatgatctgttcaacgttgagaatgatggcttcatccagagtttggatattttacaaaagcagagtataatcacagcaccagaattgtttagtattttatcgaatcgcgttgaacgtgaaaaggttttactcatcgacttgagaataccacaaagatctgcaataaatcacattgtggctccgaacttagtgaatgtggatccaaacttgttgtgggacaagcagacgaacacacctatctacaaggatgacatattggaacatttactgaaggagaatgagaattttataaaccgtaataaatttgattacattgtttactatactgatgtgaagaccttcatgactataaattttgattatgcatttatttttttttatttgatgctgacttctcagaagactcctttaacaactgtacctactaccctcttaggtgggtacgaaaaatggaagaaaactctgcattcgtatgcccaggagtatcatatctctattgaagattacttgtacagaccttactcacagaaggcgcgcttacaacaggagcagcagcagcagcagcagcagccggattctcaggactctttttccgctaaggaatcatctacaaaagttcctgagcctccctcctggaagccccctgacctgcctataaggttaaggaaacgtcctccacctccaccgcctgtatcaatgcccacaaccccagaaattccacctcctctgccccctaagataatggttcattcacaagtcagttctatctctcgaaagccgccaataccagcaaagcagcatgtcaaaaaggaacaacttaactccaatgaaattattcaaagaaaaagacagcaccagcatcagcattacgaccaacaaatattacaaccgcaaagggcgtacaatattccaactattgaacgcagtccaaacgtatacgtttcgttgtccatcacgggactaagaaatttgggcaatacatgttacattaatagtatgatacaatgtctattcgctgcgaaaacattccggacactcttcatttcatccaaatataagagctatctgcaaccaataaggagcaacggatctcattattctcctaaactttcgaattcactaagtatgctcttcaacaagatgtatctaaatggtggttgctcagttgtcccaacaggatttctcaaagttatcaatcaattgcgtcccgatttgaaaattcctgatgaccaacaggatacccaagagttcctaatgatacttttagacaggttacacgatgaactttccgaccaacagcatgtagcgaacgattatccgaatttattattgtataatgcagatgccctaaaggtttcaaacaacgaatataagcactggtttgacaaaaatgtcattggtaatggtatatctcctattgatgacatttttcaagggcaaatggagaacagcttacaatgtaaaaggtgcggttacactactttcaactatagcacattttatgttttatcactggctataccaagacgttccatgaagttgagtaaacttggtaggtctactgagaaaagagttaagttagaggattgtattaatatgtttacaagcgatgaggtactctctggtgaaaatgcatgggattgcccacgctgtggccccacggcgtctgtgtctacatctgtgtctgcattagagaatgagccatccattgttaagagtaaaaagaaaaaaagtcggttttttacattacatacaggaaccaagcgtcgtcatctcgacttttttggagacggtattactgagggccataatagcaataataataatacgacaatctttgaacgagaaaggtccagatcacccttcaggatgttgggtggtagtgggaagaggtccagttccagtacaccgttcagtactggtggtaatgatagtaacaactcgagtgattacaagaacaaaaaattgacaacagtgaaaacgataaattttgtaactttaccaaaaatcttagtcatccatttatcgagattttattacgatttgaccaagaaaaataacaccgtcgtaacatatccattgatactaaacattatattgaaaaacaatgacactatgaaatataagctatttggagtggttaaccatacaggcacattaatcagtggccattacacgtcactggtgaataaagaccttgaacacaatgtgaatattgggcgttctaaatggtactatttcgacgatgaggttgtcaaggcagataggaaacatggatctgataaaaacttgaaaatttcaagtagcgatgtctacgtattgttttatgaaagggtttatgactag

SEQ ID NO: 5324 - DNA, 3216 bp, Artificial Sequence
  Description of Artificial Sequence: Synthetic polynucleotide
atgttggacgatgataagggcacggccatgcatccacatataacgccgttcacgcctgagtactctaatgaattacttagaagggtccaggacttgtaccacgaagatatcaagcactactatccgcagttgaaattagagaagttattagaccttttggagcatacagagtaccttttcgagttatatttggattctatccatcacgataggcccaacgatgcattaacagcgtttatcattggatgctactacgtgttcttaattattccacaatctttgcagttccaaacaagaaacaagtcctacagcatctatacagatttgaaaaagatgtatgagaatgaaatgaacatgaccaatgttgtgcttatggtgaagaaagaaatcggtgtggtcttggatgaatctgttaaacacggggccggtattgagcacagaatcaccaagaagagggcattttctgttccagctgacgatctttctggtcaggtagcttctttatctcttgacaccgcggcaccgcaagatcatggcctcaaaggcacgtttactgaagacgacgcagaacaatcttctcctgtttggacagcaccaaacttagagcccaacgaccaattgaaattggctttattgcccgaagtgataccaacgccagcttttcgtgagcctgaaagaaagacaagtgttccagtgagaccatctgttttattggaagatgtaccctccatataccacgaggatgacactagtttcgcatctttgaacccaccatttagagaaataaccgcagatagatctgtaactcatagaaaggattcttaccattctgtttatatggtggatagcggcaacctcaaggaagacaatgatgatcttttcaacgttgagaatgatggcttcatccagagtttggatattttacaaaagcagagtataatcacagcaccagaattgtttagtattttatccaatcgcgttgaacgtgaaaaggttttactcatcgacttgagaataccacaaagatctgcaataaatcacattgtggctccgaacttagtgaatgtggatccaaacttgttgtgggacaagcagacgaacacacctatctacaaggatgacatattggaacatttattgaaggagaatgagaattttataaaccgtaataaatttgattacattgtttactatactgatgtgaagaccttcatgactataaattttgattatgcatttatttttttttatttgatgttgacttctcagaagactcctttaacaactgtacctactaccctcttaggtgggtacgaaaaatggaagaaaactttacattcttatgcccaggagtatcatatctctattgaagattacttgtacagaccttactctcagaaggcgcgcttacaacaggagcagcagcagcagcagcagcagccggattctcaggactctttttccgctaaggaaagctctacaaaagttcctgagcctccctcctggaagccccctgacttgcctataaggttaaggaaacgtcctccacctccaccgcctgtatctatgcccacaaccccagaaattccacctcctttgccccctaagataatggttcattctcaagtcagttctatctctagaaagccgccaataccagcaaagcagcatgtcaaaaaggaacaacttaactccaatgaaattattcaaagaaaaagacagcaccagcatcagcattacgaccaacaaatattacaaccgcaaagggcgtacaatattccaactattgaacgcagtccaaacgtatacgtttctttgtccatcacgggattaagaaatttgggcaatacatgttacattaatagtatgatacaatgtttgttcgctgcgaaaacattcagaacactcttcatttcttccaaatataagagctatttacaaccaataaggagcaacggatctcattattctcctaaactttctaattctttgagtatgctcttcaacaagatgtatttgaatggtggttgctctgttgtcccaacaggatttctcaaagttatcaatcaattgcgtcccgatttgaaaattcctgatgaccaacaggatacccaagagttcttaatgatacttttagacaggttacacgatgaactttccgaccaacagcatgtagcgaacgattatccgaatttattattgtataatgcagatgccttgaaggtttctaacaacgaatataagcactggtttgacaaaaatgtcattggtaatggtatatctcctattgatgacatttttcaagggcaaatggagaacagcttacaatgtaaaaggtgcggttacactactttcaactatagcacattttatgttttatctttggctataccaagacgttccatgaagttgagtaaacttggtaggtctactgagaaaagagttaagttagaggattgtattaatatgtttacaagcgatgaggtactctctggtgaaaatgcatgggattgcccacgctgtggccccacggcgtctgtgtctacatctgtgtctgcattagagaatgagccatccattgttaagagtaaaaagaaaaaaagtagattttttacattacatacaggaaccaagcgtcgtcatctcgacttttttggagacggtattactgagggccataatagcaataataataatacgacaatctttgaaagagaaaggtccagatctcccttcaggatgttgggtggtagtgggaagaggtccagttccagtacaccgttcagtactggtggtaatgatagtaacaacagtagtgattacaagaacaaaaaattgacaacagtgaaaacgataaattttgtaactttaccaaaaatcttagtcatccatttatctagattttattacgatttgaccaagaaaaataacaccgtcgtaacatatccattgatattaaacattatattgaaaaacaatgacactatgaaatataagttatttggagtggttaaccatacaggcacattaatcagtggccattacacgtccttagtgaataaagaccttgaacacaatgtgaatattgggcgttctaaatggtactatttcgacgatgaggttgtcaaggcagataggaaacatggatctgataaaaacttgaaaatttccagtagcgatgtctacgtattgttttatgaaagggtttatgactga

SEQ ID NO: 5325 - DNA, 1950 bp, Saccharomyces cerevisiae
atgttttcggtaacgagaagaagagctgccggtgcagctgctgccatggccacagccacggggacgctgtactggatgactagccaaggtgataggccgttagtgcacaatgacccgagctacatggtgcaattccccaccgccgctccaccgcaggtctctagacgagacctgctggaccgtctggccaagacgcatcaattcgacgtgttgatcatcggtggcggggccacggggacaggatgtgccctagatgctgcgaccaggggactcaatgtggcccttgttgaaaagggggattttgcctcgggaacgtcgtccaaatctaccaagatgattcacggtggggtgcggtacttagagaaggccttctgggagttctccaaggcacaactggatctggtcatcgaggcactcaacgagcgtaaacatcttatcaacactgcccctcacctgtgcacggtgctaccaattctgatccccatctacagcacctggcaggtcccgtacatctatatgggctgtaaattctacgatttctttgccggttcccaaaacttgaaaaaatcatacctactgtccaaatccgccaccgtggagaaggctcccatgcttaccacagacaatttaaaggcctcgcttgtgtaccatgatgggtcctttaacgactcgcgtttgaacgccactttagccatcacggctgtggagaacggcgctaccgtcttgaactatgtcgaggtacaaaaattgatcaaagacccaacttctggtaaggttatcggtgccgaggcccgggacgttgagactaatgagcttgtcagaatcaacgctaaatgtgtggtcaatgccacgggcccatacagtgacgccattttgcaaatggaccgcaacccatccggtctgccggactccccgctaaacgacaactccaagatcaagtcgactttcaatcaaatcgccgtcatggacccgaaaatggtcatcccatctattggcgttcacatcgtattgccctctttttactgcccgaaggatatgggtttgttggacgtcagaacctctgatggcagagtgatgttctttttaccttggcagggcaaagtccttgccggcaccacagacatcccactaaagcaagtcccagaaaaccctatgcctacagaggctgatattcaagatatcttgaaagaactacagcactatatcgaattccccgtgaaaagagaagacgtgctaagtgcatgggctggtgtcagacctttggtcagagatccacgtacaatccccgcagacgggaagaagggctctgccactcagggcgtggtaagatcccacttcttgttcacttcggataatggcctaattactattgcaggtggtaaatggactacttacagacaaatggctgaggaaacagtcgacaaagttgtcgaagttggcggattccacaacctgaaaccttgtcacacaagagatattaagcttgctggtgcagaagaatggacgcaaaactatgtggctttattggctcaaaactaccatttatcatcaaaaatgtccaactacttggttcaaaactacggaacccgttcctctatcatttgcgaatttttcaaagaatccatggaaaataaactgcctttgtccttagccgacaaggaaaataacgtaatctactctagcgaggagaacaacttggtcaattttgatactttcagatatccattcacaatcggtgagttaaagtattccatgcagtacgaatattgtagaactcccttggacttccttttaagaagaacaagattcgccttcttggacgccaaggaagctttgaatgccgtgcatgccaccgtcaaagttatgggtgatgagttcaattggtcggagaaaaagaggcagtgggaacttgaaaaaactgtgaacttcatcaagacgtttggtgtctaa

SEQ ID NO: 5326 - DNA, 1950 bp, Artificial Sequence
  Description of Artificial Sequence: Synthetic polynucleotide
atgtttagcgtaacgagaagaagagctgccggtgcagctgctgccatggccacagccacggggacgttgtactggatgactagccaaggtgataggccgttagtgcacaatgacccgagctacatggtgcaattccccaccgccgctccaccgcaggtctctagaagagacttattagaccgtttggccaagacgcatcaattcgacgtgttgatcatcggtggcggggccacggggacaggatgtgccttggatgctgcgaccaggggactcaatgtggcccttgttgaaaagggggattttgccagtggaacgtcttccaaatctaccaagatgattcacggtggggtgaggtacttagagaaggccttctgggagttctccaaggcacaattggatttggtcatcgaggcactcaacgagcgtaaacatcttatcaacactgcccctcacttatgcacggtgttaccaattttgatccccatctacagcacctggcaggtcccgtacatctatatgggctgtaaattctacgatttctttgccggttcccaaaacttgaaaaaatcttacttgttatccaaatccgccaccgtggagaaggctcccatgcttaccacagacaatttaaaggcctctcttgtgtaccatgatgggtcctttaacgactctcgtttgaacgccactttagccatcacggctgtggagaacggcgctaccgtcttgaactatgtcgaggtacaaaaattgatcaaagacccaacttctggtaaggttatcggtgccgaggccagagacgttgagactaatgagcttgtcagaatcaacgctaaatgtgtggtcaatgccacgggcccatacagtgacgccattttgcaaatggaccgcaacccatccggtttaccggactccccgttgaacgacaactccaagatcaagtctactttcaatcaaatcgccgtcatggacccgaaaatggtcatcccatctattggcgttcacatcgtattgccctctttttactgcccgaaggatatgggtttgttggacgtcagaacctctgatggcagagtgatgttctttttaccttggcagggcaaagtccttgccggcaccacagacatcccattgaagcaagtcccagaaaaccctatgcctacagaggctgatattcaagatatcttgaaagaattacagcactatatcgaattccccgtgaaaagagaagacgtgttgagtgcatgggctggtgtcagacctttggtcagagatccacgtacaatccccgcagacgggaagaagggctctgccactcagggcgtggtaagatcccacttcttgttcacttctgataatggcttaattactattgcaggtggtaaatggactacttacagacaaatggctgaggaaacagtcgacaaagttgtcgaagttggcggattccacaacttgaaaccttgtcacacaagagatattaagcttgctggtgcagaagaatggacgcaaaactatgtggctttattggctcaaaactaccatttatcttctaaaatgtccaactacttggttcaaaactacggaacccgttcctctatcatttgcgaatttttcaaagaatccatggaaaataaattacctttgtccttagccgacaaggaaaataacgtaatctactctagcgaggagaacaacttggtcaattttgatactttcagatatccattcacaatcggtgagttaaagtattccatgcagtacgaatattgtagaactcccttggacttccttttaagaagaacaagattcgccttcttggacgccaaggaagctttgaatgccgtgcatgccaccgtcaaagttatgggtgatgagttcaattggtctgagaaaaagaggcagtgggaacttgaaaaaactgtgaacttcatcaagacgtttggtgtctga

SEQ ID NO: 5327 - DNA, 1041 bp, Saccharomyces cerevisiae
atgcagaagagcatattgctgactaaacctgacggaacacaatcgaatctacacagcatcaaaacggaaacgcccaccacggtggagttcgactcggagcagatggaaaggggccacagggaaagaggtcgtagcaagaagaaaagaggcgaacgagactcaaacgtgagcagtctgtcgcggtcgagaagcagggccagtagccgcagcagagtaagggaggaagagttcctcaagtggaccgtgttgaggcaggacccctcgatgcggttgagggtcgtggatgtggattctgaagaggaaggtgagggcaacgacgaagatgacgacgacggcgacggcgacgatatggacgaggaagagtccgatgaagagcaagtgagcgatatagagaacgatttagagattgacgaggagttccactacgatctgggcatgaaagtgttacccaacttttgtaccagcataaacgaagtgctagactccagcaagccctggatagccaagtacgagatcagcatccgtggccacgaaaacgaagacgtgtctctggagcaactcgacggaggctacgtcagagccatgcaactactcaccaagggtgccggcgcagaggccgggaaccaaaggtccttcatcctctacacggacctgagcagcgagtccacctacgccctgacctatctcatgggcgcagctgtcaaccagggagacaccgtctacattgtccactgggagccctcgaagcccacggacgactcccagatgttcgccaacgttgccagaatcagaaagcacgtcatgcacctgtttgactgcgtcgcgggcgtgctcgacgacctcgacgtcgtcgtcctctccttgacccatccgtacccaaaacacctcctcaacgagatgatccacggcctcaagccagtcgccctgtgctgctccctctcggtcatcctgtccactctgcagaacttcgtctgctctgtgcccatcctcgcggttagaaagaagctgaaacgtgccaagcgcaagggcatcagcgagtga

SEQ ID NO: 5328 - DNA, 1041 bp, Artificial Sequence
  Description of Artificial Sequence: Synthetic polynucleotide
atgcagaagagcatattgttgactaaacctgacggaacacaaagcaatttacacagcatcaaaacggaaacgcccaccacggtggagttcgactctgagcagatggaaaggggccacagggaaagaggtcgtagcaagaagaaaagaggcgaaagagactccaacgtgagcagtttatccagatctagaagcagggccagtagccgcagcagagtaagggaggaagagttcctcaagtggaccgtgttgaggcaggacccctctatgagattgagggtcgtggatgtggattctgaagaggaaggtgagggcaacgacgaagatgacgacgacggcgacggcgacgatatggacgaggaagagtccgatgaagagcaagtgagcgatatagagaacgatttagagattgacgaggagttccactacgatttgggcatgaaagtgttacccaacttttgtaccagcataaacgaagtgcttgactccagcaagccctggatagccaagtacgagatcagcatccgtggccacgaaaacgaagacgtgtctttggagcaactcgacggaggctacgtcagagccatgcaattgctcaccaagggtgccggcgcagaggccgggaaccaaaggtccttcatcctctacacggacttgagcagcgagtccacctacgccttgacctatctcatgggcgcagctgtcaaccagggagacaccgtctacattgtccactgggagccctccaagcccacggacgactcccagatgttcgccaacgttgccagaatcagaaagcacgtcatgcacctttttgactgcgtcgcgggcgtgctcgacgacctcgacgtcgtcgtcctctccttgacccatccgtacccaaaacacctcctcaacgagatgatccacggcctcaagccagtcgccctttgctgctccctctctgtcatcttgtccactttacagaacttcgtctgctctgtgcccatcctcgcggttagaaagaagttgaaacgtgccaagcgcaagggcatcagcgagtga

SEQ ID NO: 5329 - DNA, 1182 bp, Saccharomyces cerevisiae
atgtctctggatcgtgtagattggccgcacgccaccttctctacgccggtgaagcgtatcttcgatacgcagacaacgctggacttccaatcgtcactagccattcacagaatcaagtatcatcttcacaagtacactacgttgatatcgcactgttctgaccccgacccgcacgctactgcgtcgtcgatcgccatggttaacgggctgatgggagtgttggacaagctggcacacctgatcgacgagacaccgcctcttccaggtcctagaaggtatggtaacctagcatgccgcgagtggcatcacaagctggatgaacgtttgcctcagtggctgcaggaaatgcttccctcggaataccatgaggtggtgcctgaattgcagtattacctgggcaacagctttggttcgtcgacaagattggactacggcacgggccacgaactttcgttcatggccacggtcgcagcactggacatgctggggatgtttccgcacatgaggggggcagacgtttttctgctgttcaacaagtactacacgatcatgaggaggctgatcctgacgtatacgctggagcccgctgggtcacatggcgtgtgggggcttgatgaccatttccacttggtgtacatcttgggctcgtctcaatggcagctgcttgatgcgcaagcacccttgcaaccaagagaaatactggataagtctctggtgcgcgagtataaggacaccaacttctactgccaaggcataaactttattaatgaggtgaaaatggggccctttgaagagcattcccccatcctatacgatattgccgtcaccgttccacgctggtccaaagtgtgtaaggggcttctaaaaatgtattctgtagaggttctgaagaagttccccgtggtgcaacatttctggttcggcacaggcttctttccctgggtcaacattcaaaacggcactgatcttccagtctttgaagaaaaggaggaagagagtatagaacaggctaacgcaggatcgcccggtcgagaacagacttcaacacgattcccaacgtccacgtcaatgcctcccccaggcgttccgccgtcaggtaacaatatcaactatttactaagccatcaaaaccagtcgcaccggaaccagacttctttttcaagagatagactacgtagataa

SEQ ID NO: 5330 - DNA, 1182 bp, Artificial Sequence
  Description of Artificial Sequence: Synthetic polynucleotide
atgtctttagatcgtgtagattggccgcacgccaccttctctacgccggtgaagcgtatcttcgatacgcagacaacgcttgacttccaatcttctttggccattcacagaatcaagtatcatcttcacaagtacactacgttgatatctcactgttctgaccccgacccgcacgctactgcgtcttctatcgccatggttaacgggttgatgggagtgttggacaagttagcacacttaatcgacgagacaccgcctcttccaggtcctagaaggtatggtaacttggcatgccgcgagtggcatcacaagttggatgaacgtttgcctcagtggttacaggaaatgcttcccagtgaataccatgaggtggtgcctgaattgcagtattacttgggcaacagctttggttcttctacaagattggactacggcacgggccacgaactttctttcatggccacggtcgcagcattggacatgttggggatgtttccgcacatgaggggggcagacgtttttttattattcaacaagtactacacgatcatgaggaggttgatcttaacgtatacgttggagcccgctgggtctcatggcgtgtgggggcttgatgaccatttccacttggtgtacatcttgggctcttctcaatggcagttacttgatgcgcaagcacccttgcaaccaagagaaatattggataagtctttggtgcgcgagtataaggacaccaacttctactgccaaggcataaactttattaatgaggtgaaaatggggccctttgaagagcattcccccatcttgtacgatattgccgtcaccgttccacgctggtccaaagtgtgtaaggggcttttgaaaatgtattctgtagaggttttgaagaagttccccgtggtgcaacatttctggttcggcacaggcttctttccctgggtcaacattcaaaacggcactgatcttccagtctttgaagaaaaggaggaagagagtatagaacaggctaacgcaggaagtcccggtagagaacagacttctacaagattcccaacgtccacgtctatgcctcccccaggcgttccgccgtctggtaacaatatcaactatttattaagccatcaaaaccagtctcacagaaaccagacttctttttccagagatagattacgtagatga

SEQ ID NO: 5331 - DNA, 708 bp, Saccharomyces cerevisiae
atgagtcacaagagaaggggcctggtaatatatcaggatcagaagcagcaacaacaacaccccccggggcagtccctaagctctatatcctggtctccaaccaggcgacctcatcaccctttaaaacaacaaagcaccaacagtttctcagaaatactatcgaaatcaagtgtgcaaccgaacgtgcaacatgacggtaatcatatgcccatttcattgctagttctgaaacaagaacatcataagcagcagcagcagcagcagcagcgccagaatatccgatcacaaaactctacgcctcccctgcgacagttggttcaggagtcgcagtggacgagctccgcaagtaatagttctctaaagaaacaggaaaagcagccgcaaacattctacaacactgactctaaacttgtttctcaactgcatagctccgtgaaggacctggatgccataatccagacgcataaaccaaagtttgacacaattattcgcgatttctctcaagcaaccatactgtcctcaaacgagttactcatcaaacttccgaaggaccaaacaataatattgcatagcagagcgccaaaaattaacgcagaatggctacagaacaaggttaatgaccctagtgcctcgttagtgatcgattcaagatcttttctaaccttgtgtaacaatataaaatggtacctgcattggaaatttatatga

SEQ ID NO: 5332 - DNA, 708 bp, Artificial Sequence
  Description of Artificial Sequence: Synthetic polynucleotide
atgagtcacaagagaaggggcttagtaatatatcaggatcagaagcagcaacaacaacaccccccggggcagtccttaagctctatatcctggtctccaaccaggagacctcatcaccctttaaaacaacaaagcaccaacagtttctctgaaatattatccaaatctagtgtgcaaccgaacgtgcaacatgacggtaatcatatgcccatttctttgttggttttgaaacaagaacatcataagcagcagcagcagcagcagcagcgccagaatatcagatctcaaaactctacgcctcccttaagacagttggttcaggagagccagtggacgagctccgcaagtaatagttctttgaagaaacaggaaaagcagccgcaaacattctacaacactgactctaaacttgtttctcaattgcatagctccgtgaaggacttggatgccataatccagacgcataaaccaaagtttgacacaattattcgcgatttctctcaagcaaccatattatccagtaacgagttactcatcaaacttccgaaggaccaaacaataatattgcatagcagagcgccaaaaattaacgcagaatggttacagaacaaggttaatgaccctagtgcctctttagtgatcgattccagatcttttttaaccttgtgtaacaatataaaatggtacttgcattggaaatttatatga

SEQ ID NO: 5333 - DNA, 3357 bp, Saccharomyces cerevisiae
atggttgacctaatggtgccggcgaatgatgaccctagtaatgaaactgattattctagatccaacaacaaccacactcatattgtgagcgatatgcgcccgacctccgccgcatttcttcatcaaaagcgacatagttcttcgtcgcacaatgatacaccagagtcgtcgttcgctaaaagaagggtgcctggaattgtagatcccgtagggaaaggatttatagatggaataactaatagccagatctctgcacaaaacacaccctccaaaactgatgatgcatctagaagaccgagcatctctcgcaaagttatggaatcgacaccacaagttaagaccagttctattccaacaatggatgttcctaaatctccatattatgtgaatagaactatgcttgctcgaaatatgaaggttgtttctagagacacttatgaagataacgcaaatccacaaatgagagctgacgagccattagtcgcttcaaatggtatttatagcaattcgcaaccccaaagccaagtaactttatccgatattagaagagctcctgtagttgctgcttcacccccgccgatgataaggcaacttccttcggcgcagccaaatcagacgtttattaaaaaactgcaggaaatttataaaatcatagtggtgcaggaaaccgagttacaacaaagatgcctttatttaaccacctctcaaaccacagaactaaaaagtttgtgggcaatatacagactgaacacagaactgatcaaaaattacatcaatttcatcatcactgcattattaactacacaacctataaacgacttgattatgggccaagaaattttggatatttacagaatagaaaaaagattgtgggtttatggtataataaccttcttggatgtactaaagaacttttcgaactttatggacccagaggtatgttgtcagtttattatatacgctttcatctctgtctcaaatatgcttgaggatataccgttgaaatattctattttgtggagacaaagattgggtgatttgtctagaatggcaatatcgctgtacccatcaggattcatagattggaggctaagcgccgaatattggtataccgaatcaatgaaatacatatatgggtgcggaaaactatattatcatattgccacagttcaacagaacagtttagaagcgttcgtaaacttgggaaaaagtgttttttgtcaggatcccttcactccgtctcagcaaacgttacagttattgattgaaaatatctatcaatctgcattcatagatagaagttctggtagtgcgaacaataatgaaattgcccatagaaattctcaattaattgattatttaaagcatactgaagtaatgctattacctagtttcctggagaatatggatttacagcatgttgtgcttatgtacttcaaagacaagtttggtaaagattttaacggaaatgacgttttcgatacaaaagacatgttttgccaaaatccagaatcattgcgttattattttaggcatgcccctgcatttgctgaatctcagcttttacagctaatcggatttggcaatcctaaaaacccatttgcattattgtttcagttgcctaagtatttgaaattaaagaaggataaaagagaaaaaaagagatccgaagcaacagaaacatcttcctatacagatccattcgatgttcaaataagttcagaaagctacttccagaatatcgatgctttaaattcaagtttcaatgatatcccaaccaatctcaatatttggctggattctttgaatcatatcaacatgacgtcaatacaatgcagtatacatgtattaacaaaatttcttcatgcaccattagtggttgccttaccgcactttttgacgtggttacattttatagttgctattttgaaaaaattagaaatggtaaattcaaagcaagtagtagcattctggatacattttttaagaaggacaatgccttggaattcaatagtgaccttaggtaatgtattagtttgttacatgctggataatttacacccttttttgaaaaaagaattggaaaagttttattcattggaactggatgatttgatcgaatattataacgaaaatgaaaatcttccggagatttggaaatgttggggaacattgtggtttgacgctatcaagaagtgcgatgtaatggaaattcctggcgttcaagaccatctttttttcgattctccccttgatggtatagtctttgatgaaaaagatgaagttggtgaaaaattctggatgcgcagtgtgagagcagttttacttttgaaaggtattgccaagaaatttcccgatttggggttgaaagtaagctttcaagcttctgtgttttgtcgtcgaaatgacatacctccagattatttcctaaagaatttgacctttaagctagatgcatatgacgaagataattataacgacaacaacgaattagatgatctatatgacacaattgaaataaatgaagaaatcgaggctgttaacatggacccacaagccacaccgaatttgagcgtcgtttctggtgaaagtattttcgaatatactggttatacgagattggcaccagattatcattgttttgataaaaacggcgggttcaacagtgcatttatctacagccaatggtccaatgttggtaatggtgtaacactggatgtaagcggcgaatctatatacgatgttgccaacaacaacttgagcctgcattgggagaaaatattcttcgataaaattgccgccgcatctaaaggcagtgacgaaaactacaattgtacgctttattttgtcatcgatgctacctcatggttaagacactttgcacatattttcaaactagccaaaaacaatactcttaaatttgcgatttgtctgaccacatttcaagaactacgttatctaagaggatcgaaagacgatactgtcgtcgaagcagcaacaaggtcggtaattactattcgccagttgtacgatgaaaagaaaattattcctatgagattcacggggaatattgcaacacatgttgaagaaaatctggagttcgaagagcaaattacttggaagacgcacgtcgatgaatttgttattgatgctatcgccaaactgaaccaaaggtttcaagctgaaagattgactgatgaaaacaagaacaaaggcaaggagtttgcagtgctggtaacggatgatgataatatgaaccaaaaagcgaaggacagaatgataaaaacgtgcaatacaaagtatttattttcgttaggtagcaagcttggtattaatagtggattatgtaccaactaa

SEQ ID NO: 5334 - DNA, 3357 bp, Artificial Sequence
  Description of Artificial Sequence: Synthetic polynucleotide
atggttgacttgatggtgccggcgaatgatgaccctagtaatgaaactgattattctagatccaacaacaaccacactcatattgtgagcgatatgcgcccgacctccgccgcatttcttcatcaaaagagacatagttcttcttctcacaatgatacaccagagagttctttcgctaaaagaagggtgcctggaattgtagatcccgtagggaaaggatttatagatggaataactaatagccagatctctgcacaaaacacaccctccaaaactgatgatgcatctagaagaccgagcatctctcgcaaagttatggaatctacaccacaagttaagaccagttctattccaacaatggatgttcctaaatctccatattatgtgaatagaactatgcttgctagaaatatgaaggttgtttctagagacacttatgaagataacgcaaatccacaaatgagagctgacgagccattagtcgcttctaatggtatttatagcaattctcaaccccaaagccaagtaactttatccgatattagaagagctcctgtagttgctgcttctcccccgccgatgataaggcaacttccttctgcgcagccaaatcagacgtttattaaaaaattacaggaaatttataaaatcatagtggtgcaggaaaccgagttacaacaaagatgcctttatttaaccacctctcaaaccacagaattgaaaagtttgtgggcaatatacagattgaacacagaattgatcaaaaattacatcaatttcatcatcactgcattattaactacacaacctataaacgacttgattatgggccaagaaattttggatatttacagaatagaaaaaagattgtgggtttatggtataataaccttcttggatgtattgaagaacttttccaactttatggacccagaggtatgttgtcagtttattatatacgctttcatctctgtctccaatatgcttgaggatataccgttgaaatattctattttgtggagacaaagattgggtgatttgtctagaatggcaatatctttgtacccatctggattcatagattggaggttgagcgccgaatattggtataccgaaagtatgaaatacatatatgggtgcggaaaactttattatcatattgccacagttcaacagaacagtttagaagcgttcgtaaacttgggaaaaagtgttttttgtcaggatcccttcactccgtctcagcaaacgttacagttattgattgaaaatatctatcaatctgcattcatagatagaagttctggtagtgcgaacaataatgaaattgcccatagaaattctcaattaattgattatttaaagcatactgaagtaatgcttttacctagtttcttggagaatatggatttacagcatgttgtgcttatgtacttcaaagacaagtttggtaaagattttaacggaaatgacgttttcgatacaaaagacatgttttgccaaaatccagaatctttgcgttattattttaggcatgcccctgcatttgctgaatctcagcttttacagttaatcggatttggcaatcctaaaaacccatttgcattattgtttcagttgcctaagtatttgaaattaaagaaggataaaagagaaaaaaagagatccgaagcaacagaaacatcttcctatacagatccattcgatgttcaaataagttctgaaagctacttccagaatatcgatgctttaaatagtagtttcaatgatatcccaaccaatctcaatatttggcttgattctttgaatcatatcaacatgacgtctatacaatgcagtatacatgtattaacaaaatttcttcatgcaccattagtggttgccttaccgcactttttgacgtggttacattttatagttgctattttgaaaaaattagaaatggtaaattctaagcaagtagtagcattctggatacattttttaagaaggacaatgccttggaattctatagtgaccttaggtaatgtattagtttgttacatgcttgataatttacacccttttttgaaaaaagaattggaaaagttttattctttggaattagatgatttgatcgaatattataacgaaaatgaaaatcttccggagatttggaaatgttggggaacattgtggtttgacgctatcaagaagtgcgatgtaatggaaattcctggcgttcaagaccatctttttttcgattctccccttgatggtatagtctttgatgaaaaagatgaagttggtgaaaaattctggatgcgcagtgtgagagcagttttacttttgaaaggtattgccaagaaatttcccgatttggggttgaaagtaagctttcaagcttctgtgttttgtcgtagaaatgacatacctccagattatttcttgaagaatttgacctttaagttggatgcatatgacgaagataattataacgacaacaacgaattagatgatttatatgacacaattgaaataaatgaagaaatcgaggctgttaacatggacccacaagccacaccgaatttgagcgtcgtttctggtgaaagtattttcgaatatactggttatacgagattggcaccagattatcattgttttgataaaaacggcgggttcaacagtgcatttatctacagccaatggtccaatgttggtaatggtgtaacattagatgtaagcggcgaatctatatacgatgttgccaacaacaacttgagcttgcattgggagaaaatattcttcgataaaattgccgccgcatctaaaggcagtgacgaaaactacaattgtacgctttattttgtcatcgatgctaccagttggttaagacactttgcacatattttcaaattggccaaaaacaatactcttaaatttgcgatttgtttgaccacatttcaagaattgcgttatttaagaggatctaaagacgatactgtcgtcgaagcagcaacaaggtctgtaattactattcgccagttgtacgatgaaaagaaaattattcctatgagattcacggggaatattgcaacacatgttgaagaaaatttggagttcgaagagcaaattacttggaagacgcacgtcgatgaatttgttattgatgctatcgccaaattgaaccaaaggtttcaagctgaaagattgactgatgaaaacaagaacaaaggcaaggagtttgcagtgttagtaacggatgatgataatatgaaccaaaaagcgaaggacagaatgataaaaacgtgcaatacaaagtatttattttctttaggtagcaagcttggtattaatagtggattatgtaccaactga

SEQ ID NO: 5335 - DNA, 1716 bp, Saccharomyces cerevisiae
atgaatgatcctcgtgaaattttagcggttgatccgtacaataatattacttctgatgaagaggatgagcaagccatcgcgagagaacttgaatttatggaacgaaagaggcaggccttagtggaacgattaaaaagaaagcaagaatttaagaaaccccaggatcctaattttgaagccatcgaggtacctcaatctcctaccaaaaaccgtgtgaaagtggggtctcataatgctacacaacaaggcacaaaattcgaaggttcgaatattaatgaagtaaggttatctcaattacagcagcaaccaaaaccaccagctagtacaaccacatactttatggagaaatttcaaaacgcaaagaagaacgaagataaacaaattgccaagtttgaaagcatgatgaatgcaagagtacatacgttcagtaccgatgagaagaaatatgtgccgataatcacaaacgaattagaaagcttttcaaatctttgggttaaaaagaggtacatacctgaagatgacttaaaacgggctttgcatgagatcaaaatccttcggttgggcaaactttttgctaaaattcgcccacctaaatttcaagagcctgaatacgccaactgggccaccgtaggcctcattagccacaaatcggacatcaaatttacatcatctgaaaagccagtcaaattcttcatgttcaccataacggactttcagcatacactagatgtttatatcttcgggaaaaagggtgtagaaagatattataatcttcgcctgggtgatgtgatagcaatattaaacccagaagtactaccatggagaccctcagggcgaggaaattttatcaaatccttcaaccttcgaattagtcatgacttcaaatgtatcctggagataggttcaagtagagatttaggttggtgtcccatagtgaataaaaagactcacaaaaaatgtggctctcccattaacatatctcttcataagtgttgcgattaccatagagaagtgcaatttcgtggaacaagtgctaaaagaattgaattaaatggtgggtacgccttgggcgcgcctacgaaagtggactctcaaccaagcctatataaggccaaaggggaaaacgggtttaatataatcaaaggtactcgtaagcgcctgtcagaagaggaggaaagacttaaaaagagctctcacaattttacgaatagtaattctgccaaagcatttttcgacgagaaatttcagaatccagatatgctggcaaacttagacaataaaagaaggaaaataatagaaactaagaaatcgacagcactgagccgcgaactaggcaaaattatgagaaggagggaatccagcggattagaagataagagcgtcggagagcgacagaaaatgaaacgaaccacagaaagtgccctccagacagggcttatccaacgcctaggattcgatcccactcatggaaaaatttcccaagtactcaagtcttctgtatcagggagcgaacctaagaacaacttactcggtaaaaaaaaaactgttataaacgatctcttgcattacaagaaggaaaaagtcattctcgcaccttcaaagaacgaatggttcaagaaaagaagccatcgcgaagaagtttggcaaaaacatttcggatccaaggaaactaaagaaacttctgacggtagtgccagcgatcttgagataatataa

SEQ ID NO: 5336 - DNA, 1716 bp, Artificial Sequence
  Description of Artificial Sequence: Synthetic polynucleotide
atgaatgatcctcgtgaaattttagcggttgatccgtacaataatattacttctgatgaagaggatgagcaagccatcgcgagagaacttgaatttatggaaagaaagaggcaggccttagtggaaagattaaaaagaaagcaagaatttaagaaaccccaggatcctaattttgaagccatcgaggtacctcaatctcctaccaaaaaccgtgtgaaagtggggtctcataatgctacacaacaaggcacaaaattcgaaggtagtaatattaatgaagtaaggttatctcaattacagcagcaaccaaaaccaccagctagtacaaccacatactttatggagaaatttcaaaacgcaaagaagaacgaagataaacaaattgccaagtttgaaagcatgatgaatgcaagagtacatacgttcagtaccgatgagaagaaatatgtgccgataatcacaaacgaattagaaagcttttctaatctttgggttaaaaagaggtacatacctgaagatgacttaaaaagagctttgcatgagatcaaaatccttagattgggcaaactttttgctaaaattcgcccacctaaatttcaagagcctgaatacgccaactgggccaccgtaggcctcattagccacaaaagtgacatcaaatttacatcttctgaaaagccagtcaaattcttcatgttcaccataacggactttcagcatacattagatgtttatatcttcgggaaaaagggtgtagaaagatattataatcttcgcttgggtgatgtgatagcaatattaaacccagaagtattgccatggagacccagtgggagaggaaattttatcaaatccttcaaccttagaattagtcatgacttcaaatgtatcttggagataggtagtagtagagatttaggttggtgtcccatagtgaataaaaagactcacaaaaaatgtggctctcccattaacatatctcttcataagtgttgcgattaccatagagaagtgcaatttcgtggaacaagtgctaaaagaattgaattaaatggtgggtacgccttgggcgcgcctacgaaagtggactctcaaccaagcttgtataaggccaaaggggaaaacgggtttaatataatcaaaggtactcgtaagcgcttatctgaagaggaggaaagacttaaaaagagctctcacaattttacgaatagtaattctgccaaagcatttttcgacgagaaatttcagaatccagatatgttagcaaacttagacaataaaagaaggaaaataatagaaactaagaaatctacagcattaagccgcgaattaggcaaaattatgagaaggagggaatccagcggattagaagataagagcgtcggagagagacagaaaatgaaaagaaccacagaaagtgccctccagacagggcttatccaacgccttggattcgatcccactcatggaaaaatttcccaagtactcaagtcttctgtaagtgggagcgaacctaagaacaacttactcggtaaaaaaaaaactgttataaacgatctcttgcattacaagaaggaaaaagtcattctcgcaccttctaagaacgaatggttcaagaaaagaagccatcgcgaagaagtttggcaaaaacatttcggatccaaggaaactaaagaaacttctgacggtagtgccagcgatcttgagataatatga

SEQ ID NO: 5337 - DNA, 5040 bp, Saccharomyces cerevisiae
atggaggacaaaatatctgagtttttaaatgttccattcgaatcacttcaaggtgttacctatcctgtcttaagaaagttatacaagaaaatagccaagtttgaacgttctgaagaggaagtgacaaaactcaatgttttggtcgatgagatcaaatcgcagtactattcaaggatttcaaaacttaagcagctactagatgaatcttctgagcagaagaacacagctaaagaagaattgaatggcttgaaagatcagctgaatgaagaacgttccagatataggcgggaaatagatgcactaaaaaaacaattgcatgtgagccatgaagctatgagagaagtaaatgacgaaaaacgagttaaagaagaatatgacatttggcagagtagagatcaggggaatgattctttaaatgatgatttgaacaaagaaaataagcttcttcgaagaaagctgatggaaatggaaaatatactacaaaggtgcaagtccaatgctatatcattacagttaaagtacgatacctcagtacaggaaaaagaattaatgttacaaagtaaaaaattaattgaagaaaaattatcatcttttagcaaaaaaacgctaacagaagaagtcacaaaatcatcgcacgtagagaacctcgaagaaaaactataccaaatgcaatccaactatgaatctgtctttacgtacaataagtttttactaaatcaaaataaacaattatcccagtcggtggaagagaaagtactggaaatgaaaaatttgaaagataccgcaagtgtggaaaaagcagaattctccaaagaaatgactttacaaaaaaatatgaacgatttgctacgctcacaactaacatcattggaaaaagattgttccttgagagcaatagagaaaaatgatgataattcctgcaggaaccctgaacatactgatgtgatagacgaacttatagacacaaaattaagactcgaaaaatcaaaaaatgagtgtcaaaggttacagaatatagttatggattgtaccaaggaagaagaagctacaatgactacgagtgcagtttctcccacagtaggtaaactattttctgatatcaaagtgctgaaaagacaattgataaaggaaaggaatcagaaatttcaattacagaatcaactggaggattttatactagaattagagcataaaacccctgaactgatctcttttaaggaaagaacaaaatcattggaacatgaactaaaacgttccacagaactactagaaactgtttctttgactaagcgtaagcaagaaagagaaataacttcactgagacagaagataaatggctgtgaagcaaatattcattctctggtgaaacaacgtttggatttggcccgtcaagttaaactacttcttttaaatacatctgcgatacaggaaacggcatcgccgttatcgcaagatgaactgatatcattaagaaaaatactggagtcgagcaatatcgtaaatgaaaatgattcccaagccatcattacggaaagactggttgaattcagtaatgtgaatgagctacaagaaaaaaatgttgaactcttgaattgcattcggattttggctgataaattagaaaattatgaaggaaaacaagacaagaccttacaaaaggtagaaaaccagaccattaaagaagcaaaagatgcaataattgaactggagaacatcaatgcgaagatggaaacccggataaatatcctattaagagagcgggattcttacaaattgctggcatcaactgaagaaaacaaggccaacacaaattctgtcacttctatggaagcagcccgtgaaaagaagattagagaacttgaggcagaactttcatctacaaaagtcgaaaactctgctattattcagaatttaagaaaagagttgttaatttataagaaatcacaatgcaaaaaaaaaacaactttagaggattttgaaaatttcaagggtttggcaaaggaaaaagaacgtatgttagaggaagcaatagaccacctaaaagctgaactcgagaaacaaaaatcatgggttccatcatacatacatgttgagaaagaaagagcctcaactgaactgtcacagtctaggatcaaaatcaaatctttggagtacgagatttccaaactgaaaaaggaaactgccagctttatacccacgaaagaatctttaactagagatttcgaacaatgctgcaaagaaaaaaaagaattgcagatgagactaaaggagtctgaaatcagtcataatgaaaataaaatggattttagctcgaaagagggccaatacaaagccaaaatcaaagaattggaaaacaatttggaaagattacgttccgacttacaatcaaagatacaagaaatagaatcgatacgctcatgcaaggattcgcaactcaaatgggctcaaaataccatcgatgatacagaaatgaaaatgaagtccttactaactgaattatcaaataaggaaacaacgattgaaaaactttcatcagaaatagagaacctggataaggaactaagaaaaaccaaattccaatataaattcttggatcaaaatagtgatgcaagcacgttagaaccgactttgagaaaagaattagagcaaatccaagttcaattgaaggatgcaaactcacagatacaggcttatgaagaaattatatcatcgaatgaaaatgcgctaatagaattgaaaaatgaactagcaaaaaccaaagaaaattacgatgctaagattgaactagagaagaaggaaaaatgggcgagggaagaagatctatctcgtttacgcggagagctcggtgaaataagagctttgcaaccgaaactaaaagaaggtgcattgcatttcgttcaacaatcagaaaagttgaggaatgaggtagaaaggatccaaaaaatgatagaaaaaattgaaaaaatgagtacgattgtccaactgtgcaaaaaaaaagaaatgtcccaatatcagtccacaatgaaggaaaataaagatctatctgaattggttatccgccttgaaaaggatgcggctgattgccaagcagaattaacaaaaaccaaatcctcattgtatagcgctcaggatttactcgataaacatgaaaggaaatggatggaggaaaaggctgattatgaaagagaattgatatctaatattgaacagacggaatccttgcgtgttgaaaattcggtattgattgaaaaggttgatgacacagcagcaaataatggcgataaagatcatttgaagctagtttctttgttttcaaacttacgtcatgaaagaaattctttagagacgaagttaaccacctgtaagagagaattggcattcgttaaacaaaagaacgatagtttagaaaaaacgataaatgacctgcaacgaacccagactttatcggagaaggaataccaatgctctgcagttattattgacgaattcaaggatatcacgaaagaagttactcaagttaacattttaaaagagaataatgccatcttacaaaagagtctcaaaaacgtaaccgaaaaaaacagggaaatttataaacaattaaatgataggcaagaagaaatttctcgattacagcgtgatctcatacaaacaaaagaacaagtttcgataaattctaacaaaattttagtatatgaaagtgaaatggagcaatgtaaacagaggtaccaggacttatctcaacaacaaaaagatgcccaaaaaaaagacattgaaaagctaactaatgagattagtgatttgaagggaaaactttcaagcgctgagaacgcaaacgctgacttggaaaataaattcaataggctaaagaagcaggctcatgaaaaattggacgcatctaagaaacaacaagctgctttaactaacgaactcaacgaattaaaagcaattaaagacaaattagaacaagatctacactttgaaaacgctaaagttattgatctagatacgaagctcaaagcacatgaactccaatcagaagacgtctcgagagatcacgaaaaggacacttatcggacattaatggaggaaattgaatcactcaaaaaggagttacaaattttcaaaactgcgaatagctcatctgatgcatttgagaaattgaaagttaacatggagaaagaaaaggacagaattattgacgaaagaacgaaggaatttgaaaaaaaattacaagagaccttaaataagagtacaagctcagaagcagaatacagtaaagatatcgaaacattgaaaaaggaatggctaaaggaatatgaagatgaaacgttaaggagaattaaggaagcagaagagaatttaaagaaaagaataaggttaccaagcgaggaaaggatacaaaagatcattagtaagcgtaaagaagaattagaagaagaatttcgaaagaaattgaaagaaaacgcgggaagcttaacgtttcttgataacaaaggtagcggggaagatgccgaagaagaattatggaacagtccatcgaaggggaattctgagaggccgtcggctgtcgctggctttataaatcaaaaaaaccttaaacctcaagaacaattgaagaatgtgaagaatgacgtttccttcaatgacagccagtcaatggttacaaataaagaaaataatatcgtggatagtagcgctgctggtaacaaggccattccaacctttagttttggtaagccattcttctcctctaatacatcatctcttcaaagttttcagaacccattcacagcatcccaatctaatatcaatacgaatgcccccctacgtacactcaatattcaacctgaagttgcagtcaaagcggcgattaacttttccaacgtaaccgatctaactaacaatagcaccgatggagcaaaaataacagaaattggaagtacatctaaacggccaattgagagcggtacatcttctgatccagacaccaaaaaggttaaagagagtccagcaaatgatcaagcttccaacgagtga

SEQ ID NO: 5338 - DNA, 5040 bp, Artificial Sequence
  Description of Artificial Sequence: Synthetic polynucleotide
atggaggacaaaatatctgagtttttaaatgttccattcgaatctcttcaaggtgttacctatcctgtcttaagaaagttatacaagaaaatagccaagtttgaacgttctgaagaggaagtgacaaaactcaatgttttggtcgatgagatcaaatctcagtactattctaggatttccaaacttaagcagttgttggatgaatcttctgagcagaagaacacagctaaagaagaattgaatggcttgaaagatcagttgaatgaagaacgttccagatataggagagaaatagatgcattgaaaaaacaattgcatgtgagccatgaagctatgagagaagtaaatgacgaaaaaagagttaaagaagaatatgacatttggcagagtagagatcaggggaatgattctttaaatgatgatttgaacaaagaaaataagcttcttagaagaaagttgatggaaatggaaaatatattgcaaaggtgcaagtccaatgctatatctttacagttaaagtacgatacctctgtacaggaaaaagaattaatgttacaaagtaaaaaattaattgaagaaaaattatcttcttttagcaaaaaaacgttgacagaagaagtcacaaaaagctctcacgtagagaacctcgaagaaaaactttaccaaatgcaatccaactatgaatctgtctttacgtacaataagtttttattgaatcaaaataaacaattatcccagtctgtggaagagaaagtattggaaatgaaaaatttgaaagataccgcaagtgtggaaaaagcagaattctccaaagaaatgactttacaaaaaaatatgaacgatttgttacgctctcaattgacatctttggaaaaagattgttccttgagagcaatagagaaaaatgatgataattcctgcaggaaccctgaacatactgatgtgatagacgaacttatagacacaaaattaagactcgaaaaatctaaaaatgagtgtcaaaggttacagaatatagttatggattgtaccaaggaagaagaagctacaatgactacgagtgcagtttctcccacagtaggtaaattattttctgatatcaaagtgttgaaaagacaattgataaaggaaaggaatcagaaatttcaattacagaatcaattggaggattttatattggaattagagcataaaacccctgaattgatctcttttaaggaaagaacaaaatctttggaacatgaattgaaacgttccacagaattattggaaactgtttctttgactaagcgtaagcaagaaagagaaataacttctttgagacagaagataaatggctgtgaagcaaatattcattctttggtgaaacaacgtttggatttggcccgtcaagttaaattacttcttttaaatacatctgcgatacaggaaacggcaagtccgttatctcaagatgaattgatatctttaagaaaaatattggagagcagcaatatcgtaaatgaaaatgattcccaagccatcattacggaaagattggttgaattcagtaatgtgaatgagttacaagaaaaaaatgttgaactcttgaattgcattagaattttggctgataaattagaaaattatgaaggaaaacaagacaagaccttacaaaaggtagaaaaccagaccattaaagaagcaaaagatgcaataattgaattagagaacatcaatgcgaagatggaaaccagaataaatatcttattaagagagagagattcttacaaattgttggcatctactgaagaaaacaaggccaacacaaattctgtcacttctatggaagcagcccgtgaaaagaagattagagaacttgaggcagaactttcttctacaaaagtcgaaaactctgctattattcagaatttaagaaaagagttgttaatttataagaaatctcaatgcaaaaaaaaaacaactttagaggattttgaaaatttcaagggtttggcaaaggaaaaagaacgtatgttagaggaagcaatagaccacttgaaagctgaactcgagaaacaaaaaagttgggttccatcttacatacatgttgagaaagaaagagcctctactgaattatctcagtctaggatcaaaatcaaatctttggagtacgagatttccaaattgaaaaaggaaactgccagctttatacccacgaaagaatctttaactagagatttcgaacaatgctgcaaagaaaaaaaagaattgcagatgagattaaaggagtctgaaatcagtcataatgaaaataaaatggattttagcagtaaagagggccaatacaaagccaaaatcaaagaattggaaaacaatttggaaagattacgttccgacttacaatccaagatacaagaaatagaaagtatacgctcttgcaaggattctcaactcaaatgggctcaaaataccatcgatgatacagaaatgaaaatgaagtccttattaactgaattatccaataaggaaacaacgattgaaaaactttcttctgaaatagagaaccttgataaggaattgagaaaaaccaaattccaatataaattcttggatcaaaatagtgatgcaagcacgttagaaccgactttgagaaaagaattagagcaaatccaagttcaattgaaggatgcaaactctcagatacaggcttatgaagaaattatatcttccaatgaaaatgcgttaatagaattgaaaaatgaattggcaaaaaccaaagaaaattacgatgctaagattgaattagagaagaaggaaaaatgggcgagggaagaagatttatctcgtttacgcggagagctcggtgaaataagagctttgcaaccgaaattgaaagaaggtgcattgcatttcgttcaacaaagtgaaaagttgaggaatgaggtagaaaggatccaaaaaatgatagaaaaaattgaaaaaatgagtacgattgtccaattatgcaaaaaaaaagaaatgtcccaatatcagtccacaatgaaggaaaataaagatttatctgaattggttatccgccttgaaaaggatgcggctgattgccaagcagaattaacaaaaaccaaatcctctttgtatagcgctcaggatttactcgataaacatgaaaggaaatggatggaggaaaaggctgattatgaaagagaattgatatctaatattgaacagacggaatccttgcgtgttgaaaattctgtattgattgaaaaggttgatgacacagcagcaaataatggcgataaagatcatttgaagttggtttctttgttttccaacttacgtcatgaaagaaattctttagagacgaagttaaccacctgtaagagagaattggcattcgttaaacaaaagaacgatagtttagaaaaaacgataaatgacttgcaaagaacccagactttatctgagaaggaataccaatgctctgcagttattattgacgaattcaaggatatcacgaaagaagttactcaagttaacattttaaaagagaataatgccatcttacaaaagagtctcaaaaacgtaaccgaaaaaaacagggaaatttataaacaattaaatgataggcaagaagaaatttctagattacagcgtgatctcatacaaacaaaagaacaagtttctataaattctaacaaaattttagtatatgaaagtgaaatggagcaatgtaaacagaggtaccaggacttatctcaacaacaaaaagatgcccaaaaaaaagacattgaaaagttgactaatgagattagtgatttgaagggaaaactttctagcgctgagaacgcaaacgctgacttggaaaataaattcaataggttaaagaagcaggctcatgaaaaattggacgcatctaagaaacaacaagctgctttaactaacgaactcaacgaattaaaagcaattaaagacaaattagaacaagatttacactttgaaaacgctaaagttattgatttggatacgaagctcaaagcacatgaactccaaagtgaagacgtctctagagatcacgaaaaggacacttatagaacattaatggaggaaattgaatctctcaaaaaggagttacaaattttcaaaactgcgaatagctcttctgatgcatttgagaaattgaaagttaacatggagaaagaaaaggacagaattattgacgaaagaacgaaggaatttgaaaaaaaattacaagagaccttaaataagagtacaagctctgaagcagaatacagtaaagatatcgaaacattgaaaaaggaatggttaaaggaatatgaagatgaaacgttaaggagaattaaggaagcagaagagaatttaaagaaaagaataaggttaccaagcgaggaaaggatacaaaagatcattagtaagcgtaaagaagaattagaagaagaatttagaaagaaattgaaagaaaacgcgggaagcttaacgtttcttgataacaaaggtagcggggaagatgccgaagaagaattatggaacagtccatctaaggggaattctgagaggccgagtgctgtcgctggctttataaatcaaaaaaaccttaaacctcaagaacaattgaagaatgtgaagaatgacgtttccttcaatgacagccagtccatggttacaaataaagaaaataatatcgtggatagtagcgctgctggtaacaaggccattccaacctttagttttggtaagccattcttctcctctaatacatcttctcttcaaagttttcagaacccattcacagcatcccaatctaatatcaatacgaatgcccccttacgtacactcaatattcaacctgaagttgcagtcaaagcggcgattaacttttccaacgtaaccgatttgactaacaatagcaccgatggagcaaaaataacagaaattggaagtacatctaaaaggccaattgagagcggtacatcttctgatccagacaccaaaaaggttaaagagagtccagcaaatgatcaagcttccaacgagtga

SEQ ID NO: 5339 - DNA, 387 bp, Saccharomyces cerevisiae
atgcaaatttttgtcaagactttgactggtaagaccatcactttggaagttgaatcttctgacactattgacaatgtcaagtcaaagattcaagacaaggaaggtatcccacctgaccaacaaagattgatctttgctggtaagcaattggaagacggtagaaccttgtctgactacaacattcaaaaagaatccactttgcacttagtcttgagattgagaggtggtatcattgaaccatctttgaaagctttggcttccaagtacaactgtgacaaatctgtttgccgtaagtgttatgctagattgccaccaagagctaccaactgtagaaagagaaagtgtggtcacaccaaccaattgcgtccaaagaagaagttaaaatga

SEQ ID NO: 5340 - DNA, 387 bp, Artificial Sequence
  Description of Artificial Sequence: Synthetic polynucleotide
atgcaaatttttgtcaagactttgactggtaagaccatcactttggaagttgaatcttctgacactattgacaatgtcaagtccaagattcaagacaaggaaggtatcccacctgaccaacaaagattgatctttgctggtaagcaattggaagacggtagaaccttgtctgactacaacattcaaaaagaatccactttgcacttagtcttgagattgagaggtggtatcattgaaccatctttgaaagctttggcttccaagtacaactgtgacaaatctgtttgccgtaagtgttatgctagattgccaccaagagctaccaactgtagaaagagaaagtgtggtcacaccaaccaattgcgtccaaagaagaagttaaaatga

SEQ ID NO: 5341 - DNA, 3663 bp, Saccharomyces cerevisiae
atgcgatttggcctgccatcaaaattggaactcactcctccgtttaggataggcatccgaactcaactaacggcactagttagtatagtggctttgggctcactgattattctggctgtaacgacaggggtctattttacctcgaactataaaaatttaaggtccgatagactgtacattgccgctcagttaaagtcatcacagattgaccaaactctaaactacttatattaccaggcgtactatttggcatcaagagacgccctgcaaagctcactaacaagttacgttgcaggtaacaagagtgcagataattgggtagattccttgagtgtgattcaaaaatttttgagctcttcaaacttgttttatgttgctaaagtttacgattcttcatttaatgctgttttgaacgctacgaataatggaactggtgatctaattccagaagatgttttagacagtttgttcccattatccaccgatacaccgctaccttcttcactggaaactataggtatattgacggatccagtactaaatagcaccgactatttgatgtctatgtctttacctatttttgccaatccttctattatcttgactgattcaagggtttacggatacattactataataatgtcggcagagggtctgaaaagtgtgttcaacgatacaactgctttagaacattccacaattgccattatttctgcagtatataatagtcaaggcaaagcttcagggtatcattttgtctttccaccgtatggatcacgatcagacctcccgcaaaaagttttttctataaaaaatgatacattcattagtagcgcatttagaaacgggaagggagggtctttgaaacaaaccaatatcctttctacacggaatactgctttaggctattcaccatgttcgtttaacctagttaattgggtcgcgatagtttcacagcctgagtcggttttcctttctccagcaacgaaactagcaaaaatcatcaccggcactgtcatcgctattggtgtctttgtcattttgttaacccttcctctagcacactgggcagtgcaaccaattgtacgtctacaaaaggcaactgaattaattacagaggggagaggccttcgaccgagcaccccaagaacgataagcagagccagttcattcaaaagaggatttagttctggatttgctgttccttcttcgttattacaatttaatactgctgaagctggcagcaccacaagcgtaagtggccatggaggcagtggccatggcagtggtgcagctttttcagcaaatagtagcatgaaaagcgctataaaccttggaaatgagaaaatgtcacctccagaggaggagaacaaaataccgaataaccacaccgatgctaaaatatcaatggatggctcgctaaatcacgatttgcttggaccacattccttgagacataatgacactgacagaagttccaatagatctcacattctcacaacttctgcaaatttaactgaagctaggctaccagattatagaagactattttctgatgaactttccgatttaacagaaaccttcaatactatgacagacgcattagaccaacattatgctcttctagaagaaagagttagggcgaggacaaaacaactcgaagctgccaagattgaggcagaggccgcaaatgaagcaaaaaccgtctttattgccaatatttcgcacgaattgagaacgcctttaaatggtattctgggtatgacggctatttcaatggaagaaaccgatgttaacaaaataagaaatagtttaaaactcatttttagatcaggtgagcttttgcttcatattctaacggaattgttaactttttccaaaaacgttcttcaaagaacgaaactggagaaaagagatttttgcattaccgatgttgccttacaaataaaatcgatatttggtaaagttgcaaaggatcagcgtgttcgtctttcaatatcattgtttcctaatttgataaggacaatggttctttggggtgattccaacagaattattcaaattgtgatgaatctagtgtccaatgcactaaagttcacccctgtagatggtaccgttgatgtaagaatgaaactgttgggtgaatacgacaaagaattaagcgagaagaagcaatacaaagaagtgtatatcaaaaaagggacagaagtaaccgaaaatttagaaactacagataaatacgatcttccaactttatcgaaccataggaaaagtgtcgatttagaatccagcgctacttccctaggaagtaatagagacacttcgacaattcaggaagagataacaaaaagaaatactgttgcgaatgaaagtatctataagaaagtgaatgacagggaaaaagcttcgaatgatgatgtatcttctatagtatcaacaactaccagctcgtatgataacgctatcttcaatagtcagttcaataaagcacctggctcagatgatgaagaaggtggtaacctaggaagacctatcgaaaaccccaaaacgtgggttatttctattgaagtggaagacactgggcctggtattgacccttccttacaagaatctgtatttcatccatttgttcaaggtgatcaaacattgtccaggcaatatggtggtactggcttaggtctatcaatctgtagacagttagcaaatatgatgcatggaacgatgaaattagagtcgaaagtaggtgttggtagtaaattcacttttaccttgccattaaatcaaactaaagagatcagttttgcagatatggagtttccttttgaggacgaatttaatcctgagagtagaaagaacagaagagtcaagtttagtgttgctaaaagcatcaagagccgacaatccacatcatctgttgcaacaccagctacaaatagaagtagcctaaccaacgacgtgctaccggaggtaagaagtaaaggtaagcatgagacgaaagatgttggaaatcctaacatgggaagagaagaaaaaaacgacaatggagggcttgaacaactgcaggaaaaaaatattaaaccttctatatgtcttacaggtgctgaagttaacgaacaaaattccttgtcttctaagcatcgttctcgacatgaaggtctaggttctgtcaatcttgatagaccatttttgcaaagtactggtacagccacatcaagtagaaacatccccacagtcaaagacgacgataaaaatgaaacaagtgtcaaaattttggttgtagaagataatcatgtaaatcaggaagttatcaaaagaatgttgaacttggagggcattgaaaatattgaactggcttgcgatggccaagaagcattcgacaaagttaaagaattgacatctaagggcgaaaattataatatgattttcatggatgtccagatgcctaaagtggatggtttactttctaccaagatgataaggcgcgatttaggttatacctcacctattgtcgctctaaccgcttttgctgacgatagcaacattaaagaatgtttggaatcaggaatgaacggatttttatcgaaaccaatcaaaagaccaaaattgaaaactattcttactgagttttgtgcagcatatcagggaaagaaaaataacaaatga

SEQ ID NO: 5342 - DNA, 3663 bp, Artificial Sequence
  Description of Artificial Sequence: Synthetic polynucleotide
atgagatttggcttaccatctaaattggaactcactcctccgtttaggataggcatcagaactcaattaacggcattggttagtatagtggctttgggctctttgattattttggctgtaacgacaggggtctattttaccagtaactataaaaatttaaggtccgatagattatacattgccgctcagttaaagagttctcagattgaccaaactttgaactacttatattaccaggcgtactatttggcatctagagacgccttgcaaagctctttaacaagttacgttgcaggtaacaagagtgcagataattgggtagattccttgagtgtgattcaaaaatttttgagctcttccaacttgttttatgttgctaaagtttacgattcttcttttaatgctgttttgaacgctacgaataatggaactggtgatttgattccagaagatgttttagacagtttgttcccattatccaccgatacaccgttgccttcttctttggaaactataggtatattgacggatccagtattgaatagcaccgactatttgatgtctatgtctttacctatttttgccaatccttctattatcttgactgatagtagggtttacggatacattactataataatgtctgcagagggtttgaaaagtgtgttcaacgatacaactgctttagaacattccacaattgccattatttctgcagtatataatagtcaaggcaaagcttctgggtatcattttgtctttccaccgtatggatctagaagtgacctcccgcaaaaagttttttctataaaaaatgatacattcattagtagcgcatttagaaacgggaagggagggtctttgaaacaaaccaatatcctttctacaagaaatactgctttaggctattctccatgttcctttaacttggttaattgggtcgcgatagtttctcagcctgagtctgttttcctttctccagcaacgaaattggcaaaaatcatcaccggcactgtcatcgctattggtgtctttgtcattttgttaacccttcctttggcacactgggcagtgcaaccaattgtacgtttacaaaaggcaactgaattaattacagaggggagaggccttagaccgagcaccccaagaacgataagcagagccagttctttcaaaagaggatttagttctggatttgctgttccttcttctttattacaatttaatactgctgaagctggcagcaccacaagcgtaagtggccatggaggcagtggccatggcagtggtgcagctttttctgcaaatagtagcatgaaaagcgctataaaccttggaaatgagaaaatgtctcctccagaggaggagaacaaaataccgaataaccacaccgatgctaaaatatccatggatggctccttgaatcacgatttgcttggaccacattccttgagacataatgacactgacagaagttccaatagatctcacattctcacaacttctgcaaatttaactgaagctaggttaccagattatagaagattattttctgatgaactttccgatttaacagaaaccttcaatactatgacagacgcattagaccaacattatgctcttttagaagaaagagttagggcgaggacaaaacaactcgaagctgccaagattgaggcagaggccgcaaatgaagcaaaaaccgtctttattgccaatatttctcacgaattgagaacgcctttaaatggtattttgggtatgacggctatttccatggaagaaaccgatgttaacaaaataagaaatagtttaaaactcatttttagatctggtgagcttttgcttcatattttaacggaattgttaactttttccaaaaacgttcttcaaagaacgaaattagagaaaagagatttttgcattaccgatgttgccttacaaataaaatctatatttggtaaagttgcaaaggatcagcgtgttcgtctttccatatctttgtttcctaatttgataaggacaatggttctttggggtgattccaacagaattattcaaattgtgatgaatttggtgtccaatgcattgaagttcacccctgtagatggtaccgttgatgtaagaatgaaacttttgggtgaatacgacaaagaattaagcgagaagaagcaatacaaagaagtgtatatcaaaaaagggacagaagtaaccgaaaatttagaaactacagataaatacgatcttccaactttatctaaccataggaaaagtgtcgatttagaatccagcgctacttccttgggaagtaatagagacacttctacaattcaggaagagataacaaaaagaaatactgttgcgaatgaaagtatctataagaaagtgaatgacagggaaaaagcttctaatgatgatgtatcttctatagtatctacaactaccagctcttatgataacgctatcttcaatagtcagttcaataaagcacctggcagtgatgatgaagaaggtggtaacttgggaagacctatcgaaaaccccaaaacgtgggttatttctattgaagtggaagacactgggcctggtattgacccttccttacaagaatctgtatttcatccatttgttcaaggtgatcaaacattgtccaggcaatatggtggtactggcttaggtttatctatctgtagacagttagcaaatatgatgcatggaacgatgaaattagagagtaaagtaggtgttggtagtaaattcacttttaccttgccattaaatcaaactaaagagatcagttttgcagatatggagtttccttttgaggacgaatttaatcctgagagtagaaagaacagaagagtcaagtttagtgttgctaaaagcatcaagagcagacaatccacatcttctgttgcaacaccagctacaaatagaagtagcttgaccaacgacgtgttgccggaggtaagaagtaaaggtaagcatgagacgaaagatgttggaaatcctaacatgggaagagaagaaaaaaacgacaatggagggcttgaacaattgcaggaaaaaaatattaaaccttctatatgtcttacaggtgctgaagttaacgaacaaaattccttgtcttctaagcatcgttctagacatgaaggtttaggttctgtcaatcttgatagaccatttttgcaaagtactggtacagccacatctagtagaaacatccccacagtcaaagacgacgataaaaatgaaacaagtgtcaaaattttggttgtagaagataatcatgtaaatcaggaagttatcaaaagaatgttgaacttggagggcattgaaaatattgaattggcttgcgatggccaagaagcattcgacaaagttaaagaattgacatctaagggcgaaaattataatatgattttcatggatgtccagatgcctaaagtggatggtttactttctaccaagatgataaggcgcgatttaggttatacctctcctattgtcgctttgaccgcttttgctgacgatagcaacattaaagaatgtttggaatctggaatgaacggatttttatccaaaccaatcaaaagaccaaaattgaaaactattcttactgagttttgtgcagcatatcagggaaagaaaaataacaaatga

SEQ ID NO: 5343 - DNA, 1590 bp, Saccharomyces cerevisiae
atggttttggaataccaacaaagggaaggtaaaggatcctcatctaaaagcatgccacctgattcctcgtcaacgactattcacacatgctctgaagcacaaactggggaagacaaaggcttacttgaccctcatctatcagtattggaattgttgagtaagacagggcattcgccttcgccaatgggacagaacttggttacgtccattgacatatccggcaaccacaatgtaaacgatagtatatcaggatcgtggcaagccattcagcctttggacttgggcgcttctttcatcccagaaaggtgctcttctcaaacgactaatggaagtattctatcatctagtgatacttctgaagaagaacaagagctgcttcaagcgcctgctgctgatataataaatattattaaacaaggacaagaaggagcaaatgtcgtttcaccgtctcatccctttaaacagttacagaagataatatcgctgcccttgcctggtaaggaaaaaactccttttaacgagcaagatgatgatggtgatgaagatgaggcttttgaggaagatagtgtgacgataacaaaaagcttgacttcttcgacaaactcttttgttatgcccaaactatcactaacacaaaagaatccagtttttcgccttctaatactgggaaggactggttccagcttttatcaatcaataccaaaagaataccaatctctttttgaattacccaaatatcacgattccgcaacattcccgcaatatacggggattgtcataatttttcaggagctgagagagatggtatctctgctaaacaggatcgttcaatattctcaaggcaagcctgtaataccgatctgccagcctgggcaagtcatccaagtgaaaaacgtcctgaagtcattcttaaggaataaacttgttaaattattgtttcctccagttgttgtgaccaacaaaagagatttgaaaaaaatgtttcaaagattacaagatttatccttggaatacggagaagatgtgaatgaggaagataatgatgacgaagctatacatacaaagtctcggtcctattgtcgtaacaaaaaagccgaaaactcaaaaaagaaatcccctaaatcgaataaaaaacccaagagaaagaagcagaagttcttcacgagctggttcacttggggcatttcaattactataggaattagttttggatgttgtgtgacatactttgtcactgcagcatacgaacaccaaacagttaagtctttaagtttgcggccctccatattggcctctttactttccttagattcctctagcgacacaatcaatacgcccgccactgcatctccttcttcaactgagcagtttttatggtttgataagggtacgcttcagataaacttccactccgatggattcattatgaaaagtcttaccataatcaaggagacttggggcaaaatgaatacttttgtcttgcatgctctttctaaacctttaaaatttttggagaaccttaataaaagctctgaattttccattgatgaatctaatcggattttggcactgggttatattctattgtaa

SEQ ID NO: 5344 - DNA, 1590 bp, Artificial Sequence
  Description of Artificial Sequence: Synthetic polynucleotide
atggttttggaataccaacaaagggaaggtaaaggatcctcttctaaaagcatgccacctgattcctcttctacgactattcacacatgctctgaagcacaaactggggaagacaaaggcttacttgaccctcatttaagtgtattggaattgttgagtaagacagggcattctccttctccaatgggacagaacttggttacgtccattgacatatccggcaaccacaatgtaaacgatagtatatctggatcttggcaagccattcagcctttggacttgggcgcttctttcatcccagaaaggtgctcttctcaaacgactaatggaagtattttatcttctagtgatacttctgaagaagaacaagagttgcttcaagcgcctgctgctgatataataaatattattaaacaaggacaagaaggagcaaatgtcgtttctccgtctcatccctttaaacagttacagaagataatatctttacccttgcctggtaaggaaaaaactccttttaacgagcaagatgatgatggtgatgaagatgaggcttttgaggaagatagtgtgacgataacaaaaagcttgacttcttctacaaactcttttgttatgcccaaattaagtttgacacaaaagaatccagtttttcgccttttgatattaggaaggactggttccagcttttatcaaagtataccaaaagaataccaatctctttttgaattacccaaatatcacgattccgcaacattcccgcaatatacggggattgtcataatttttcaggagttaagagagatggtatctttattaaacaggatcgttcaatattctcaaggcaagcctgtaataccgatctgccagcctgggcaagtcatccaagtgaaaaacgtcttgaagagtttcttaaggaataaacttgttaaattattgtttcctccagttgttgtgaccaacaaaagagatttgaaaaaaatgtttcaaagattacaagatttatccttggaatacggagaagatgtgaatgaggaagataatgatgacgaagctatacatacaaagtctagatcctattgtcgtaacaaaaaagccgaaaactccaaaaagaaatcccctaaatctaataaaaaacccaagagaaagaagcagaagttcttcacgagctggttcacttggggcatttccattactataggaattagttttggatgttgtgtgacatactttgtcactgcagcatacgaacaccaaacagttaagtctttaagtttgagaccctccatattggcctctttactttccttagattcctctagcgacacaatcaatacgcccgccactgcatctccttcttctactgagcagtttttatggtttgataagggtacgcttcagataaacttccactccgatggattcattatgaaaagtcttaccataatcaaggagacttggggcaaaatgaatacttttgtcttgcatgctctttctaaacctttaaaatttttggagaaccttaataaaagctctgaattttccattgatgaatctaatagaattttggcattgggttatattttattgtga

SEQ ID NO: 5345 - DNA, 930 bp, Saccharomyces cerevisiae
atgaaaatcttccatactgtcgaagaagttgttcaatggagaacacaggagctgagggaaactagatttagagaaactattgggttcgttcccacaatgggttgcctgcattcgggtcacgctagtttgatctcgcagtctgtgaaggaaaacacctatactgtggtcagtatatttgtaaatccctcccagtttgcgccaacggaagatctagataactatcctcgaactttgccagacgacatcaaattgcttgagtcgttgaaggtggatgttctatttgctcctaatgcacacgtgatgtatccacagggaattccgctcgacatagaagagcagaaaggcccttttgttagtgttcttggattgagtgaaaaattagaggggaagacgagacctaacttctttaggggcgtggcaactgtcgtgactaaactattcaatatcgttatggcggatgtggcttattttgggcagaaggacattcaacagttcattgttttacagtgtatggtggacgaactgtttgttaatacaaggctacaaatgatgcctattgtaagaaacaataatggactggctctgagtagtagaaacaaatatctttgtccagagtctttaaagatctctgaaaacctttaccgcgggctgaaagctgcggaaaatgctattaggagactagcaccagggggacgtctctccagatcagaaatcatcgatactgtgactcaaatatgggcaccctacgttgattcccacgatttcaaaatcgactatgtttccttagcagattttaagactcttgatgaactctccgatgttgaaaacaccagcgaacagcagccaatagtcattagttgtgctgtatacgtgactgaccgcgaaaaacccgatacggtcgtcagactaatagataacatcgttatttaa

SEQ ID NO: 5346 - DNA, 930 bp, Artificial Sequence
  Description of Artificial Sequence: Synthetic polynucleotide
atgaaaatcttccatactgtcgaagaagttgttcaatggagaacacaggagttgagggaaactagatttagagaaactattgggttcgttcccacaatgggttgcttgcattctggtcacgctagtttgatctctcagtctgtgaaggaaaacacctatactgtggtcagtatatttgtaaatccctcccagtttgcgccaacggaagatttggataactatcctcgtactttgccagacgacatcaaattgcttgagtctttgaaggtggatgttttatttgctcctaatgcacacgtgatgtatccacagggaattccgctcgacatagaagagcagaaaggcccttttgttagtgttcttggattgagtgaaaaattagaggggaagacgagacctaacttctttaggggcgtggcaactgtcgtgactaaattattcaatatcgttatggcggatgtggcttattttgggcagaaggacattcaacagttcattgttttacagtgtatggtggacgaattatttgttaatacaaggttacaaatgatgcctattgtaagaaacaataatggattggctttaagtagtagaaacaaatatctttgtccagagtctttaaagatctctgaaaacctttaccgcgggttgaaagctgcggaaaatgctattaggagattagcaccagggggacgtctctccagaagtgaaatcatcgatactgtgactcaaatatgggcaccctacgttgattcccacgatttcaaaatcgactatgtttccttagcagattttaagactcttgatgaactctccgatgttgaaaacaccagcgaacagcagccaatagtcattagttgtgctgtatacgtgactgaccgcgaaaaacccgatacggtcgtcagattaatagataacatcgttatttga

SEQ ID NO: 5347 - DNA, 2076 bp, Saccharomyces cerevisiae
atgcaaagctcaacaagtactgatcaacatgtgctacatcacatggaccctcatcggtttacgtcccaaataccaactgcaacatcgtcacaattgaggagaagaaacagcacgaatcaaggtctaaccgacatgatcaataagagtattgccaggaatacaataagcgggactggcattcccacaggaggcataaataaaaataagaggacaagaagcacggttgcaggaggtacaaatggtacagcattggctctaaatgacaaatccaacagtagaaacagcgtcagcagattatcaataaatcaacttggcagcctgcagcaacatctgagcaatagagatccaaggccactaagagacaaaaacttccaaagcgctattcaagaggagatttatgactatttgaaaaagaataaatttgatattgaaacaaatcatcccatttcaataaaatttctaaaacaacccactcaaaaggggtttattatcattttcaagtggttatatttaagactcgatccaggttacggctttactaagtctatcgagaatgagatctatcaaattttaaaaaatctgcgttatccgtttttagagtcaataaataaatcacaaatttcggctgtaggtggctctaattggcacaaatttcttggcatgttgcattggatggtacgaacaaatattaaactggatatgtgcttgaataaagtagatcgttcattaattaatcaaaatacacaagaaataacaattctgagccagcctttaaagactttggacgaacaggaccaaagacaagaaagatatgagctaatggtggagaaactgttaattgattattttacagagtcttacaaaagctttttgaaacttgaggataattatgagccttcgatgcaagaactaaagttaggttttgaaaaattcgttcacataattaatactgatatagctaatctacaaacccaaaatgacaatctttatgagaaatatcaagaagtaatgaaaataagccaaaagatcaaaaccaccagggaaaaatggaaggctttgaaaagcgattctaataagtatgaaaattatgtcaacgcgatgaagcaaaagagtcaagaatggccaggtaaactggaaaagatgaaatccgagtgtgaactgaaagaagaagaaattaaagccttacaaagtaatatttccgaattgcacaaaattttaagaaaaaagggaatttcaactgagcagttcgaattacaaaaccaagaaagagaaaagctgactagggaacttgataaaataaatatccagtctgataaattgacaagctcaattaaatccagaaagctggaagccgagggaatattcaaaagcttactggatacgttgaggcaatacgattcgtcgatacaaaatttaaccagatcgcgtagtcaattgggtcataatgttaatgattcatctctaaaaattaacatttcagagaacttattagacagagattttcatgaaggtatctcctacgagcaattgtttccaaagggatctggaattaacgagtctattaaaaaatctatcttaaaattaaacgatgaaattcaagaaagaataaaaaccattgagaaagacaacataacattagaaaaagatatcaaaaacttaaagcatgacataaatgagaaaactcaaattaatgaaaaacttgaattggaattgtccgaagcgaattccaaatttgagctctctaagcaggagaacgaacgattattagtagcgcaaagaattgagattgaaaaaatggaaaaaaaaattaatgattcaaatctcttgatgaaaactaaaatttcagatgctgaggaattggtaacttcaacggaactaaaattggaagaattgaaagttgacttaaacaggaaacgatacaaactacaccaacaagtgatacatgttattgatataacaagtaaatttaaaattaatattcaatcgtcattggaaaactctgaaaacgaattaggaaacgtcattgaagagttacgaaatttggagtttgaaactgaacataacgtaacaaattaa

SEQ ID NO: 5348 - DNA, 2076 bp, Artificial Sequence
  Description of Artificial Sequence: Synthetic polynucleotide
atgcaaagctctacaagtactgatcaacatgtgttacatcacatggaccctcatagatttacgtcccaaataccaactgcaacatcttctcaattgaggagaagaaacagcacgaatcaaggtttgaccgacatgatcaataagagtattgccaggaatacaataagcgggactggcattcccacaggaggcataaataaaaataagaggacaagaagcacggttgcaggaggtacaaatggtacagcattggctttgaatgacaaatccaacagtagaaacagcgtcagcagattatctataaatcaacttggcagcttacagcaacatttgagcaatagagatccaaggccattgagagacaaaaacttccaaagcgctattcaagaggagatttatgactatttgaaaaagaataaatttgatattgaaacaaatcatcccatttctataaaatttttgaaacaacccactcaaaaggggtttattatcattttcaagtggttatatttaagactcgatccaggttacggctttactaagtctatcgagaatgagatctatcaaattttaaaaaatttacgttatccgtttttagagagtataaataaatctcaaatttctgctgtaggtggctctaattggcacaaatttcttggcatgttgcattggatggtaagaacaaatattaaattggatatgtgcttgaataaagtagatcgttccttaattaatcaaaatacacaagaaataacaattttgagccagcctttaaagactttggacgaacaggaccaaagacaagaaagatatgagttgatggtggagaaattattaattgattattttacagagtcttacaaaagctttttgaaacttgaggataattatgagccttctatgcaagaattgaagttaggttttgaaaaattcgttcacataattaatactgatatagctaatttacaaacccaaaatgacaatctttatgagaaatatcaagaagtaatgaaaataagccaaaagatcaaaaccaccagggaaaaatggaaggctttgaaaagcgattctaataagtatgaaaattatgtcaacgcgatgaagcaaaagagtcaagaatggccaggtaaattagaaaagatgaaatccgagtgtgaattgaaagaagaagaaattaaagccttacaaagtaatatttccgaattgcacaaaattttaagaaaaaagggaatttctactgagcagttcgaattacaaaaccaagaaagagaaaagttgactagggaacttgataaaataaatatccagtctgataaattgacaagctctattaaatccagaaagttggaagccgagggaatattcaaaagcttattagatacgttgaggcaatacgattcttctatacaaaatttaaccagatctcgtagtcaattgggtcataatgttaatgattcttctttgaaaattaacatttctgagaacttattagacagagattttcatgaaggtatctcctacgagcaattgtttccaaagggatctggaattaacgagtctattaaaaaatctatcttaaaattaaacgatgaaattcaagaaagaataaaaaccattgagaaagacaacataacattagaaaaagatatcaaaaacttaaagcatgacataaatgagaaaactcaaattaatgaaaaacttgaattggaattgtccgaagcgaattccaaatttgagctctctaagcaggagaacgaaagattattagtagcgcaaagaattgagattgaaaaaatggaaaaaaaaattaatgattctaatctcttgatgaaaactaaaatttctgatgctgaggaattggtaacttccacggaattgaaattggaagaattgaaagttgacttaaacaggaaaagatacaaattacaccaacaagtgatacatgttattgatataacaagtaaatttaaaattaatattcaatcttctttggaaaactctgaaaacgaattaggaaacgtcattgaagagttaagaaatttggagtttgaaactgaacataacgtaacaaattga

SEQ ID NO: 5349 - DNA, 2532 bp, Saccharomyces cerevisiae
atgacggacgttgaaggctaccaacctaagagcaaggggaaaatctttccagatatgggtgagtcctttttctcatcagatgaggattcaccagctactgatgcagagatcgatgagaactatgatgataacagggaaacgtcagaaggacgtggagaaagggataccggcgccatggtaacagggttgaagaagcctcggaaaaagaccaagagtagcaggcatacagcggcggattcctctatgaatcaaatggacgctaaggataaagcgcttttgcaggacactaatagcgatataccagcagatttcgttccagattccgtctctggaatgttcagaagccatgactttagttatttgcggttaagaccagaccatgcttccaggcccctttggatctcgccaagtgacggtaggatcattctggagagtttctctccattagcagaacaggctcaggactttctggtcaccattgcagagcctataagtagaccctcccatattcatgaatacaagatcacagcatactctttgtatgcagctgtttctgtagggttggagacggatgatatcatttcagttctggatagattatccaaagtacccgttgctgaatcgataatcaacttcattaaaggggctaccatttcatacggtaaagtgaaactagttattaagcataatagatatttcgtggagactacacaagcagatattctgcaaatgttgctgaatgattccgtcatcgggcccctaagaatagatagcgatcatcaagtacagccaccagaggatgtactacagcaacaacttcagcaaaccgctggaaaacccgctactaatgttaatccgaacgatgtggaagccgtgtttagtgcagttataggtggtgataatgagcgggaagaagaagatgatgatattgatgccgttcactcctttgaaattgccaatgagtctgttgaagtcgtaaagaaaagatgtcaagaaatcgattatcccgtgttggaagaatacgactttagaaacgaccatagaaacccggatttagatattgatttgaaaccttccactcaaatcagaccctatcaagaaaaatcgctgagtaaaatgtttggtaatgggcgtgctcgttcagggattattgttttgccatgtggcgcaggtaaaactttggtcggtattaccgcagcatgtactataaaaaaatccgtaattgttttatgtacttcatcagtctccgtcatgcaatggaggcagcaatttttacaatggtgtaccttacaacctgaaaattgtgctgttttcacctctgataataaggaaatgttccagacagaatccggtttggttgtttccacttattcaatggtggcaaacacaagaaacaggtctcatgattcacaaaaagttatggatttcttgaccggtagggaatgggggttcattattcttgacgaagttcatgtggtgcccgccgcaatgttccgtagggtggtctccaccatcgcagcacacgccaaattgggactgaccgcaacgctggttagagaagatgataaaattggtgatctgaattttttaattggtccaaaactttatgaagcaaattggatggaattatcccaaaaaggacatattgcaaatgtccaatgtgcagaggtttggtgtcccatgacagcagaattttaccaagagtatttaagagaaactgcaaggaaaagaatgctactgtatatcatgaatccaacaaagtttcaggcatgccaattcttaattcaatatcacgaaaggaggggtgataagatcatcgttttttcagataatgtttacgccttacaagaatatgctttgaaaatgggaaaaccatttatttatggttccacaccacaacaagagcgtatgaacattctgcaaaatttccagtacaatgaccaaatcaataccatatttctatcaaaagttggtgatacttccatcgatttaccagaagctacctgtttaattcaaatatcttcgcactatgggtctcgtcgtcaagaagcccaaagattaggaagaattttaagagctaaaagacgtaatgacgaaggtttcaatgcgttcttttattctctggtttctaaggatacgcaagaaatgtactactcaacaaagagacaagcgtttttggtagatcaaggttacgcattcaaagtcattacacatttacacggaatggagaacattccaaatttggcatatgcttcacccagagaacgtagagagctattgcaagaagtattattgaagaacgaagaagctgctggtatcgaggtcggtgatgacgctgacaattctgttgggagaggttcaaatggccacaaaagatttaaatcaaaggccgttagaggtgaaggttcattgtctggtcttgctggcggtgaagatatggcatatatggaatacagtaccaataaaaacaaagaactgaaggaacatcatccattaatcagaaagatgtattataagaatttgaagaagtga

SEQ ID NO: 5350 - DNA, 2532 bp, Artificial Sequence
  Description of Artificial Sequence: Synthetic polynucleotide
atgacggacgttgaaggctaccaacctaagagcaaggggaaaatctttccagatatgggtgagtcctttttctcttctgatgaggattctccagctactgatgcagagatcgatgagaactatgatgataacagggaaacgagtgaaggacgtggagaaagggataccggcgccatggtaacagggttgaagaagcctagaaaaaagaccaagagtagcaggcatacagcggcggattcctctatgaatcaaatggacgctaaggataaagcgcttttgcaggacactaatagcgatataccagcagatttcgttccagattccgtctctggaatgttcagaagccatgactttagttatttgagattaagaccagaccatgcttccaggcccctttggatctctccaagtgacggtaggatcattttagagagtttctctccattagcagaacaggctcaggactttttagtcaccattgcagagcctataagtagaccctcccatattcatgaatacaagatcacagcatactctttgtatgcagctgtttctgtagggttggagacggatgatatcatttctgttttggatagattatccaaagtacccgttgctgaaagtataatcaacttcattaaaggggctaccatttcttacggtaaagtgaaattggttattaagcataatagatatttcgtggagactacacaagcagatattttacaaatgttgttgaatgattccgtcatcgggcccttgagaatagatagcgatcatcaagtacagccaccagaggatgtattacagcaacaacttcagcaaaccgctggaaaacccgctactaatgttaatccgaacgatgtggaagccgtgtttagtgcagttataggtggtgataatgagagagaagaagaagatgatgatattgatgccgttcactcctttgaaattgccaatgagtctgttgaagtcgtaaagaaaagatgtcaagaaatcgattatcccgtgttggaagaatacgactttagaaacgaccatagaaacccggatttagatattgatttgaaaccttccactcaaatcagaccctatcaagaaaaatctttgagtaaaatgtttggtaatgggcgtgctcgttccgggattattgttttgccatgtggcgcaggtaaaactttggtcggtattaccgcagcatgtactataaaaaaatccgtaattgttttatgtacttcttctgtctccgtcatgcaatggaggcagcaatttttacaatggtgtaccttacaacctgaaaattgtgctgttttcacctctgataataaggaaatgttccagacagaatccggtttggttgtttccacttattccatggtggcaaacacaagaaacaggtctcatgattctcaaaaagttatggatttcttgaccggtagggaatgggggttcattattcttgacgaagttcatgtggtgcccgccgcaatgttccgtagggtggtctccaccatcgcagcacacgccaaattgggattaaccgcaacgttagttagagaagatgataaaattggtgatttgaattttttaattggtccaaaactttatgaagcaaattggatggaattatcccaaaaaggacatattgcaaatgtccaatgtgcagaggtttggtgtcccatgacagcagaattttaccaagagtatttaagagaaactgcaaggaaaagaatgttattatatatcatgaatccaacaaagtttcaggcatgccaattcttaattcaatatcacgaaaggaggggtgataagatcatcgttttttctgataatgtttacgccttacaagaatatgctttgaaaatgggaaaaccatttatttatggttccacaccacaacaagagcgtatgaacattttacaaaatttccagtacaatgaccaaatcaataccatatttttatccaaagttggtgatacttccatcgatttaccagaagctacctgtttaattcaaatatcttctcactatgggtctcgtcgtcaagaagcccaaagattaggaagaattttaagagctaaaagacgtaatgacgaaggtttcaatgcgttcttttattctttggtttctaaggatacgcaagaaatgtactactccacaaagagacaagcgtttttggtagatcaaggttacgcattcaaagtcattacacatttacacggaatggagaacattccaaatttggcatatgcttctcccagagaacgtagagagttattgcaagaagtattattgaagaacgaagaagctgctggtatcgaggtcggtgatgacgctgacaattctgttgggagaggtagtaatggccacaaaagatttaaatccaaggccgttagaggtgaaggttctttgtctggtcttgctggcggtgaagatatggcatatatggaatacagtaccaataaaaacaaagaattgaaggaacatcatccattaatcagaaagatgtattataagaatttgaagaagtga

SEQ ID NO: 5351 - DNA, 1584 bp, Saccharomyces cerevisiae
atgagtgtacagatatttggagaccaggttacagaagaaagagcggaaaacgcccgtttgtcggcgtttgtcggtgccattgccgtgggtgatttggtgaaaagcacattaggcccaaaagggatggataaattattgcaaagtgcgtccagtaacacttgcatggtaacaaacgatggtgctacgattctgaagtcaattccgctggataatcccgcagccaaagtgttggtgaacatcagtaaggtgcaggatgacgaagttggagatggtaccactagtgttactgttttgagcgcagagttgcttagagaagcagagaagttgattgatcaatccaaaatccaccctcaaactattattgaaggttaccgactagcttcagcagccgcattggatgcgttaacgaaagcggctgttgacaactctcatgataagaccatgttccgtgaagatctgatccatattgccaagactactttatcttccaaaattttgtctcaggataaggatcacttcgcagaattagcaactaatgctattttgagattgaagggctccactaacttagaacatattcagatcattaagattcttggtggaaagctatcagattcgttccttgacgaaggtttcattcttgccaaaaaatttggtaacaaccaacccaagagaattgaaaatgctaagattctaatcgccaatacaactttggatacagacaaggtcaaaatattcggcaccaaattcaaagtcgattctactgctaaattggcacaactagaaaaggcagaacgtgaaaagatgaagaataaaattgccaagatttccaagtttggtatcaacactttcatcaatagacaactaatttatgactatccagagcaattatttacagatttgggcataaactcaattgagcatgctgattttgaaggtgtagaaaggctcgccctggttacaggcggtgaggtggtgtctacatttgacgagccaagtaaatgcaaactgggagaatgtgacgtgatcgaggaaattatgcttggtgaacagccattcttgaagtttagtggttgcaaagctggtgaagcttgtaccatcgtcctaagaggtgctaccgaccaaacgcttgatgaagctgagagatccctgcatgacgcattgtccgtgttgtcacagaccacaaaggaaacaagaactgttcttggcggcggttgcgccgagatggtcatgtcaaaagctgtggacaccgaagctcaaaacatcgacggaaagaagtcccttgccgtggaggcttttgcccgtgctctgagacaactgccaaccattttggcagataatgctggttttgacagcagcgaacttgtgtccaaactaagatcctccatatacaacggtatctccacctcaggtttagatctcaacaacggaaccattgccgacatgagacagttaggtatcgtcgagagttacaagctaaaacgagcagtagtcagctctgcatctgaagccgctgaagttctactaagggtggataacatcatccgtgcaagaccaagaaccgccaatagacaacatatgtaa

SEQ ID NO: 5352 - DNA, 1584 bp, Artificial Sequence
  Description of Artificial Sequence: Synthetic polynucleotide
atgagtgtacagatatttggagaccaggttacagaagaaagagcggaaaacgcccgtttgagtgcgtttgtcggtgccattgccgtgggtgatttggtgaaaagcacattaggcccaaaagggatggataaattattgcaaagtgcgtccagtaacacttgcatggtaacaaacgatggtgctacgattttgaagtctattccgttagataatcccgcagccaaagtgttggtgaacatcagtaaggtgcaggatgacgaagttggagatggtaccactagtgttactgttttgagcgcagagttgcttagagaagcagagaagttgattgatcaatccaaaatccaccctcaaactattattgaaggttacagattggcttctgcagccgcattggatgcgttaacgaaagcggctgttgacaactctcatgataagaccatgttccgtgaagatttgatccatattgccaagactactttatcttccaaaattttgtctcaggataaggatcacttcgcagaattagcaactaatgctattttgagattgaagggctccactaacttagaacatattcagatcattaagattcttggtggaaagttaagtgattctttccttgacgaaggtttcattcttgccaaaaaatttggtaacaaccaacccaagagaattgaaaatgctaagattttgatcgccaatacaactttggatacagacaaggtcaaaatattcggcaccaaattcaaagtcgattctactgctaaattggcacaattggaaaaggcagaacgtgaaaagatgaagaataaaattgccaagatttccaagtttggtatcaacactttcatcaatagacaattgatttatgactatccagagcaattatttacagatttgggcataaactctattgagcatgctgattttgaaggtgtagaaaggctcgccttagttacaggcggtgaggtggtgtctacatttgacgagccaagtaaatgcaaattaggagaatgtgacgtgatcgaggaaattatgcttggtgaacagccattcttgaagtttagtggttgcaaagctggtgaagcttgtaccatcgtcttgagaggtgctaccgaccaaacgcttgatgaagctgagagatccttgcatgacgcattgtccgtgttgtctcagaccacaaaggaaacaagaactgttcttggcggcggttgcgccgagatggtcatgtccaaagctgtggacaccgaagctcaaaacatcgacggaaagaagtcccttgccgtggaggcttttgcccgtgctttgagacaattaccaaccattttggcagataatgctggttttgacagcagcgaacttgtgtccaaattgagatcctccatatacaacggtatctccacctctggtttagatctcaacaacggaaccattgccgacatgagacagttaggtatcgtcgagagttacaagttgaaaagagcagtagtcagctctgcatctgaagccgctgaagttttgttgagggtggataacatcatccgtgcaagaccaagaaccgccaatagacaacatatgtga

SEQ ID NO: 5353 - DNA, 2472 bp, Saccharomyces cerevisiae
atgacacagcttcagatttcattattgctgacagctactatatcactactccatctagtagtggccacgccctatgaggcatatcctatcggaaaacaataccccccagtggcaagagtcaatgaatcgtttacatttcaaatttccaatgatacctataaatcgtctgtagacaagacagctcaaataacatacaattgcttcgacttaccgagctggctttcgtttgactctagttctagaacgttctcaggtgaaccttcttctgacttactatctgatgcgaacaccacgttgtatttcaatgtaatactcgagggtacggactctgccgacagcacgtctttgaacaatacataccaatttgttgttacaaaccgtccatccatctcgctatcgtcagatttcaatctattggcgttgttaaaaaactatggttatactaacggcaaaaacgctctgaaactagatcctaatgaagtcttcaacgtgacttttgaccgttcaatgttcactaacgaagaatccattgtgtcgtattacggacgttctcagttgtataatgcgccgttacccaattggctgttcttcgattctggcgagttgaagtttactgggacggcaccggtgataaactcggcgattgctccagaaacaagctacagttttgtcatcatcgctacagacattgaaggattttctgccgttgaggtagaattcgaattagtcatcggggctcaccagttaactacctctattcaaaatagtttgataatcaacgttactgacacaggtaacgtttcatatgacttacctctaaactatgtttatctcgatgacgatcctatttcttctgataaattgggttctataaacttattggatgctccagactgggtggcattagataatgctaccatttccgggtctgtcccagatgaattactcggtaagaactccaatcctgccaatttttctgtgtccatttatgatacttatggtgatgtgatttatttcaacttcgaagttgtctccacaacggatttgtttgccattagttctcttcccaatattaacgctacaaggggtgaatggttctcctactattttttgccttctcagtttacagactacgtgaatacaaacgtttcattagagtttactaattcaagccaagaccatgactgggtgaaattccaatcatctaatttaacattagctggagaagtgcccaagaatttcgacaagctttcattaggtttgaaagcgaaccaaggttcacaatctcaagagctatattttaacatcattggcatggattcaaagataactcactcaaaccacagtgcgaatgcaacgtccacaagaagttctcaccactccacctcaacaagttcttacacatcttctacttacactgcaaaaatttcttctacctccgctgctgctacttcttctgctccagcagcgctgccagcagccaataaaacttcatctcacaataaaaaagcagtagcaattgcgtgcggtgttgctatcccattaggcgttatcctagtagctctcatttgcttcctaatattctggagacgcagaagggaaaatccagacgatgaaaacttaccgcatgctattagtggacctgatttgaataatcctgcaaataaaccaaatcaagaaaacgctacacctttgaacaacccctttgatgatgatgcttcctcgtacgatgatacttcaatagcaagaagattggctgctttgaacactttgaaattggataaccactctgccactgaatctgatatttccagcgtggatgaaaagagagattctctatcaggtatgaatacatacaatgatcagttccaatcccaaagtaaagaagaattattagcaaaacccccagtacagcctccagagagcccgttctttgacccacagaataggtcttcttctgtgtatatggatagtgaaccagcagtaaataaatcctggcgatatactggcaacctgtcaccagtctctgatattgtcagagacagttacggatcacaaaaaactgttgatacagaaaaacttttcgatttagaagcaccagagaaggaaaaacgtacgtcaagggatgtcactatgtcttcactggacccttggaacagcaatattagcccttctcccgtaagaaaatcagtaacaccatcaccatataacgtaacgaagcatcgtaaccgccacttacaaaatattcaagactctcaaagcggtaaaaacggaatcactcccacaacaatgtcaacttcatcttctgacgattttgttccggttaaagatggtgaaaatttttgctgggtccatagcatggaaccagacagaagaccaagtaagaaaaggttagtagatttttcaaataagagtaatgtcaatgttggtcaagttaaggacattcacggacgcatcccagaaatgctgtga

SEQ ID NO: 5354 - DNA, 2472 bp, Artificial Sequence
  Description of Artificial Sequence: Synthetic polynucleotide
atgacacagcttcagatttctttattgttgacagctactatatctttactccatttggtagtggccacgccctatgaggcatatcctatcggaaaacaataccccccagtggcaagagtcaatgaaagttttacatttcaaatttccaatgatacctataaatcttctgtagacaagacagctcaaataacatacaattgcttcgacttaccgagctggctttcttttgactctagttctagaacgttctctggtgaaccttcttctgacttattatctgatgcgaacaccacgttgtatttcaatgtaatactcgagggtacggactctgccgacagcacgtctttgaacaatacataccaatttgttgttacaaaccgtccatccatctctttatcttctgatttcaatttattggcgttgttaaaaaactatggttatactaacggcaaaaacgctttgaaattggatcctaatgaagtcttcaacgtgacttttgaccgttccatgttcactaacgaagaatccattgtgtcttattacggacgttctcagttgtataatgcgccgttacccaattggcttttcttcgattctggcgagttgaagtttactgggacggcaccggtgataaactctgcgattgctccagaaacaagctacagttttgtcatcatcgctacagacattgaaggattttctgccgttgaggtagaattcgaattagtcatcggggctcaccagttaactacctctattcaaaatagtttgataatcaacgttactgacacaggtaacgtttcttatgacttacctttgaactatgtttatctcgatgacgatcctatttcttctgataaattgggttctataaacttattggatgctccagactgggtggcattagataatgctaccatttccgggtctgtcccagatgaattactcggtaagaactccaatcctgccaatttttctgtgtccatttatgatacttatggtgatgtgatttatttcaacttcgaagttgtctccacaacggatttgtttgccattagttctcttcccaatattaacgctacaaggggtgaatggttctcctactattttttgccttctcagtttacagactacgtgaatacaaacgtttctttagagtttactaatagtagccaagaccatgactgggtgaaattccaatcttctaatttaacattagctggagaagtgcccaagaatttcgacaagctttctttaggtttgaaagcgaaccaaggttctcaatctcaagagttgtattttaacatcattggcatggattctaagataactcactccaaccacagtgcgaatgcaacgtccacaagaagttctcaccactccacctctacaagttcttacacatcttctacttacactgcaaaaatttcttctacctccgctgctgctacttcttctgctccagcagcgttaccagcagccaataaaacttcttctcacaataaaaaagcagtagcaattgcgtgcggtgttgctatcccattaggcgttatccttgtagctctcatttgcttcttgatattctggagacgcagaagggaaaatccagacgatgaaaacttaccgcatgctattagtggacctgatttgaataatcctgcaaataaaccaaatcaagaaaacgctacacctttgaacaacccctttgatgatgatgcttcctcttacgatgatacttccatagcaagaagattggctgctttgaacactttgaaattggataaccactctgccactgaatctgatatttccagcgtggatgaaaagagagattctttatctggtatgaatacatacaatgatcagttccaatcccaaagtaaagaagaattattagcaaaacccccagtacagcctccagagagcccgttctttgacccacagaataggtcttcttctgtgtatatggatagtgaaccagcagtaaataaatcctggagatatactggcaacttatctccagtctctgatattgtcagagacagttacggatctcaaaaaactgttgatacagaaaaacttttcgatttagaagcaccagagaaggaaaaacgtacgtctagggatgtcactatgtcttctttggacccttggaacagcaatattagcccttctcccgtaagaaaatctgtaacaccatctccatataacgtaacgaagcatcgtaaccgccacttacaaaatattcaagactctcaaagcggtaaaaacggaatcactcccacaacaatgtctacttcttcttctgacgattttgttccggttaaagatggtgaaaatttttgctgggtccatagcatggaaccagacagaagaccaagtaagaaaaggttagtagatttttctaataagagtaatgtcaatgttggtcaagttaaggacattcacggacgcatcccagaaatgctttga

SEQ ID NO: 5355 - DNA, 738 bp, Saccharomyces cerevisiae
atgaatagatgggtagagaagtggctgagggtatacttaaaatgctacattaatttgattttattttatagaaatgtatacccacctcagtcattcgactacactacttaccagtcattcaacttgccgcagttcgttcccattaataggcatcctgctttaattgactatatagaagaacttatactggatgttctttctaaattaacgcacgtttacagattttccatctgcattattaataaaaagaacgatttatgcattgaaaaatacgttttagattttagtgaattacaacatgtggataaagacgatcagatcattacggaaactgaagtgttcgacgaattccgatcttccttaaatagtttgattatgcatttggagaaattacctaaagtcaacgatgacacaataacatttgaagcagttattaatgcgatcgaattggaactaggacataagttggacagaaacaggagggtcgatagtttggaggaaaaagcagaaattgaaagggattcaaactgggttaaatgtcaagaagatgaaaatttaccagacaataatggttttcaacctcctaaaataaaactcacttctttagtcggttctgacgtggggcctttgattattcatcagtttagtgaaaaattaatcagcggtgacgacaaaattttgaatggagtgtattctcaatatgaagagggcgagagcatttttggatctttgttttaa

SEQ ID NO: 5356 - DNA, 738 bp, Artificial Sequence
  Description of Artificial Sequence: Synthetic polynucleotide
atgaatagatgggtagagaagtggttaagggtatacttaaaatgctacattaatttgattttattttatagaaatgtatacccacctcagtctttcgactacactacttaccagtctttcaacttgccgcagttcgttcccattaataggcatcctgctttaattgactatatagaagaacttatattggatgttctttctaaattaacgcacgtttacagattttccatctgcattattaataaaaagaacgatttatgcattgaaaaatacgttttagattttagtgaattacaacatgtggataaagacgatcagatcattacggaaactgaagtgttcgacgaattcagatcttccttaaatagtttgattatgcatttggagaaattacctaaagtcaacgatgacacaataacatttgaagcagttattaatgcgatcgaattggaattaggacataagttggacagaaacaggagggtcgatagtttggaggaaaaagcagaaattgaaagggattccaactgggttaaatgtcaagaagatgaaaatttaccagacaataatggttttcaacctcctaaaataaaactcacttctttagtcggttctgacgtggggcctttgattattcatcagtttagtgaaaaattaatcagcggtgacgacaaaattttgaatggagtgtattctcaatatgaagagggcgagagcatttttggatctttgttttga

SEQ ID NO: 5357 - DNA, 486 bp, Saccharomyces cerevisiae
atggagaagatcaaagagaaattgaatagcttaaaattagaatctgagtcatggcaagaaaaatatgaggagctgagagaacagctcaaagaattagagcaatctaacactgaaaaagaaaacgagattaaatctttgtccgctaaaaacgagcaactcgacagtgaagtggagaagttagagagtcaattgtctgatacaaagcaattggctgaagactccaataacttgagatctaataatgagaactacaccaagaaaaaccaggatctagaacaacagctagaagacagtgaagccaaactgaaggaagcaatggataaactgaaagaggccgatttgaactctgagcaaatgggtagaaggatcgttgctttggaagaagaaagagatgaatgggaaaagaagtgcgaagaattccaaagcaaatatgaagaagctcaaaaagaattggacgaaattgctaattcattggaaaatttatga

SEQ ID NO: 5358 - DNA, 486 bp, Artificial Sequence
  Description of Artificial Sequence: Synthetic polynucleotide
atggagaagatcaaagagaaattgaatagcttaaaattagaatctgagagttggcaagaaaaatatgaggagttaagagaacagctcaaagaattagagcaatctaacactgaaaaagaaaacgagattaaatctttgtccgctaaaaacgagcaactcgacagtgaagtggagaagttagagagtcaattgtctgatacaaagcaattggctgaagactccaataacttgagatctaataatgagaactacaccaagaaaaaccaggatttggaacaacagttagaagacagtgaagccaaattgaaggaagcaatggataaattgaaagaggccgatttgaactctgagcaaatgggtagaaggatcgttgctttggaagaagaaagagatgaatgggaaaagaagtgcgaagaattccaaagcaaatatgaagaagctcaaaaagaattggacgaaattgctaattctttggaaaatttatga

SEQ ID NO: 5359 - DNA, 2841 bp, Saccharomyces cerevisiae
atgtctgataatttgttatctttagagaatccggtggtgcctagtcactatgagttgcgtctagaaattgaccctaagcagtcgtcgcccaatttcaaaggatccgccataatccatttgaaattcaatccgaactccaccaccttagcttctatcgaagacagttttacccagttcaagttacattccaaggatttgattgtgttgtctgcacatgccaccatagggtctactaagtttgatctaaaaatttctcaggacactggaaagcatttgtcgattttcaactctgaatctcctattcaattgtccaacgattgccctctgattttgtccgtgcaatacgtgggtaaaattcgtgacataaaaacacatcatgataagacttttggtattttcaaaaccaattttatggatcgtaaaaccggtactgccaataatcacgtcgttgctactcactgccaaccgttttccgctagcaatattttcccatgtattgacgagccttcaaacaagtccacttttcaattgaacattgcaacggatgcacaatataaagccgtttccaatactcctgtagagatggtcgaagctttggatagttctcaaaaacatttggtgaaatttgccaagacacctttgatgactacttccgtatttggtttttctattggtgatttagaatttttgaaaacggaaatcaagttggaaggtgataggactattcccgtttcaatttatgcaccttgggatattgctaatgcagctttcactttagatacagtccagaaatatctacctttgttggaatcctattttaaatgtccataccctctgccaaagttagatttcgtcctactaccatatttaagtgacatggcaatggagaactttggtatgatcaccatccaactaaaccacctgctcataccaccaaatgccttggccaatgaaaccgtcagagagcaagcacagcaactcattgtccacgaactcgttcatcaatggatgggcaactacatatcttttgactcgtgggaatctctttggtttaatgagtctttcgctacttggttagcttgccacatactagaacagaatggtgacctatcccattattggacctcggaaccttatttactacagcaagtggagccgaccatgtgcagagatgcagctgacgttaatggaagaagcatatttcagattgcgcaacggaacactggcatagattctcaaacctccgatatttttgatcctgaggcatacacaaagggtattatcatgctgaggtccctgcaattggctacaggcgaatctcatctacaaaagggcctggaaagtgtatttgaagatactaaaacatttcatgcgagaagcgtcaaaccaatggatatatggaatcatatcggaaaatttttgaagtctcaaaatattacaaactttgtttcatcttggacaagaacgccaggcttacctgtcgttaaggtcgaagtagaagagaaagacgggaaaacgcaaacaaaattgactcaacacagatttatcaatcaattatctactgaagaaaaggatcagttagaagatgtcccatatcaggtacccttattcggggttctgccagatggtaaaatggatactaaaaatgtactattgacggataggaccttaaagttcgattatcctatcttagtaattaaccatttagcccaaggttattaccgcgtttcatatgagtccgaagagtgctatgcattgattaatgataaaataactgaggagacgttatccgagattgaccttcggaagattttcttagacttgtcgcagtttattggagatgagggtttccagaattctattcatttgcacggtctctttaagatactaaaccatatcgcttctccttccacaaagattgcatcaaaatattgggatcctctttccaaggggttggaagttctgcaaacgatcgatcgtgccagtttaacgagctctaaattacaatctttcttaaagaaaaaaattgtcattccccttttcaataagattgattggccccacggtgaatttgataaaagcacaaaccctcacgagttgaaagtcatgtctcaagtcttgtttttaaataaaaactccgcaaaatgtgctgaattgtgtcaaatttattttaaacatctattacagggcccacgttcgagcgtaccgttagaattagtgaactcaatccttgtcgtcgtatcgcaacattgtgcaaacatcaagcagtggaagaaaatattcgatttggtgaaacgcagttcctgtactggtatcacaaaccatgtcattaatatgtatgaccaaaacagtagcgaaaccgccatgttgattcaaaacggtgcaatagaatctcttggattctgtttagattctgatatcgtgaaaaaaactttgaattttatcacttccaatattgagtcagaggggatggaactggcattattcggatttaattacaactttaagaagaggctgaacaaaaacgagaaacctcaagaccaagtcgttcgtgaaacgatctgggagtggtatatgggcaattttgaccaatgggcacggaaggctacaaggaaaggtaccaccacgggggatcatctacacaaggcgttaaggagtatttccctgataatctttcaaatgtttgtagcagacgagccacagaagatagaaaagtttattaatttggagaaagagaagttgggtcaaagcttgttatctttggacgacatctgggcctctgtccagcaagatgaagagtccagaaagactataagaagagacttggcctccttggtctga

SEQ ID NO: 5360 - DNA, 2841 bp, Artificial Sequence
  Description of Artificial Sequence: Synthetic polynucleotide
atgtctgataatttgttatctttagagaatccggtggtgcctagtcactatgagttgcgtttagaaattgaccctaagcagtcttctcccaatttcaaaggatccgccataatccatttgaaattcaatccgaactccaccaccttagcttctatcgaagacagttttacccagttcaagttacattccaaggatttgattgtgttgtctgcacatgccaccatagggtctactaagtttgatttgaaaatttctcaggacactggaaagcatttgtctattttcaactctgaatctcctattcaattgtccaacgattgccctttgattttgtccgtgcaatacgtgggtaaaattcgtgacataaaaacacatcatgataagacttttggtattttcaaaaccaattttatggatcgtaaaaccggtactgccaataatcacgtcgttgctactcactgccaaccgttttccgctagcaatattttcccatgtattgacgagccttccaacaagtccacttttcaattgaacattgcaacggatgcacaatataaagccgtttccaatactcctgtagagatggtcgaagctttggatagttctcaaaaacatttggtgaaatttgccaagacacctttgatgactacttccgtatttggtttttctattggtgatttagaatttttgaaaacggaaatcaagttggaaggtgataggactattcccgtttctatttatgcaccttgggatattgctaatgcagctttcactttagatacagtccagaaatatttacctttgttggaatcctattttaaatgtccataccctttaccaaagttagatttcgtcttgttaccatatttaagtgacatggcaatggagaactttggtatgatcaccatccaattgaaccacctcctcataccaccaaatgccttggccaatgaaaccgtcagagagcaagcacagcaactcattgtccacgaactcgttcatcaatggatgggcaactacatatcttttgactcttgggaatctctttggtttaatgagtctttcgctacttggttagcttgccacatattggaacagaatggtgacttatcccattattggaccagtgaaccttatttattgcagcaagtggagccgaccatgtgcagagatgcagctgacgttaatggaagaagcatatttcagattgcgcaaagaaacactggcatagattctcaaacctccgatatttttgatcctgaggcatacacaaagggtattatcatgttaaggtccttacaattggctacaggcgaatctcatttacaaaagggccttgaaagtgtatttgaagatactaaaacatttcatgcgagaagcgtcaaaccaatggatatatggaatcatatcggaaaatttttgaagtctcaaaatattacaaactttgtttcttcttggacaagaacgccaggcttacctgtcgttaaggtcgaagtagaagagaaagacgggaaaacgcaaacaaaattgactcaacacagatttatcaatcaattatctactgaagaaaaggatcagttagaagatgtcccatatcaggtacccttattcggggttttgccagatggtaaaatggatactaaaaatgtacttttgacggataggaccttaaagttcgattatcctatcttagtaattaaccatttagcccaaggttattaccgcgtttcttatgagtccgaagagtgctatgcattgattaatgataaaataactgaggagacgttatccgagattgaccttagaaagattttcttagacttgtctcagtttattggagatgagggtttccagaattctattcatttgcacggtctctttaagatattaaaccatatcgcttctccttccacaaagattgcatccaaatattgggatcctctttccaaggggttggaagttttgcaaacgatcgatcgtgccagtttaacgagctctaaattacaatctttcttaaagaaaaaaattgtcattccccttttcaataagattgattggccccacggtgaatttgataaaagcacaaaccctcacgagttgaaagtcatgtctcaagtcttgtttttaaataaaaactccgcaaaatgtgctgaattgtgtcaaatttattttaaacatcttttacagggcccacgttccagcgtaccgttagaattagtgaactctatccttgtcgtcgtatctcaacattgtgcaaacatcaagcagtggaagaaaatattcgatttggtgaaacgcagttcctgtactggtatcacaaaccatgtcattaatatgtatgaccaaaacagtagcgaaaccgccatgttgattcaaaacggtgcaatagaatctcttggattctgtttagattctgatatcgtgaaaaaaactttgaattttatcacttccaatattgagagtgaggggatggaattggcattattcggatttaattacaactttaagaagaggttaaacaaaaacgagaaacctcaagaccaagtcgttcgtgaaacgatctgggagtggtatatgggcaattttgaccaatgggcaagaaaggctacaaggaaaggtaccaccacgggggatcatttgcacaaggcgttaaggagtatttccttgataatctttcaaatgtttgtagcagacgagccacagaagatagaaaagtttattaatttggagaaagagaagttgggtcaaagcttgttatctttggacgacatctgggcctctgtccagcaagatgaagagtccagaaagactataagaagagacttggcctccttggtctga

SEQ ID NO: 5361 - DNA, 1182 bp, Saccharomyces cerevisiae
atgtcatcaagaataattgtcggcagtgcagcattggcagctgccatcacagctagcatcatggtcagagaacagaaggccaagggtcagagaagagagggcaacgtctccgcttactacaacggccaggagtacggcagttcagcacccccacagttgggaaagctacataacataaagcaaggcataaaggaagatgccttgtcgttaaaagacgcgcttctgggcgtatctcaaaaggctagggaagaggctccaaaggtaactaagcgtgtgatatcaccggaagaggatgctcagacacgcaagcagctaggccaaaaagccaaggattcttcctcgcaaagcatcttcaattgggggtttagtgaggctgaaagaaggaaagccatagccatcggggaatttgatactgctaagaagcgtttcgaagaggcagtggatcgtaatgagaaggagctcttgtccacggtgatgagagagaagaaggccgctctggacagagcatccattgagtacgaaaggtacgggagagccagagactttaatgagctttcggacaagctagaccaacaggaaaggaacagtaatcctttgaaacgcctgttgaagaataacacgggtgacgctaatactgaagaagccgctgcaagaagtgtccaaggctggggtgatacggcacaggagtttggtagagaagagttggaggaagccaagagaaatgcttcttcagagccaagcgaggcgcaaaaacgtcttgacgagctgaagaagatcaaggaaaagggctggtttggttacaacaaaggggagcaaagcgagcaacagattgctgaacgggtagccagaggtttagaaggatggggtgaaacagccgctcaactttccaaggacgaaatggacgatttaagatggaattatgagaattcaaagaaacaactggataagaacgtgtccgatgccatggactcgttatctaaggcgaaggaggacttgaaacagtacggcagccactggtggtctggatggacttccaaggtcgacaatgacaagcaggctttaaaagatgaggcccaaaagaagtacgatgaagcgttgaaaaagtacgatgaagccaagaacaaattcaaagaatggaatgataagggtgatggtaaattctggagctcgaaaaaggactag

SEQ ID NO: 5362 - DNA, 1182 bp, Artificial Sequence
  Description of Artificial Sequence: Synthetic polynucleotide
atgtcttctagaataattgtcggcagtgcagcattggcagctgccatcacagctagcatcatggtcagagaacagaaggccaagggtcagagaagagagggcaacgtctccgcttactacaacggccaggagtacggcagttctgcacccccacagttgggaaagttgcataacataaagcaaggcataaaggaagatgccttgtctttaaaagacgcgcttttgggcgtatctcaaaaggctagggaagaggctccaaaggtaactaagcgtgtgatatctccggaagaggatgctcagacacgcaagcagttaggccaaaaagccaaggattcttcctctcaaagcatcttcaattgggggtttagtgaggctgaaagaaggaaagccatagccatcggggaatttgatactgctaagaagcgtttcgaagaggcagtggatcgtaatgagaaggagctcttgtccacggtgatgagagagaagaaggccgctttggacagagcatccattgagtacgaaaggtacgggagagccagagactttaatgagctttctgacaagttggaccaacaggaaaggaacagtaatcctttgaaacgcttgttgaagaataacacgggtgacgctaatactgaagaagccgctgcaagaagtgtccaaggctggggtgatacggcacaggagtttggtagagaagagttggaggaagccaagagaaatgcttcttctgagccaagcgaggcgcaaaaacgtcttgacgagttgaagaagatcaaggaaaagggctggtttggttacaacaaaggggagcaaagcgagcaacagattgctgaaagagtagccagaggtttagaaggatggggtgaaacagccgctcaactttccaaggacgaaatggacgatttaagatggaattatgagaattctaagaaacaattggataagaacgtgtccgatgccatggactctttatctaaggcgaaggaggacttgaaacagtacggcagccactggtggtctggatggacttccaaggtcgacaatgacaagcaggctttaaaagatgaggcccaaaagaagtacgatgaagcgttgaaaaagtacgatgaagccaagaacaaattcaaagaatggaatgataagggtgatggtaaattctggagcagtaaaaaggactga

SEQ ID NO: 5363 - DNA, 1311 bp, Saccharomyces cerevisiae
atggataccagcaaccacaaccaagaccacgactcccacgtggcggcacagagggagaacgacaataattatatgccaccttccccctccatgagcgagagttctatgatttttgaaagaaatgtagaggacccatcatacctttataaaacggtgtcaaacaacgctgcaaactctctctctaggcagagcagcaggaccagtttgttcaatcataataattctagtaataggaacttccataacttaagccagagatcgtctgctgtgaatctacatttgcaaccttctaggactaatgagtcaatagcatcgtaccagacatacaatccggattttgttgtgcagactccactggatcaccgtcgtaccttagagaatttcgtccctcctgcattagacgctggctgttctattgtaactgacgacacgactggccttgatgacgttgatatggtttattcgagaaggccatctaccatcggcctggatagagccctaggtaggacaagaagtctttcgtcacaatcttttgataacgaaacgtcgcctgcgcatccaagatctcccaacgaccatggttcaagactactaaggttttattcctacgctgacatgttgtccgatgacaacaataacaacgttagtaatgcgacatcaacatcatcaactgcgaaccccttgagaagacccccaatgcaaggtcactactcgttctcgtcgtcccttttgaattctccttctcatttgccttcccccccatcagcttcggcatcaccacctcagcatatgaacttcaccaaccctttcatcatatctagacgttactctaacacaacgatcaacaatgccaatgggggaaccagcgctggaagcactacgggggccgcactatcaagatcgccatcgaaccaacagtacttacttaaacaacaaaggtcaccttcagggagcgcccgttcaagaagaaacagcaataggcccggcagtgctgccaacattatgatcgggaaacctaaatccaaattccatatggaatccagtggcagtgaagggttttcttccgaagaggaggacaacactatgattgaaagagataaactcaatctaaagcaaaaattgcagtcacaactggcacaaccaccatcaattgccaacatggttaacgataatcacaataatactaataaacacaagaatactattaataataacatcaaaaatagccctgcgttcacaaactcgaatccaagttcaaaatcaaattcaaactctacaataacctctatgaatccagacacaaccaaataa

SEQ ID NO: 5364 - DNA, 1311 bp, Artificial Sequence
  Description of Artificial Sequence: Synthetic polynucleotide
atggataccagcaaccacaaccaagaccacgactcccacgtggcggcacagagggagaacgacaataattatatgccaccttccccctccatgagcgagagttctatgatttttgaaagaaatgtagaggacccatcttacctttataaaacggtgtctaacaacgctgcaaactctctctctaggcagagcagcaggaccagtttgttcaatcataataattctagtaataggaacttccataacttaagccagagatcttctgctgtgaatttacatttgcaaccttctaggactaatgagagtatagcaagctaccagacatacaatccggattttgttgtgcagactccattagatcaccgtcgtaccttagagaatttcgtccctcctgcattagacgctggctgttctattgtaactgacgacacgactggccttgatgacgttgatatggtttattctagaaggccatctaccatcggcttggatagagcccttggtaggacaagaagtctttcttctcaatcttttgataacgaaacgtctcctgcgcatccaagatctcccaacgaccatggttccagattattgaggttttattcctacgctgacatgttgtccgatgacaacaataacaacgttagtaatgcgacatctacatcttctactgcgaaccccttgagaagacccccaatgcaaggtcactactctttctcttcttcccttttgaattctccttctcatttgccttcccccccatctgcttctgcatctccacctcagcatatgaacttcaccaaccctttcatcatatctagacgttactctaacacaacgatcaacaatgccaatgggggaaccagcgctggaagcactacgggggccgcattatctagatctccatctaaccaacagtacttacttaaacaacaaaggtctccttctgggagcgcccgttccagaagaaacagcaataggcccggcagtgctgccaacattatgatcgggaaacctaaatccaaattccatatggaatccagtggcagtgaagggttttcttccgaagaggaggacaacactatgattgaaagagataaactcaatttgaagcaaaaattgcagtctcaattggcacaaccaccatctattgccaacatggttaacgataatcacaataatactaataaacacaagaatactattaataataacatcaaaaatagccctgcgttcacaaacagtaatccaagttctaaatctaatagcaactctacaataacctctatgaatccagacacaaccaaatga

SEQ ID NO: 5365 - DNA, 204 bp, Saccharomyces cerevisiae
atggttgttggcagcgaatttaacaacactgcagatgtagatgtcgtagctatccttctcacgttgttgaatgctgactattttgttattaagcaacgccttgttagtgcttgttttacaaagcgtattaaatggtattttatttatgctatcgctttattatctttattttcatcacgtaacacggtgtgtgcgccatattaa

SEQ ID NO: 5366 - DNA, 204 bp, Artificial Sequence
  Description of Artificial Sequence: Synthetic polynucleotide
atggttgttggcagcgaatttaacaacactgcagatgtagatgtcgtagctatccttctcacgttgttgaatgctgactattttgttattaagcaacgccttgttagtgcttgttttacaaagcgtattaaatggtattttatttatgctatcgctttattatctttattttcttctcgtaacacggtgtgtgcgccatattga

SEQ ID NO: 5367 - DNA, 936 bp, Saccharomyces cerevisiae
atggtcgatcaccagtggacgccactgcagaaggaggttatctcaggtctgtccgcgggatccgtcaccacattggtagtgcatccattagatttactgaaggttcgtttgcaattatccgctacaagcgcacaaaaggcccattacggcccatttatggtaatcaaagagattatacgttcgtcggcgaatagtggacgtagtgttacgaacgaactgtatcgcggattaagcataaatttgtttggaaatgccattgcatggggagtttatttcggtttatatggtgtcacgaaagaattgatatacaagtcagtggcaaagccaggggaaacacagcttaaaggtgttgggaacgaccacaaaatgaattcgcttatttatttgtctgccggtgcttccagtgggttgatgacagctatcctaacaaaccctatctgggttataaagaccaggataatgtctacaagtaaaggcgcccaaggagcgtacacttctatgtacaacggtgtccaacaactgttacgaactgatggcttccagggcctatggaagggccttgtacccgcactgtttggtgtttcgcaaggtgccttatattttgcagtttacgataccttaaagcaaagaaaattgcgacggaagagggaaaatgggcttgacatccatttaacaaatcttgaaaccattgaaatcacatcgttgggaaaaatggtctccgtcactttggtttacccttttcaattattgaaatcaaacttacaaagtttcagggccaatgagcaaaaatttaggctctttcctttgataaaattaatcattgctaatgatggttttgttggactttataagggcctatctgcaaacttagtacgggccattccatccacttgcattaccttttgtgtatacgagaaccttaagcataggctttag

SEQ ID NO: 5368 - DNA, 936 bp, Artificial Sequence
  Description of Artificial Sequence: Synthetic polynucleotide
atggtcgatcaccagtggacgccattacagaaggaggttatcagtggtttatccgcgggatccgtcaccacattggtagtgcatccattagatttattgaaggttcgtttgcaattatccgctacaagcgcacaaaaggcccattacggcccatttatggtaatcaaagagattatacgttcttctgcgaatagtggacgtagtgttacgaacgaattgtatcgcggattaagcataaatttgtttggaaatgccattgcatggggagtttatttcggtttatatggtgtcacgaaagaattgatatacaagtctgtggcaaagccaggggaaacacagcttaaaggtgttgggaacgaccacaaaatgaattctcttatttatttgtctgccggtgcttccagtgggttgatgacagctatcttaacaaaccctatctgggttataaagaccaggataatgtctacaagtaaaggcgcccaaggagcgtacacttctatgtacaacggtgtccaacaattattaagaactgatggcttccagggcttatggaagggccttgtacccgcattatttggtgtttctcaaggtgccttatattttgcagtttacgataccttaaagcaaagaaaattgaggcgtaagagggaaaatgggcttgacatccatttaacaaatcttgaaaccattgaaatcacatctttgggaaaaatggtctccgtcactttggtttacccttttcaattattgaaaagtaacttacaaagtttcagggccaatgagcaaaaatttaggctctttcctttgataaaattaatcattgctaatgatggttttgttggactttataagggcttatctgcaaacttagtaagagccattccatccacttgcattaccttttgtgtatacgagaaccttaagcataggctttga

SEQ ID NO: 5369 - DNA, 600 bp, Saccharomyces cerevisiae
atgtctgttgaaccagttgttgtcattgatggtaagggtcatttagtaggtcgtttagcttccgttgttgctaagcaattattaaacggtcaaaaaatcgttgttgttagagctgaagaattaaacatttctggtgaatttttcagaaacaaattaaagtaccatgatttcttgagaaaggctaccgctttcaataagacccgtggtccattccatttcagagccccatctagaatcttctacaaagctcttcgtggtatggtttctcacaagactgctcgtggtaaggccgctttggaacgtttaaaggtctttgaaggtatcccacctccatacgataagaagaagagagttgttgtcccacaagcattgagagttttgagattgaagccaggtagaaagtacaccaccttgggtaagttgtctacttccgttggttggaaatacgaagatgttgttgccaaattggaagcaaagagaaaggtttcatccgctgaatactatgccaagaagagagctttcaccaagaaagttgcctctgctaatgctactgctgctgaatctgatgttgctaaacaattagccgctttgggttactaa

SEQ ID NO: 5370 - DNA, 600 bp, Artificial Sequence
  Description of Artificial Sequence: Synthetic polynucleotide
atgtctgttgaaccagttgttgtcattgatggtaagggtcatttagtaggtcgtttagcttccgttgttgctaagcaattattaaacggtcaaaaaatcgttgttgttagagctgaagaattaaacatttctggtgaatttttcagaaacaaattaaagtaccatgatttcttgagaaaggctaccgctttcaataagacccgtggtccattccatttcagagccccatctagaatcttctacaaagctcttcgtggtatggtttctcacaagactgctcgtggtaaggccgctttggaacgtttaaaggtctttgaaggtatcccacctccatacgataagaagaagagagttgttgtcccacaagcattgagagttttgagattgaagccaggtagaaagtacaccaccttgggtaagttgtctacttccgttggttggaaatacgaagatgttgttgccaaattggaagcaaagagaaaggtttcttccgctgaatactatgccaagaagagagctttcaccaagaaagttgcctctgctaatgctactgctgctgaatctgatgttgctaaacaattagccgctttgggttactga

SEQ ID NO: 5371 - DNA, 642 bp, Saccharomyces cerevisiae
atggaatatgaagatttggaactgattaccatttggccttccccgacaaagaacaaactttgccaatttatcaagcagaatctttcaaaggagcatgttgttacccagttattttttattgatgccacaagctcattcccgctaagtcaattccaaaaacttgtaccgccaacccttccagaaaacgtcagaatatacgagaatattagaatcaacacttgccttgatctcgaagaactcagtgccataacggtgaaactactacaaatcttatctatgaataaaataaacgcccaaagaggcactgaagacgctgtgacagaacccctaaagatcatcttatacattaatggattagaagtcatgtttagaaactcccagttcaaatcctcccctcaaaggtcacacgaactgttaagggatacattgctcaagttacgtgtaatggggaatgacgagaatgagaatgcatctataagaacactgctagaattccctaaggaacagcttttagattattatttaaaaaaaaacaacaatacaagaacgtcatctgtgcgtagcaagagaaggcggattaaaaatggagattcccttgctgaatatatctggaagtattatgcagattcattattcgaatga

SEQ ID NO: 5372 - DNA, 642 bp, Artificial Sequence
  Description of Artificial Sequence: Synthetic polynucleotide
atggaatatgaagatttggaattgattaccatttggccttccccgacaaagaacaaactttgccaatttatcaagcagaatctttccaaggagcatgttgttacccagttattttttattgatgccacaagctctttcccgttaagtcaattccaaaaacttgtaccgccaacccttccagaaaacgtcagaatatacgagaatattagaatcaacacttgccttgatctcgaagaactcagtgccataacggtgaaattattacaaatcttatctatgaataaaataaacgcccaaagaggcactgaagacgctgtgacagaacccttgaagatcatcttatacattaatggattagaagtcatgtttagaaactcccagttcaaatcctcccctcaaaggtctcacgaattattaagggatacattgctcaagttacgtgtaatggggaatgacgagaatgagaatgcatctataagaacattgttggaattccctaaggaacagcttttagattattatttaaaaaaaaacaacaatacaagaacgtcttctgtgcgtagcaagagaaggagaattaaaaatggagattcccttgctgaatatatctggaagtattatgcagattctttattcgaatga

SEQ ID NO: 5373 - DNA, 1455 bp, Saccharomyces cerevisiae
atgtctgttaccagtagggaacaaaaatttagtggtaagtatagttcgtatacagcccaggatcgccaagggcttgttaatgcggtgacatgtgttcttagctcgtcaagcgatcctgtggctgtgtcaagtgactattccaatagcttgagtattgccagagaggtcaacgcttatgctaaaattgccggatgtgattggacgtattatgtacaaaaattagaagttaccattggtaggaacacagacagcttgaacttgaatgctgtgcccggtacagtcgtgaagaagaatatagacattgatcttggtcctgccaaaattgtgtctaggaagcatgctgcaatcagattcaacctggagagcggatcatgggaattacagatattcggtagaaatggtgctaaggtcaattttagaaggattcccacaggtccagactctcctcctacggtgctacagtctggttgtatcatagacataggtggtgtgcaaatgatctttatattgccggaacaagaaactattatatcggattattgcctgaatcacctcatgcccaaattactatctacttatggtacgaatggtaacaacaacccgttgctacgtaacattatcgaaggttctacctatttaagagagcaaaggttacaggaagaggctcgattacaacagctggaccacctacacaccccattatcgtcatcatcagatgttaacccaataggggatccacatggagacacgattatgatggaagaagatgaagaagatgaaaattacaccagaggaggaattagaccgaatacatacacgtccagtagcaacaatgctgtcactaacggtaatgtaccccatatagaaaatccatcagacttgtcgctggatgaaaacagatatatcaaaccaccacagtcgtatgcatcgatgatcacccaagccattctttcaacacccgaaggtagtatttcattagcggatatttacaaatttatctctgacaactacgcattttacaggttttctcaaatggcgtggcagaactccgtgaggcataatctgtccctaaataaagccttcgagaaggtgcccaaaagagctggtcaacaaggtaaagggatgaattggaaaattagcgatgaagtcaggcgtgattttttgaacaagtggaatgctggtaaattgagtaagattagacgaggcgcctctgtgacaagacagctgcaattgcacatgtccaaatttggagaaatacctgctcctgaatcttcatcaattgacccgagggggataaaagcacagaaggtgaaaaagtctttacaagctacgagctcgattttaggtgaaagcgccccgcaattacaaagaactcaactcactggccaaatttctactacgacatccatggacgtaacaacaaacgcaaacgtgaacaattcctctctgagttga

SEQ ID NO: 5374 - DNA, 1455 bp, Artificial Sequence
  Description of Artificial Sequence: Synthetic polynucleotide
atgtctgttaccagtagggaacaaaaatttagtggtaagtatagttcttatacagcccaggatcgccaagggcttgttaatgcggtgacatgtgttcttagctcttctagcgatcctgtggctgtgtccagtgactattccaatagcttgagtattgccagagaggtcaacgcttatgctaaaattgccggatgtgattggacgtattatgtacaaaaattagaagttaccattggtaggaacacagacagcttgaacttgaatgctgtgcccggtacagtcgtgaagaagaatatagacattgatcttggtcctgccaaaattgtgtctaggaagcatgctgcaatcagattcaacttggagagcggatcttgggaattacagatattcggtagaaatggtgctaaggtcaattttagaaggattcccacaggtccagactctcctcctacggtgttacagtctggttgtatcatagacataggtggtgtgcaaatgatctttatattgccggaacaagaaactattatatctgattattgcttgaatcacctcatgcccaaattattatctacttatggtacgaatggtaacaacaacccgttgttacgtaacattatcgaaggttctacctatttaagagagcaaaggttacaggaagaggctagattacaacagttagaccacttgcacaccccattatcttcttcttctgatgttaacccaataggggatccacatggagacacgattatgatggaagaagatgaagaagatgaaaattacaccagaggaggaattagaccgaatacatacacgtccagtagcaacaatgctgtcactaacggtaatgtaccccatatagaaaatccatctgacttgtctttagatgaaaacagatatatcaaaccaccacagagttatgcatctatgatcacccaagccattctttctacacccgaaggtagtatttctttagcggatatttacaaatttatctctgacaactacgcattttacaggttttctcaaatggcgtggcagaactccgtgaggcataatttatccttgaataaagccttcgagaaggtgcccaaaagagctggtcaacaaggtaaagggatgaattggaaaattagcgatgaagtcaggcgtgattttttgaacaagtggaatgctggtaaattgagtaagattagaagaggcgcctctgtgacaagacagttacaattgcacatgtccaaatttggagaaatacctgctcctgaatcttcttccattgacccgagggggataaaagcacagaaggtgaaaaagtctttacaagctacgagctctattttaggtgaaagcgccccgcaattacaaagaactcaactcactggccaaatttctactacgacatccatggacgtaacaacaaacgcaaacgtgaacaattcctctttgagttga

SEQ ID NO: 5375 - DNA, 2895 bp, Saccharomyces cerevisiae
atgccagaacaagcgcaacaaggggaacagtctgtcaagagaagaagggtcactagagcctgtgatgaatgcagaaagaaaaaagttaaatgtgatggtcagcaaccatgtatccattgtactgtgtactcttatgaatgtacttataagaagcctacgaagagaacacagaactccggaaactccggagttctaacactgggcaatgttactactggtccatcatcaagtactgtggtggcagccgccgcttccaatccaaataaactcctctcaaacattaaaacagaaagggctattttaccgggtgcttctacaatacctgcaagtaacaatccatctaaaccaagaaagtataagactaagagcacaaggttacaatcgaagattgacaggtacaagcaaatatttgatgaggtcttcccgcagttacctgatatagacaatctggatattcctgtgttcttgcagatctttcacaattttaagagggactcgcagtcgtttttagatgacactgtgaaagaatatactttaatcgtaaatgacagttcttctccgatccaaccagtactttcttcaaattcaaaaaactccactccagacgaatttttacctaacatgaaaagtgactcgaatagcgcctccagcaacagggaacaagacagtgtagatacctactccaatatccccgttggtagagaaataaaaataattctaccaccaaaagcgatcgctttacaattcgtgaaaagtacttgggaacattgctgtgttcttctccgattttatcacagaccatcgttcattagacaattggatgagttgtatgagacagacccaaacaattatacgtctaagcaaatgcaatttttaccattgtgctacgctgcaatcgctgtgggagcattattctcgaaatccattgtctcaaatgactcgtcaagggaaaagtttctacaggatgaaggttacaagtacttcattgcagcaaggaaactaatcgacattacaaatgcccgtgacttgaattccatacaagcaattttaatgctgattatattcttacaatgttccgcacgtttatcaacgtgttacacttatatcggtgtcgccatgagaagtgctttgagagcaggctttcataggaaattgagccccaattctggttttagtccaatagaaattgagatgaggaaacgccttttttatacaatctataaactggacgtttatatcaatgcaatgctgggcctaccgagatctatttcccccgacgattttgaccaaactctccccctggatttatcagatgagaatatcactgaggtggcgtacctacctgagaaccaacactccgttttatcaagtacggggatttcgaatgaacatacaaaactatttttgattttaaatgagatcatttctgaactatatccgataaaaaaaactagtaatataatttctcatgagacagttactagcttggaattaaagttgagaaattggttggattcgttgcccaaagaactgatacctaacgcagaaaatattgatcctgaatatgaaagggcaaatcgtttattacatttgtcttttttgcacgttcagataatattatacaggccttttattcattatttatcacgcaacatgaatgctgaaaatgtagatcccttatgttaccggagagcccggaactctattgccgtggctcgaacggttattaagttagcaaaagagatggttagtaataatttattaactggttcatactggtatgcctgttatacaattttttactccgttgcaggtctcttattttacatccatgaggcgcaattgcctgataaggatagtgctagagaatattatgatattttgaaagacgcagaaactggtagaagcgttcttattcaactcaaggattctagtatggccgctagcaggacttataatttattgaaccaaatttttgaaaaactaaactcaaaaactatccagcttactgcgttacattcatcaccatccaacgaaagtgcctttttagtgactaataattcctccgctttgaaacctcatttaggagattcattgcaaccacccgtattcttttcttcccaggatacgaagaatagcttttcattagctaagagtgaagaaagcaccaatgattacgctatggctaattacctaaataatacacctatttccgaaaatcctttaaatgaagcacaacagcaagatcaagtatcccaaggaacgactaacatgtctaatgaaagagatccgaacaatttcttatctattgatatcagacttgataataatggccaatcaaatattcttgatgccacagatgacgtctttatcaggaatgacggcgacatccctactaacagtgcattcgattttagcagcagtaagagcaatgcatcaaataactccaacccagataccattaacaacaactacaataatgttagtggcaaaaacaataataacaataatattactaacaatagtaataataatcacaacaacaacaacaacgacaacaacaacaacaataataataataataataataataataacaataacaatagtggtaatagtagtaataataataacaataataacaataataaaaataataatgacttcggcattaagattgataacaattcaccgtcttatgaagggtttccccagttacaaataccgctttcacaagacaatttgaacatagaagataaagaggagatgtcacctaatattgaaattaaaaacgaacaaaatatgactgactcaaacgatattcttggagtattcgatcagttagatgctcagctatttgggaaatacctacctttaaattacccctctgaatga

SEQ ID NO: 5376 - DNA, 2895 bp, Artificial Sequence
  Description of Artificial Sequence: Synthetic polynucleotide
atgccagaacaagcgcaacaaggggaacagtctgtcaagagaagaagggtcactagagcctgtgatgaatgcagaaagaaaaaagttaaatgtgatggtcagcaaccatgtatccattgtactgtgtactcttatgaatgtacttataagaagcctacgaagagaacacagaactccggaaactccggagttttgacattaggcaatgttactactggtccatcttccagtactgtggtggcagccgccgcttccaatccaaataaactcctctccaacattaaaacagaaagggctattttaccgggtgcttctacaatacctgcaagtaacaatccatctaaaccaagaaagtataagactaagagcacaaggttacaatccaagattgacaggtacaagcaaatatttgatgaggtcttcccgcagttacctgatatagacaatttggatattcctgtgttcttgcagatctttcacaattttaagagggactctcagtcttttttagatgacactgtgaaagaatatactttaatcgtaaatgacagttcttctccgatccaaccagtactttcttccaattctaaaaactccactccagacgaatttttacctaacatgaaaagtgactctaatagcgcctccagcaacagggaacaagacagtgtagatacctactccaatatccccgttggtagagaaataaaaataattttaccaccaaaagcgatcgctttacaattcgtgaaaagtacttgggaacattgctgtgttcttctcaggttttatcacagaccatctttcattagacaattggatgagttgtatgagacagacccaaacaattatacgtctaagcaaatgcaatttttaccattgtgctacgctgcaatcgctgtgggagcattattctccaaatccattgtctccaatgactcttccagggaaaagtttttgcaggatgaaggttacaagtacttcattgcagcaaggaaattaatcgacattacaaatgcccgtgacttgaattccatacaagcaattttaatgttgattatattcttacaatgttccgcacgtttatctacgtgttacacttatatcggtgtcgccatgagaagtgctttgagagcaggctttcataggaaattgagccccaattctggttttagtccaatagaaattgagatgaggaaacgccttttttatacaatctataaattagacgtttatatcaatgcaatgcttggcttaccgagatctatttcccccgacgattttgaccaaactctccccttagatttaagtgatgagaatatcactgaggtggcgtacttacctgagaaccaacactccgttttatccagtacggggatttctaatgaacatacaaaattatttttgattttaaatgagatcatttctgaattgtatccgataaaaaaaactagtaatataatttctcatgagacagttactagcttggaattaaagttgagaaattggttggattctttgcccaaagaattgatacctaacgcagaaaatattgatcctgaatatgaaagggcaaatcgtttattacatttgtcttttttgcacgttcagataatattatacaggccttttattcattatttatctcgcaacatgaatgctgaaaatgtagatcccttatgttacagaagagccagaaactctattgccgtggctagaacggttattaagttagcaaaagagatggttagtaataatttattaactggttcttactggtatgcctgttatacaattttttactccgttgcaggtctcttattttacatccatgaggcgcaattgcctgataaggatagtgctagagaatattatgatattttgaaagacgcagaaactggtagaagcgttcttattcaactcaaggattctagtatggccgctagcaggacttataatttattgaaccaaatttttgaaaaattgaactccaaaactatccagcttactgcgttacattcttctccatccaacgaaagtgcctttttagtgactaataattcctccgctttgaaacctcatttaggagattctttgcaaccacccgtattcttttcttcccaggatacgaagaatagcttttctttagctaagagtgaagaaagcaccaatgattacgctatggctaattacttgaataatacacctatttccgaaaatcctttaaatgaagcacaacagcaagatcaagtatcccaaggaacgactaacatgtctaatgaaagagatccgaacaatttcttatctattgatatcagacttgataataatggccaaagcaatattcttgatgccacagatgacgtctttatcaggaatgacggcgacatccctactaacagtgcattcgattttagcagcagtaagagcaatgcatctaataactccaacccagataccattaacaacaactacaataatgttagtggcaaaaacaataataacaataatattactaacaatagtaataataatcacaacaacaacaacaacgacaacaacaacaacaataataataataataataataataataacaataacaatagtggtaatagtagtaataataataacaataataacaataataaaaataataatgacttcggcattaagattgataacaattctccgtcttatgaagggtttccccagttacaaataccgctttctcaagacaatttgaacatagaagataaagaggagatgtctcctaatattgaaattaaaaacgaacaaaatatgactgactccaacgatattcttggagtattcgatcagttagatgctcagttatttgggaaatacttacctttaaattacccctctgaatga

SEQ ID NO: 5377 - DNA, 7131 bp, Saccharomyces cerevisiae
atggcctcgagatttactttcccgccccagagggatcaaggcattggtttcaccttcccaccgacaaataaagcagaaggttctagcaacaataaccagatatcaatagatattgatccttcaggccaggatgtcttggaggaaataaacgaagcgccacttaacacatttcctcttcaccaatccgttacggatgcacctattattgatattccatctcctactgatatgtctgaaggcacctctctaaataatcaattacttttacggcaacaacagcaacaaggaacgggggaaggtcaagctcttccgcctacctttgttgaggagcaaagtgatcaaaacaagatttcaatgctactacctgaacaaaagcagcaaagaatgcaagaatcagcaccgccggacattacagcaaaatcagtagcagaggactacgtgactactttgagacagcaaatggctacagattggaaaagtccctctgaatatgctcttcatatactttttacaaagtttattcgttacgcggagaacaaactaaatatgtgtctacagcagttggacatggcggaacccccaattgtagaaattcttggtgaaggcgttgatcccagctttgatgaaattattaaatctctaggtcacattgcaaagaaaaaaccgaaacctgtgattgatgcaatgatgttttggaggaagactaaatctgaagcggccaactctgcttcagaagaaatggaaaaactattaaaagagtatgagtttgaaaaggcacatccctcgcaggctcattttttaatgaataggcggctatcaagatcttccagtaatacaacctcaaagtacaaacataataacaataccaataatcttcctggcatgaaaaggcacgtttcctcatctttcaacaacaaagttccgttaatcaaagctagtagcagtaacaatagcgctacttcaagtccatccatagcgaactcacaattgaaaagtttagagaacacaattgaagtagcaaaagaagaagcattccttgcagataggaaatctctgattagtatatacatcctatgcagggtgctaaatgaaattgttaagcaggcttccagcaatgaagaagaagatttatctgataagctagaagagattgtttttactcagttaaaaactactgatccactttctatatcaactagtttaattaagtcttcgaattggaattcttttgccgaactactgggctctatgtctgaaaagaaatttttgtcagttagtgatcgatttatagctgatctagaaaaaatcccggcgtatatacctcccgagttagagccaagtactcatttgttgattcttggtatgagatatttgaagttaagaaattatccgttggagaaatttgaagaaagtgcagatttcatgaaaagtttatcaaagttcttcgcaaagactgaaaattttccggtttgtttggcgtatgctgaagtcactaaccagctattgttgcctttggctggctcgttgacggcagaagttaatcatccaacgtgggtagaggcaatgtctactttactgaacactgccaagaggctacaagctgatagtaagtattgggtaagtggtttcaaattaacagtttctattttgtgtgcatcaccaccagacctattttctaaacaatggctatcgttgttggaggcaaatgcctcaaaagttaagtccaaaagtctgaatgaaaggattatctttgcagttggtttatccagattagtttgggtctatttatatagatgcccagaaactttaaataatactacaaggacgcttaccaagcttttacaactatatctaaacacaaggaaaaaagagaattggataaccggcgattttggtctcttgaacccattgacagacgcgttaatatcaattggatttttacatccgaattttttaatggaacaagctttaattccattgatacggcaatctttcaatggctctaacctggaaaatatcaattacgaaaaactgattttgactataaatacatacaaaggattgctggttacaaaagagaggccaaggtttcctgaggatgataacaggctttatgaactaaatttaaacaatattacagtgaatcaggttcaagaagcctcttccataaaccatacagaaatatcagattacttttataaattattccttttattggattctagcatcggttctgaagtttggtctcctgaaaatcagcaccaaaagcaatcatcaaacgcattcagcccatttggctttagcttttctaatgacaatgactcaagtaaaaataagtcgctttatgttatattgttcggcaccatcattgaagctataccatgttgcctttctatttcacgcactatcccatataaatctacaattgagattttatcaaggaacgctgttcattcggaggtaattatttcttctagcagtcaaaatgcactaagagcattagcatctaagaagaatccatacaccctaatcacatggtttgctaaatattcatttgatttcgatgaaaagacacaatcaagttataacatgtcgtacttgtcatcaaaggagtacaacagattattgatactttatgttgagcttttggaatgctggttagaagaattccaatcgtccaataaagaggaaaataaaaaagaaactggtttggatggaattcgcttgttgccgatcgatgcagaacaagaggagagtaacgaaaccgaaaaactggagtggaaaaatacagttacagttattgaagaagtagaagggaatggcttattttttctttgttcacacgatgcaaaaattcgtagattgggcatccagatattgagaattattttcaagtttgacgaagcgatgatggagaaaacagagaaattgtcaaacgggcattctagatcatcatcccattttgcagctgatcgcggaacaagacttattgatttattaaatgagtgtaataccactaccttaattaatccacataaagcaacattaagtgcggttgaaaaaacgagattcagtcgactgaattctaaatataaaagaggtctacttatcaaactggccgaatcagagtacggagtagatgctgcactatggcaaagggcttttcctaaattactggcgttggttttcaaaacttgtcctatggcgatggcattgtgtcgatctatcgtttgtataagacttgtgcaagtacacgaaataattctgcgggtagcaaatgatgttgatttcaaactcaaaaatgttttaccggaaacaatagtaaaccaatggaagctatatttgattgccgcatgtacttcattaacttccacgtttgaccaaaaactgcatattccgtccaatattcctcagcatggcaggaaaaaaagtcaacaaatctttactgttcagcaccaaaaaatcaaatctgcgaaatcaatcttcaagatggttcttcccttattaaatgcaaagtatattatgattagggatgctataataacggggctaagctcaatgaatatcaacatttttaaagcatatgtggaggcaattgatgtatttttagtggcatggaaagaagggagctccaacaaccaaatcagagtggagatgtttcatattttgacgattttatcgccgtacttaaaatcggatatgatatttaatgacgaatggatacttcggaaattatcagagtttttgcagaagacaaaacagttcctcgagaaggattctgtgcaaatctcctacgaatatcaatcgctgcgaagctactttgcaggtcttatattgagctactatatggcagtaagagagcatccgctaatagatgaattatttcccttccaagcacgcgcatcatgtttcaatttcttgaaggaatggtgtggttatggtgagtacgagccaatatctgaagaaagatatgccataatgataaaaaatacagagagtggcagagatagaaccgctattacaactggaatagaattccaaaaaaacagattgcagatgatcgtgctagagactatggttgttttatgttcagatccaataacccaaacattggacgatgatttagagttgcctattgtgatttcattcgatactgaagatttacttgcttggattgaagcactatttgactcggacaatactactgtaaaaaatcttggtgtgcgtgctttggagaatctcctggacaaaaatagggaaaattttaaactatttagagatgttgctttccaatgtgtttcacaccactcacatccttcggtagctgttttatattacactacactttgtaaatccgttttgaaattggataatttggttttagatgaagatgaattagtctccttgggtttgtatggtttagtggcagataaggaagatacaaggacatttgctgttgatctactttcagctgttgaaacgaaattacataattcttcttataccaaggtatttaaggagagacttgcaaattcttcaaagacggtttacaaatcaactgcaaaagaaatttctagcatatttgccgaactgctctctcaggatttgtgtttgagaatattttccagtttggttagaatacttgatttgtttcctttcgaaataaaaagagatttgttggtgcttatggtaccttgggtaaacaaatttacattgaaatctttagaagagttggacacgtttatggtattgaataacctattttacatcactattgatcttaacgactctttaccgaacgaagtagagcagctatggatttctcttggcaagggtaattctttccaaaatatacacgtatcgctggagtacatcataaattcttcaatgaatcactgcaatccattgtttgttcagtatgctagagatattgtattgtatttggcaaatattcctggtggcattggactacttgacactctattgaataatttagaaccgaaatacatggttcctttagcgaaacatacgtttaatgagccaatgaataataataagtattcctttttagggaatatctgggaacgactaaattacaatgggaaaagaatcattttttcgaaggcgcagctttcgattatctttttagtcaatttgttaacgaacttgagtgaatctgtaaaggcgaaaattcctcttctactacatatgtccatttgcttgcttgaccattatgtgccgcttattcacgaaagcgcgtgtaaaattgcatctacattaatatttggattggcaccaagtcacgaaaagtctgaggaaaccgtgaaactactaagaaataagcatgccttatggtcatatgataacttgatgaaaaaaggtgcaagatcaccaaaaactatggacctattaattaggaacataatctctatattctcggacttagatgaatttcaagtaacttggcaaagaattgccttgaagtgggctaccacttgctcagttaggcacatagcgtgcaggtcatttcaaatatttagatcattattgacatttttagatcaggaaatgttgcgtgatatgcttcatagactttcgaacactatatcggatggaaatgtcgatatacaaggatttgccatgcagatcttgatgactttgaatgcaatcatggccgaacttgatccgacgaatttgatcagtttcccgcagttattttggtccattacagcatgtttgagcagcattcacgaacaagaattcattgaagtgctgtcatgtttaagtaaattcatttccaagatcgatttggattctcctgataccgtacagtgtttggttgcgatctttccttccaattgggaaggtcgctttgatggcttgcaacaaatagttatgactggattgcgatcagcgaattccttagagattacgtggaaatttttggataagttaaatttgttgaaagatagccgaattatagcaaatacagagtctaggctgcttttcgcattaatagcaaaccttccgagatttttgaatgcaatggatcgcaaagattttacgggcattcaggttgctgcagattcgttaattgaacttgcaaatgcgtacaaacaaccttctctttcccgtttgatagattctctagcaaagaacaagtttagatcaaagaaagatttcatgagccaagtagtgagtttcatatctagaaactacttcccctcgtactccgctcaaacgttagtgttccttctgggtcttctgttcaataaaataggatggatcagagttcaaactctggaaattttaaaatatgtttttcctttaattgacttaagaaggccagaatttattggtgtcggtgctgatttgatttctccgttactcaggttactatttactgaatacgaagcaaaggccttggaagttttagattgcgtaccaaatgtttctggaagtaaaatggataaggatgttttaaggataaccatgggaaataaggatgtgaaagacggcgataatgctaccactaccttgtttggtttgcctgaagatagcggttggtctgttcctatgccaacaatgacggcggctacgacaaggcacaacgttcacgcagtttttatgacatgtggtacaggcaaatcagatgaagtatctgctcacggatcggatgatatggatgcagttatcgaatttcatgcggatggtgactatgaactcggcagaatggatacaattgtcgagtttcatgcggacggtgattatgaccttggtagaatggacacaaacgattccatttctgttgcggaagaaaaggatgcttcgttaagtcacatgtgggcagagctagataatcttgatagttttttcacaaaggacacaaatgtgccaaatatctcctctaaaatggggatgggaattccacatggacgttctgattcgattgaaaccactcgcacagatcaaactttttcctttgagtctgctccacagttgtatgacaaaaaggtctcagtcatactgaacaggagcttatctagaacaccgtccaatgtttcatttaaaactcatttggctgattcatttgctgtgaaaataaacaggaatggaaagccaagaatataa

SEQ ID NO: 5378 - DNA, 7131 bp, Artificial Sequence
  Description of Artificial Sequence: Synthetic polynucleotide
atggcctctagatttactttcccgccccagagggatcaaggcattggtttcaccttcccaccgacaaataaagcagaaggttctagcaacaataaccagatatccatagatattgatccttccggccaggatgtcttggaggaaataaacgaagcgccacttaacacatttcctcttcaccaatccgttacggatgcacctattattgatattccatctcctactgatatgtctgaaggcacctctttgaataatcaattacttttaagacaacaacagcaacaaggaacgggggaaggtcaagctcttccgcctacctttgttgaggagcaaagtgatcaaaacaagatttccatgttattgcctgaacaaaagcagcaaagaatgcaagaaagtgcaccgccggacattacagcaaaatctgtagcagaggactacgtgactactttgagacagcaaatggctacagattggaaaagtccctctgaatatgctcttcatatactttttacaaagtttattcgttacgcggagaacaaattgaatatgtgtttacagcagttggacatggcggaacccccaattgtagaaattcttggtgaaggcgttgatcccagctttgatgaaattattaaatctttgggtcacattgcaaagaaaaaaccgaaacctgtgattgatgcaatgatgttttggaggaagactaaatctgaagcggccaactctgcttctgaagaaatggaaaaattattaaaagagtatgagtttgaaaaggcacatccctctcaggctcattttttaatgaataggagattatctagatcttccagtaatacaacctccaagtacaaacataataacaataccaataatcttcctggcatgaaaaggcacgtttcctcttctttcaacaacaaagttccgttaatcaaagctagtagcagtaacaatagcgctacttctagtccatccatagcgaactctcaattgaaaagtttagagaacacaattgaagtagcaaaagaagaagcattccttgcagataggaaatctttgattagtatatacatcctttgcagggtgttgaatgaaattgttaagcaggcttccagcaatgaagaagaagatttatctgataagttggaagagattgtttttactcagttaaaaactactgatccactttctatatctactagtttaattaagtcttccaattggaattcttttgccgaattattaggctctatgtctgaaaagaaatttttgagtgttagtgatagatttatagctgatttggaaaaaatcccggcgtatatacctcccgagttagagccaagtactcatttgttgattcttggtatgagatatttgaagttaagaaattatccgttggagaaatttgaagaaagtgcagatttcatgaaaagtttatccaagttcttcgcaaagactgaaaattttccggtttgtttggcgtatgctgaagtcactaaccagttattgttgcctttggctggctctttgacggcagaagttaatcatccaacgtgggtagaggcaatgtctactttattaaacactgccaagaggttacaagctgatagtaagtattgggtaagtggtttcaaattaacagtttctattttgtgtgcatctccaccagacttattttctaaacaatggttatctttgttggaggcaaatgcctccaaagttaagtccaaaagtttgaatgaaaggattatctttgcagttggtttatccagattagtttgggtctatttatatagatgcccagaaactttaaataatactacaaggacgcttaccaagcttttacaattatatttgaacacaaggaaaaaagagaattggataaccggcgattttggtctcttgaacccattgacagacgcgttaatatctattggatttttacatccgaattttttaatggaacaagctttaattccattgataagacaatctttcaatggctctaacttggaaaatatcaattacgaaaaattgattttgactataaatacatacaaaggattgttggttacaaaagagaggccaaggtttcctgaggatgataacaggctttatgaattgaatttaaacaatattacagtgaatcaggttcaagaagcctcttccataaaccatacagaaatatctgattacttttataaattattccttttattggattctagcatcggttctgaagtttggtctcctgaaaatcagcaccaaaagcaatcttccaacgcattcagcccatttggctttagcttttctaatgacaatgacagcagtaaaaataagtctctttatgttatattgttcggcaccatcattgaagctataccatgttgcctttctatttctcgcactatcccatataaatctacaattgagattttatctaggaacgctgttcattctgaggtaattatttcttctagcagtcaaaatgcattgagagcattagcatctaagaagaatccatacaccttaatcacatggtttgctaaatattcttttgatttcgatgaaaagacacaaagtagttataacatgagttacttgagttccaaggagtacaacagattattgatactttatgttgagcttttggaatgctggttagaagaattccaatcttccaataaagaggaaaataaaaaagaaactggtttggatggaattcgcttgttgccgatcgatgcagaacaagaggagagtaacgaaaccgaaaaattagagtggaaaaatacagttacagttattgaagaagtagaagggaatggcttattttttctttgttctcacgatgcaaaaattcgtagattgggcatccagatattgagaattattttcaagtttgacgaagcgatgatggagaaaacagagaaattgtctaacgggcattctagaagttcttcccattttgcagctgatcgcggaacaagacttattgatttattaaatgagtgtaataccactaccttaattaatccacataaagcaacattaagtgcggttgaaaaaacgagattcagtaggttgaattctaaatataaaagaggtttacttatcaaattggccgaaagtgagtacggagtagatgctgcattatggcaaagggcttttcctaaattattggcgttggttttcaaaacttgtcctatggcgatggcattgtgtcgttctatcgtttgtataagacttgtgcaagtacacgaaataattttaagagtagcaaatgatgttgatttcaaactcaaaaatgttttaccggaaacaatagtaaaccaatggaagctttatttgattgccgcatgtacttctttaacttccacgtttgaccaaaaattgcatattccgtccaatattcctcagcatggcaggaaaaaaagtcaacaaatctttactgttcagcaccaaaaaatcaaatctgcgaaatctatcttcaagatggttcttcccttattaaatgcaaagtatattatgattagggatgctataataacggggttgagcagtatgaatatcaacatttttaaagcatatgtggaggcaattgatgtatttttagtggcatggaaagaagggagctccaacaaccaaatcagagtggagatgtttcatattttgacgattttatctccgtacttaaaatctgatatgatatttaatgacgaatggatacttagaaaattatctgagtttttgcagaagacaaaacagttcctcgagaaggattctgtgcaaatctcctacgaatatcaaagtcttagaagctactttgcaggtcttatattgagctactatatggcagtaagagagcatccgttgatagatgaattatttcccttccaagcacgcgcatcttgtttcaatttcttgaaggaatggtgtggttatggtgagtacgagccaatatctgaagaaagatatgccataatgataaaaaatacagagagtggcagagatagaaccgctattacaactggaatagaattccaaaaaaacagattgcagatgatcgtgttggagactatggttgttttatgttctgatccaataacccaaacattggacgatgatttagagttgcctattgtgatttctttcgatactgaagatttacttgcttggattgaagcattatttgacagtgacaatactactgtaaaaaatcttggtgtgcgtgctttggagaatctcttggacaaaaatagggaaaattttaaattatttagagatgttgctttccaatgtgtttctcaccactctcatccttctgtagctgttttatattacactacactttgtaaatccgttttgaaattggataatttggttttagatgaagatgaattagtctccttgggtttgtatggtttagtggcagataaggaagatacaaggacatttgctgttgatttactttctgctgttgaaacgaaattacataattcttcttataccaaggtatttaaggagagacttgcaaattcttccaagacggtttacaaatctactgcaaaagaaatttctagcatatttgccgaattactctctcaggatttgtgtttgagaatattttccagtttggttagaatacttgatttgtttcctttcgaaataaaaagagatttgttggtgcttatggtaccttgggtaaacaaatttacattgaaatctttagaagagttggacacgtttatggtattgaataacttgttttacatcactattgatcttaacgactctttaccgaacgaagtagagcagttatggatttctcttggcaagggtaattctttccaaaatatacacgtatctttggagtacatcataaattcttctatgaatcactgcaatccattgtttgttcagtatgctagagatattgtattgtatttggcaaatattcctggtggcattggattgcttgacactttattgaataatttagaaccgaaatacatggttcctttagcgaaacatacgtttaatgagccaatgaataataataagtattcctttttagggaatatctgggaaagattgaattacaatgggaaaagaatcattttttccaaggcgcagctttctattatctttttagtcaatttgttaacgaacttgagtgaatctgtaaaggcgaaaattcctcttttattacatatgtccatttgcttgcttgaccattatgtgccgcttattcacgaaagcgcgtgtaaaattgcatctacattaatatttggattggcaccaagtcacgaaaagtctgaggaaaccgtgaaattattaagaaataagcatgccttatggagttatgataacttgatgaaaaaaggtgcaagatctccaaaaactatggacttattaattaggaacataatctctatattcagtgacttagatgaatttcaagtaacttggcaaagaattgccttgaagtgggctaccacttgctctgttaggcacatagcgtgcaggtcttttcaaatatttagatctttattgacatttttagatcaggaaatgttgcgtgatatgcttcatagactttccaacactatatctgatggaaatgtcgatatacaaggatttgccatgcagatcttgatgactttgaatgcaatcatggccgaacttgatccgacgaatttgatcagtttcccgcagttattttggtccattacagcatgtttgagcagcattcacgaacaagaattcattgaagtgctttcctgtttaagtaaattcatttccaagatcgatttggattctcctgataccgtacagtgtttggttgcgatctttccttccaattgggaaggtcgctttgatggcttgcaacaaatagttatgactggattgagatctgcgaattccttagagattacgtggaaatttttggataagttaaatttgttgaaagatagcagaattatagcaaatacagagtctaggttacttttcgcattaatagcaaaccttccgagatttttgaatgcaatggatcgcaaagattttacgggcattcaggttgctgcagattctttaattgaacttgcaaatgcgtacaaacaaccttctctttcccgtttgatagattctttggcaaagaacaagtttagatccaagaaagatttcatgagccaagtagtgagtttcatatctagaaactacttcccctcttactccgctcaaacgttagtgttccttttgggtcttttattcaataaaataggatggatcagagttcaaactttggaaattttaaaatatgtttttcctttaattgacttaagaaggccagaatttattggtgtcggtgctgatttgatttctccgttactcaggttactttttactgaatacgaagcaaaggccttggaagttttagattgcgtaccaaatgtttctggaagtaaaatggataaggatgttttaaggataaccatgggaaataaggatgtgaaagacggcgataatgctaccactaccttgtttggtttgcctgaagatagcggttggtctgttcctatgccaacaatgacggcggctacgacaaggcacaacgttcacgcagtttttatgacatgtggtacaggcaaatctgatgaagtatctgctcacggaagtgatgatatggatgcagttatcgaatttcatgcggatggtgactatgaactcggcagaatggatacaattgtcgagtttcatgcggacggtgattatgaccttggtagaatggacacaaacgattccatttctgttgcggaagaaaaggatgcttctttaagtcacatgtgggcagagttagataatcttgatagttttttcacaaaggacacaaatgtgccaaatatctcctctaaaatggggatgggaattccacatggacgttctgattctattgaaaccactcgcacagatcaaactttttcctttgagtctgctccacagttgtatgacaaaaaggtcagtgtcatattaaacaggagcttatctagaacaccgtccaatgtttcttttaaaactcatttggctgattcttttgctgtgaaaataaacaggaatggaaagccaagaatatga

SEQ ID NO: 5379 - DNA, 3099 bp, Saccharomyces cerevisiae
atgacaccagacgaactaaattcagcagtcgtcacctttatggccaatctgaatattgatgattcgaaggccaacgaaaccgcttccacagtaacggattctattgtacaccgatcaataaaattgctggaagttgtcgttgcgttgaaagattattttctttcagaaaatgaggtagaaaggaagaaagcgttgacatgtttaaccactatcttagcaaaaactcccaaggaccacctctccaaaaacgaatgctcagtaatatttcagttttaccagtctaagcttgatgatcaagcgcttgcaaaagaagtcttggagggcttcgccgcattagctccaatgaaatatgtctccattaacgagatagcccaacttttgagattattattggacaactatcaacaaggccagcatttggcatcaactagactgtggccatttaaaattttgagaaaaatatttgatagatttttcgtcaatggatcctcgaccgaacaagtcaaacgaatcaacgatttgtttattgaaacatttcttcatgttgccaatggtgaaaaagaccctagaaatttactcttgtcatttgcacttaataaatctatcacatcgtccttgcaaaacgtggagaattttaaagaagacttatttgatgtcttattttgctatttcccaatcactttcaagccaccaaagcatgatccttacaagatctccaaccaagatttaaaaacagctttgcgatcagcaattactgcgacgccattatttgccgaagatgcttatagcaatttgctggacaaactcactgcttcttcaccggtagtgaaaaatgatacacttctgacgctattagaatgcgttagaaaattcggcggctcttctatattggaaaattggacgttactttggaacgctttgaaatttgaaattatgcaaaacagcgaaggaaatgaaaacactctactaaatccgtacaataaagaccaacagagtgatgatgtgggccaatatactaactacgatgcttgcttgaaaattattaatctaatggcattgcaactatacaattttgacaaagtatcatttgaaaagttcttcactcatgtattagatgagttgaaaccaaattttaaatatgaaaaggatttgaagcaaacctgccagattttgtccgctataggtagtgggaatgtcgagatatttaacaaggtcatttcgtcaactttccccttatttttgatcaatacatctgaagttgccaaacttaagctgctgattatgaatttttctttttttgttgactcgtacattgatttgtttggaagaacatctaaagaatcgttgggaacaccggtgccaaataataaaatggctgaatacaaagacgagatcataatgattttgagcatggccttgacaagaagctccaaggcagaggttaccataaggactctatctgtgattcaattcacaaaaatgattaaaatgaagggctttttaaccccagaggaagtttcactaattattcaatacttcacggaagaaatattaacggataacaacaaaaacatttactatgcttgtttggaagggttaaagacaatcagtgagatatatgaggatttagtttttgaaatatcattgaagaaattattggatttgttacctgattgcttcgaggaaaaaattcgagtaaatgatgaggaaaatattcacattgaaacaattttgaagattattcttgatttcaccacttcgagacatattttggtcaaagaaagcattacatttttagcgacaaaattgaatagggtagctaaaatttcgaaatccagagaatattgctttctacttatttcaaccatatattctctttttaataataataatcaaaatgagaacgtgctaaatgaagaagatgctcttgcactcaagaatgccattgagccaaaattatttgagataattactcaggaatcggccattgtaagtgacaattacaatttgacacttctatctaacgttcttttcttcaccaatttgaaaattccacaggctgcacaccaagaagaactagacagatataacgagcttttcatttctgaaggtaagataagaatcttagacacaccgaatgtattggctatttcatatgctaaaatattatccgcactaaataaaaactgccaattcccccaaaaatttacagtgcttttcggaacggttcaactactcaaaaaacatgctccaagaatgacggagactgaaaaattaggatacctggaattgctgttggtcttatcaaataaattcgtctctgaaaaagatgtgataggattattcgattggaaagacttatcagtaattaatcttgaagtgatggtttggttgactaaagggctgataatgcaaaactcattagagtcatcagaaattgcaaaaaagtttattgatttactgtctaatgaagagattggctcacttgtatcgaagctattcgaagtttttgtcatggatatcagttctttgaagaaatttaaaggtatcagttggaataataacgttaaaatcttgtacaaacaaaaattcttcggtgacatttttcaaacactagtcagcaactataaaaataccgtggacatgaccattaaatgcaattatttaactgcattatccttagtgttgaagcatactccaagccaatcggttggtccttttatcaacgatttattcccgcttttattgcaggctttggatatgcctgatcctgaagtaagggtatccgctttagaaactctgaaggacactacggataaacatcacactttaattactgaacacgtaagcacaatagttccattattactatctctttcgcttccgcacaaatataatagtgtcagtgtcaggttaatagccttacagcttctagaaatgattacgactgtagtacctctaaactattgtttgagctatcaggacgatgttctaagcgctttaataccagttttatctgacaaaaaaagaataataagaaagcaatgcgttgacacaagacaggtttattatgaattaggccaaatcccgttcgagtaa

SEQ ID NO: 5380 - DNA, 3099 bp, Artificial Sequence
  Description of Artificial Sequence: Synthetic polynucleotide
atgacaccagacgaattgaattctgcagtcgtcacctttatggccaatttgaatattgatgattctaaggccaacgaaaccgcttccacagtaacggattctattgtacacagaagtataaaattgttggaagttgtcgttgcgttgaaagattattttctttctgaaaatgaggtagaaaggaagaaagcgttgacatgtttaaccactatcttagcaaaaactcccaaggaccacctctccaaaaacgaatgcagtgtaatatttcagttttaccagtctaagcttgatgatcaagcgcttgcaaaagaagtcttggagggcttcgccgcattagctccaatgaaatatgtctccattaacgagatagcccaacttttgagattattattggacaactatcaacaaggccagcatttggcatctactagattatggccatttaaaattttgagaaaaatatttgatagatttttcgtcaatggatcctccaccgaacaagtcaaaagaatcaacgatttgtttattgaaacatttcttcatgttgccaatggtgaaaaagaccctagaaatttactcttgagttttgcacttaataaatctatcacatcttccttgcaaaacgtggagaattttaaagaagacttatttgatgtcttattttgctatttcccaatcactttcaagccaccaaagcatgatccttacaagatctccaaccaagatttaaaaacagctttgagaagtgcaattactgcgacgccattatttgccgaagatgcttatagcaatttgttggacaaactcactgcttcttctccggtagtgaaaaatgatacacttttgacgttattagaatgcgttagaaaattcggcggctcttctatattggaaaattggacgttactttggaacgctttgaaatttgaaattatgcaaaacagcgaaggaaatgaaaacactttattgaatccgtacaataaagaccaacagagtgatgatgtgggccaatatactaactacgatgcttgcttgaaaattattaatttaatggcattgcaattgtacaattttgacaaagtatcctttgaaaagttcttcactcatgtattagatgagttgaaaccaaattttaaatatgaaaaggatttgaagcaaacctgccagattttgtccgctataggtagtgggaatgtcgagatatttaacaaggtcatttcttctactttccccttatttttgatcaatacatctgaagttgccaaacttaagttattgattatgaatttttctttttttgttgactcttacattgatttgtttggaagaacatctaaagaatctttgggaacaccggtgccaaataataaaatggctgaatacaaagacgagatcataatgattttgagcatggccttgacaagaagctccaaggcagaggttaccataaggactttatctgtgattcaattcacaaaaatgattaaaatgaagggctttttaaccccagaggaagtttctttgattattcaatacttcacggaagaaatattaacggataacaacaaaaacatttactatgcttgtttggaagggttaaagacaatcagtgagatatatgaggatttagtttttgaaatatctttgaagaaattattggatttgttacctgattgcttcgaggaaaaaattagagtaaatgatgaggaaaatattcacattgaaacaattttgaagattattcttgatttcaccacttccagacatattttggtcaaagaaagcattacatttttagcgacaaaattgaatagggtagctaaaatttccaaatccagagaatattgctttttacttatttctaccatatattctctttttaataataataatcaaaatgagaacgtgttgaatgaagaagatgctcttgcactcaagaatgccattgagccaaaattatttgagataattactcaggaaagtgccattgtaagtgacaattacaatttgacacttttatctaacgttcttttcttcaccaatttgaaaattccacaggctgcacaccaagaagaattagacagatataacgagcttttcatttctgaaggtaagataagaatcttagacacaccgaatgtattggctatttcttatgctaaaatattatccgcattgaataaaaactgccaattcccccaaaaatttacagtgcttttcggaacggttcaattgctcaaaaaacatgctccaagaatgacggagactgaaaaattaggatacttggaattgttgttggtcttatccaataaattcgtctctgaaaaagatgtgataggattattcgattggaaagacttaagtgtaattaatcttgaagtgatggtttggttgactaaagggttgataatgcaaaactctttagagtcttctgaaattgcaaaaaagtttattgatttattatctaatgaagagattggctctcttgtatccaagcttttcgaagtttttgtcatggatatcagttctttgaagaaatttaaaggtatcagttggaataataacgttaaaatcttgtacaaacaaaaattcttcggtgacatttttcaaacattggtcagcaactataaaaataccgtggacatgaccattaaatgcaattatttaactgcattatccttagtgttgaagcatactccaagccaatctgttggtccttttatcaacgatttattcccgcttttattgcaggctttggatatgcctgatcctgaagtaagggtatccgctttagaaactttgaaggacactacggataaacatcacactttaattactgaacacgtaagcacaatagttccattattattatctctttctcttccgcacaaatataatagtgtcagtgtcaggttaatagccttacagcttttagaaatgattacgactgtagtacctttgaactattgtttgagctatcaggacgatgttttaagcgctttaataccagttttatctgacaaaaaaagaataataagaaagcaatgcgttgacacaagacaggtttattatgaattaggccaaatcccgttcgagtga

SEQ ID NO: 5381 - DNA, 621 bp, Saccharomyces cerevisiae
atgtcatcttcgctgagccaaacatctaaataccaggccacctcggttgttaatggactgctatcaaaccttttgcctggcgttcccaaaatcagagctaataatggcaaaacaagtgtaaacaatgggtcaaaagctcagttaatcgacaggaacttgaaaaagagagtacagttacaaaacagagacgttcacaaaattaaaaaaaaatgcaaactggtcaaaaaaaaaaaagttaagaaacataaattagataaagagcaacttgaacaactggcaaaacaccaggttttgaaaaaacatcaacatgagggcacattaacggaccatgagaggaagtatttgaataagttaatcaaaaggaattctcaaaatttgaggtcgtgggatttagaagaggaagtacgagatgagcttgaagacattcagcaatccatcttgaaggatacagtttccactgcgaacacagacaggagtaaaagaagaaggttcaaaagaaaacaattcaaggaagatatcaaagagagcgattttgttaaagatcatagatatcctggtctgacaccgggtttggcacctgtaggactaagcgacgaggaagactctagtgaagaagattaa

SEQ ID NO: 5382 - DNA, 621 bp, Artificial Sequence
  Description of Artificial Sequence: Synthetic polynucleotide
atgtcttcttctttaagccaaacatctaaataccaggccacctctgttgttaatggattattatctaaccttttgcctggcgttcccaaaatcagagctaataatggcaaaacaagtgtaaacaatgggtctaaagctcagttaatcgacaggaacttgaaaaagagagtacagttacaaaacagagacgttcacaaaattaaaaaaaaatgcaaattggtcaaaaaaaaaaaagttaagaaacataaattagataaagagcaacttgaacaattggcaaaacaccaggttttgaaaaaacatcaacatgagggcacattaacggaccatgagaggaagtatttgaataagttaatcaaaaggaattctcaaaatttgaggagttgggatttagaagaggaagtaagagatgagcttgaagacattcagcaatccatcttgaaggatacagtttccactgcgaacacagacaggagtaaaagaagaaggttcaaaagaaaacaattcaaggaagatatcaaagagagcgattttgttaaagatcatagatatcctggtttaacaccgggtttggcacctgtaggattaagcgacgaggaagactctagtgaagaagattga

SEQ ID NO: 5383 - DNA, 4080 bp, Saccharomyces cerevisiae
atgcttcaggaacaatctgagttgatgagcacggtgatgaataatacacctacaacagttgccgcattggctgcggttgctgcagcctctgaaacaaatggaaagctggggtccgaggaacaacctgaaatcactattccaaagccgaggagtagtgcacagttggagcagctactctaccgctatagggctattcaaaaccatccaaaggaaaacaagttggagatcaaggcaatagaagacacttttaggaatatatcacgtgatcaggatatctacgaaacaaagttggataccttgagaaagagtatagataaaggatttcagtacgatgaggatttattgaataaacacttggttgccttacagttactggagaaagatacagatgtccctgactacttcttagacttaccagacaccaagaacgataacactacggcgatcgaagtagactattctgaaaagaaaccaataaaaatatcagcagatttcaatgcgaaggccaaaagtttgggtttagaatcaaaattttctaacgctacgaagactgcattgggcgatccagataccgaaataaggatttctgcacgtatatccaacagaattaacgagctggaaagattacctgccaatctgggtacatactcactagatgattgtttagagtttattacaaaagatgatttatcgtccagaatggatactttcaaaatcaaagctcttgtggaattgaaaagtttaaagctactaactaaacaaaaatcgattaggcaaaagttaatcaacaatgttgccagccaggcacaccacaatattccatatctacgtgattctcctttcacagcagctgcacaaagatctgttcaaattagaagcaaagttattgtcccacaaaccgttcgtttggcagaagaattagaaaggcaacaactattggaaaaaagaaaaaaggaacgtaatttacatttacaaaaaataaacagcatcattgatttcatcaaagaaaggcagtccgagcaatggtctcgtcaagaacgttgctttcagttcggtagattaggcgcttcattacacaatcaaatggagaaagatgaacagaaaagaatagaaagaactgctaagcaacgtttagctgctttgaagtctaacgatgaggaggcttatttaaagcttttagatcaaactaaggatactagaattacacagttattgaggcagactaattcctttttggattctttgtcggaggctgttagagcacaacaaaacgaagcaaaaattcttcatggtgaggaagtccaaccaattacagatgaagaaagagaaaagactgactattatgaagtcgctcataggatcaaagaaaaaattgataaacaaccttctattcttgttggcggcactttaaaagagtatcaattacgaggtttagaatggatggtgtcgttgtacaataatcatttgaacggtattctagcagatgagatgggtttaggtaaaaccatccaatctatttctctaataacatatctttatgaagttaagaaagacatcggccctttcctagtcattgtacctttatccacaataaccaattggactttagaatttgaaaaatgggctccgagcttaaacactattatatacaaaggtacaccaaatcaaagacactctttacagcatcaaataagggttggaaattttgacgtcttattgacaacatatgagtatattattaaagataaatctcttttatcaaaacatgattgggctcatatgatcattgacgaaggtcatagaatgaaaaatgctcaatcgaagttatcattcacaatttctcattattatcgtacaagaaacagattgattttaacgggtactcctttgcagaacaatctaccagaattatgggcactgttgaactttgttttgcctaaaattttcaattctgcgaagacttttgaagattggtttaatactccatttgccaacaccggtacccaagagaaactagaattaacggaagaagaaactctgttaattattagaagattacataaggtgttaaggccatttttattgcgtcgtttgaaaaaggaagtggaaaaggatttgcctgataaagtggaaaaagttatcaaatgtaaactgtctggtttgcaacaacagttatatcagcaaatgctaaagcataacgcgctatttgttggtgcagggactgagggggctacaaagggtggtattaaaggtttgaacaataagattatgcaattaagaaaaatctgcaaccatccattcgtatttgatgaagtggaaggtgttgtaaacccctcaagaggtaatagtgatttacttttcagagtagcgggcaagtttgaattactggatagagtgctaccgaaattcaaagcctcaggccacagagtgctaatgtttttccaaatgactcaagttatggatattatggaagacttcctaagaatgaaagatttgaagtatatgagattagatggtagcactaagactgaagaaagaacagaaatgctgaatgcatttaatgctccagattcagattatttctgtttccttttgtcaactagagccggtggtttgggtttgaatttacaaactgcagatacggtgatcatctttgatacagattggaatccacaccaagatttacaggcccaagatagagctcacagaattggacaaaagaatgaggttagaattttaagattaattaccactgattccgtagaggaagttattttggaaagagctatgcagaaattggacattgacggcaaggttatccaggcaggtaagtttgataacaaatcaactgcagaagagcaagaagcttttttgagaagattgatcgaaagtgaaacgaacagggatgatgatgacaaagcagaattagatgacgatgagttaaacgatactttggccagaagcgctgatgaaaaaatactatttgataaaattgataaggagagaatgaaccaagaaagagcagatgctaaagcgcaaggcctgagagtccctcctcctagattgattcaattagacgagctacccaaagtattcagagaagacattgaagaacatttcaagaaagaggattctgaaccattgggaaggattagacaaaagaaaagagtttactatgatgacggtctaactgaagaacaatttttggaggctgtagaagatgataatatgtctttagaagatgccattaaaaaaagacgtgaagcacgtgaaagaaggagattacgtcaaaatggtacaaaagagaatgaaatagaaaccctggaaaacacgcctgaagcatccgaaacttcattgattgagaacaatagcttcactgcagctgtggatgaggaaactaatgctgataaagagactacagcttccaggtcaaaacgccggagtagtagaaagaaaaggaccattagcattgttacggcagaagacaaagagaatactcaagaagagagtacatctcaagaaaacgggggcgctaaggtggaagaggaagtaaaaagtagctccgttgaaattataaatggttcagaatccaagaaaaagaaaccgaaactgaccgtcaagatcaaactaaacaaaacaactgtgttggagaataatgatggtaagcgagcagaagaaaagccagagagtaaatcgcccgcgaagaagactgcagccaaaaaaactaaaactaaatccaagtcgcttgggatttttcccacggtggaaaaattggtggaagaaatgcgcgaacagttagatgaggtagactcccatccaaggacgtccatttttgaaaagcttccttcgaaacgcgactatccggactattttaaagtaattgaaaaacccatggccattgatattatattgaaaaactgcaagaatggcacttacaaaactttggaggaggtaaggcaagccttacaaacgatgtttgaaaatgctagattctataatgaagagggatcctgggtttacgttgatgctgacaagttaaatgagtttactgatgaatggttcaaggaacactcttcgtaa

SEQ ID NO: 5384 - DNA, 4080 bp, Artificial Sequence
  Description of Artificial Sequence: Synthetic polynucleotide
atgcttcaggaacaatctgagttgatgagcacggtgatgaataatacacctacaacagttgccgcattggctgcggttgctgcagcctctgaaacaaatggaaagttagggtccgaggaacaacctgaaatcactattccaaagccgaggagtagtgcacagttggagcagttgctctaccgctatagggctattcaaaaccatccaaaggaaaacaagttggagatcaaggcaatagaagacacttttaggaatatatctcgtgatcaggatatctacgaaacaaagttggataccttgagaaagagtatagataaaggatttcagtacgatgaggatttattgaataaacacttggttgccttacagttattggagaaagatacagatgtccctgactacttcttagacttaccagacaccaagaacgataacactacggcgatcgaagtagactattctgaaaagaaaccaataaaaatatctgcagatttcaatgcgaaggccaaaagtttgggtttagaaagtaaattttctaacgctacgaagactgcattgggcgatccagataccgaaataaggatttctgcacgtatatccaacagaattaacgagttagaaagattacctgccaatttgggtacatactctttagatgattgtttagagtttattacaaaagatgatttatcttccagaatggatactttcaaaatcaaagctcttgtggaattgaaaagtttaaagttattaactaaacaaaaatccattaggcaaaagttaatcaacaatgttgccagccaggcacaccacaatattccatatttacgtgattctcctttcacagcagctgcacaaagatctgttcaaattagaagcaaagttattgtcccacaaaccgttcgtttggcagaagaattagaaaggcaacaattattggaaaaaagaaaaaaggaacgtaatttacatttacaaaaaataaacagcatcattgatttcatcaaagaaaggcagtccgagcaatggtctcgtcaagaacgttgctttcagttcggtagattaggcgcttctttacacaatcaaatggagaaagatgaacagaaaagaatagaaagaactgctaagcaacgtttagctgctttgaagtctaacgatgaggaggcttatttaaagcttttagatcaaactaaggatactagaattacacagttattgaggcagactaattcctttttggattctttgagtgaggctgttagagcacaacaaaacgaagcaaaaattcttcatggtgaggaagtccaaccaattacagatgaagaaagagaaaagactgactattatgaagtcgctcataggatcaaagaaaaaattgataaacaaccttctattcttgttggcggcactttaaaagagtatcaattaagaggtttagaatggatggtgtctttgtacaataatcatttgaacggtattttggcagatgagatgggtttaggtaaaaccatccaatctatttctttgataacatatctttatgaagttaagaaagacatcggccctttcttggtcattgtacctttatccacaataaccaattggactttagaatttgaaaaatgggctccgagcttaaacactattatatacaaaggtacaccaaatcaaagacactctttacagcatcaaataagggttggaaattttgacgtcttattgacaacatatgagtatattattaaagataaatctcttttatccaaacatgattgggctcatatgatcattgacgaaggtcatagaatgaaaaatgctcaatccaagttatctttcacaatttctcattattatcgtacaagaaacagattgattttaacgggtactcctttgcagaacaatttaccagaattatgggcattattgaactttgttttgcctaaaattttcaattctgcgaagacttttgaagattggtttaatactccatttgccaacaccggtacccaagagaaattagaattaacggaagaagaaactttattaattattagaagattacataaggtgttaaggccatttttattgcgtcgtttgaaaaaggaagtggaaaaggatttgcctgataaagtggaaaaagttatcaaatgtaaattatctggtttgcaacaacagttatatcagcaaatgttgaagcataacgcgttatttgttggtgcagggactgagggggctacaaagggtggtattaaaggtttgaacaataagattatgcaattaagaaaaatctgcaaccatccattcgtatttgatgaagtggaaggtgttgtaaaccccagtagaggtaatagtgatttacttttcagagtagcgggcaagtttgaattattagatagagtgttgccgaaattcaaagcctctggccacagagtgttgatgtttttccaaatgactcaagttatggatattatggaagacttcttaagaatgaaagatttgaagtatatgagattagatggtagcactaagactgaagaaagaacagaaatgttgaatgcatttaatgctccagattctgattatttctgtttccttttgtctactagagccggtggtttgggtttgaatttacaaactgcagatacggtgatcatctttgatacagattggaatccacaccaagatttacaggcccaagatagagctcacagaattggacaaaagaatgaggttagaattttaagattaattaccactgattccgtagaggaagttattttggaaagagctatgcagaaattggacattgacggcaaggttatccaggcaggtaagtttgataacaaatctactgcagaagagcaagaagcttttttgagaagattgatcgaaagtgaaacgaacagggatgatgatgacaaagcagaattagatgacgatgagttaaacgatactttggccagaagcgctgatgaaaaaatattgtttgataaaattgataaggagagaatgaaccaagaaagagcagatgctaaagcgcaaggcttaagagtccctcctcctagattgattcaattagacgagttgcccaaagtattcagagaagacattgaagaacatttcaagaaagaggattctgaaccattgggaaggattagacaaaagaaaagagtttactatgatgacggtttgactgaagaacaatttttggaggctgtagaagatgataatatgtctttagaagatgccattaaaaaaagacgtgaagcacgtgaaagaaggagattacgtcaaaatggtacaaaagagaatgaaatagaaaccttagaaaacacgcctgaagcatccgaaacttctttgattgagaacaatagcttcactgcagctgtggatgaggaaactaatgctgataaagagactacagcttccaggtccaaacgcaggagtagtagaaagaaaaggaccattagcattgttacggcagaagacaaagagaatactcaagaagagagtacatctcaagaaaacgggggcgctaaggtggaagaggaagtaaaaagtagctccgttgaaattataaatggttctgaatccaagaaaaagaaaccgaaattgaccgtcaagatcaaattgaacaaaacaactgtgttggagaataatgatggtaagagagcagaagaaaagccagagagtaaaagtcccgcgaagaagactgcagccaaaaaaactaaaactaaatccaagtctcttgggatttttcccacggtggaaaaattggtggaagaaatgcgcgaacagttagatgaggtagactcccatccaaggacgtccatttttgaaaagcttccttccaaacgcgactatccggactattttaaagtaattgaaaaacccatggccattgatattatattgaaaaactgcaagaatggcacttacaaaactttggaggaggtaaggcaagccttacaaacgatgtttgaaaatgctagattctataatgaagagggatcctgggtttacgttgatgctgacaagttaaatgagtttactgatgaatggttcaaggaacactcttcttga

SEQ ID NO: 5385 - DNA, 3045 bp, Saccharomyces cerevisiae
atgctaaggttcgtgtcttcgcaaacctgccggtatagttcaagaggactattaaaaacatctttacttaaaaatgcatctactgtcaaaattgtcggaagagggttagccaccactggtacagataattttctatcgacatcaaatgccacctatatcgatgaaatgtaccaagcttggcaaaaagacccatcttcagtccatgtttcatgggacgcatatttcaagaatatgtctaacccaaagattccagctacaaaggcttttcaggctcctcccagtatcagtaactttccccagggtaccgaagcagctcccttagggaccgcaatgactggttcagtagatgagaacgtctccattcatctaaaagtgcaattgctatgtagagcttaccaagttagaggtcatttaaaagcccatatagatcctttagggatctcatttggtagtaataaaaataaccctgttcctccggaattgactctagactactacggctttagcaaacacgatcttgataaagaaatcaacctaggacctggtatcctgccaaggtttgcaagggacgggaaatctaaaatgtctctgaaagagattgtggatcatctagaaaagttatattgttcctcttatggggtacaatacacacatattccatctaagcaaaagtgtgattggttaagagagagaattgagattcctgaaccttaccaatatacagtggaccaaaagagacaaatcttagatagattaacatgggccacttcttttgagtcattcttatctacaaaatttccaaatgataagaggttcggtttagaaggtttggaaagtgttgttccaggtattaaaactttggttgatcgttctgttgaattgggtgtagaagatattgttttgggtatggctcaccgtggtagattgaacgttttatccaatgtggtccgtaaaccaaatgaatctattttttctgaatttaagggttcgagcgctcgcgatgatattgaaggatcgggtgatgtcaagtaccatttgggtatgaactaccaaagaccaactacgtctggtaagtacgtcaatttatcgctggtggcaaatccttctcatttagaatcccaagatccagttgttcttggtagaactagagctttattgcatgccaagaacgatttgaaggaaaaaacaaaggccttaggtgtgttattacatggtgatgctgcttttgctgggcagggtgttgtttatgaaaccatgggtttcttgaccctaccagaatactctactggtggtactattcatgttattacaaacaaccagatcggattcactacggatccaagatttgcaaggtccacaccatatccttccgatttggctaaggccattgatgccccaattttccatgttaacgctaatgacgtggaagctgtgacctttattttcaatttagccgcagaatggagacataagttccacacagatgccataattgatgtcgttggttggagaaaacatggacataatgaaaccgatcagccatcgtttactcaaccattaatgtacaaaaaaattgcaaaacaaaaatctgtcattgacgtctatacggaaaaattgataagtgaaggcacattttctaaaaaagatattgatgagcacaagaaatgggtatggaacttatttgaagatgctttcgaaaaggcaaaggattacgtcccatctcaaagagaatggttaactgctgcctgggaaggattcaaatccccaaaggaattggccactgagatattaccacatgaaccaactaatgttccagagagtactttgaaagaactaggtaaggtactctcttcgtggccagaaggttttgaagtgcacaaaaatctaaagagaattttgaaaaatagaggaaaatctattgagacaggtgaaggcatcgattgggccaccggtgaagcattagcgttcggtacattggttttggatggtcagaacgttagggtttccggtgaagatgtagaaagaggtacattttctcaacgtcatgcagtcttgcatgaccaacaatctgaagccatttacacaccgctaagcactctgaataatgaaaaggcagacttcaccattgcaaattcctcgttatctgagtacggtgtaatgggtttcgaatatggttattcgctaacctccccagattatctagtcatgtgggaggctcaattcggtgactttgcaaatacagcacaggttattattgaccaatttattgccggtggtgaacaaaaatggaagcaacgctctggtttagttttgtctttaccccatggttatgatggccaggggccagaacattcgtctggtagattggaaagattcttgcaactagccaatgaagacccaagatatttcccatctgaagaaaagctacagagacaacatcaggattgtaatttccaggttgtttatccaactacgcctgctaatttattccacattctaaggagacagcaacatcgtcaattccgtaaaccattggcgttattcttttctaaacagctgctgcgtcacccattggccagatcatctctttccgaattcactgaaggcggattccaatggattatcgaagatattgaacatggaaaaagtattggtacgaaagaggaaaccaagagattagttttgctgagtggccaagtgtacactgccctacataaaagacgtgaaagtttgggtgataagaccactgctttcttaaagattgaacagctgcacccattcccatttgctcagctacgtgattcattaaattcttatccaaacttggaagaaattgtttggtgccaggaagagccattgaacatgggttcgtgggcatacacagaaccacgcttacacacaacattaaaagaaacggataaatataaggatttcaaggtcagatactgtggtagaaacccaagtggtgctgttgctgccggtagcaaatcactacatttggccgaagaagatgcctttttgaaagatgttttccaacaatcctaa

SEQ ID NO: 5386 - DNA, 3045 bp, Artificial Sequence
  Description of Artificial Sequence: Synthetic polynucleotide
atgttaaggttcgtgtcttctcaaacctgcagatatagtagtagaggattattaaaaacatctttacttaaaaatgcatctactgtcaaaattgtcggaagagggttagccaccactggtacagataattttttatctacaagtaatgccacctatatcgatgaaatgtaccaagcttggcaaaaagacccatcttctgtccatgtttcctgggacgcatatttcaagaatatgtctaacccaaagattccagctacaaaggcttttcaggctcctcccagtatcagtaactttccccagggtaccgaagcagctcccttagggaccgcaatgactggttctgtagatgagaacgtctccattcatttgaaagtgcaattgttatgtagagcttaccaagttagaggtcatttaaaagcccatatagatcctttagggatctcttttggtagtaataaaaataaccctgttcctccggaattgactttggactactacggctttagcaaacacgatcttgataaagaaatcaacttgggacctggtatcttgccaaggtttgcaagggacgggaaatctaaaatgtctttgaaagagattgtggatcatttggaaaagttatattgttcctcttatggggtacaatacacacatattccatctaagcaaaagtgtgattggttaagagagagaattgagattcctgaaccttaccaatatacagtggaccaaaagagacaaatcttagatagattaacatgggccacttcttttgagagtttcttatctacaaaatttccaaatgataagaggttcggtttagaaggtttggaaagtgttgttccaggtattaaaactttggttgatcgttctgttgaattgggtgtagaagatattgttttgggtatggctcaccgtggtagattgaacgttttatccaatgtggtccgtaaaccaaatgaatctattttttctgaatttaagggttccagcgctcgcgatgatattgaaggatctggtgatgtcaagtaccatttgggtatgaactaccaaagaccaactacgtctggtaagtacgtcaatttatctttggtggcaaatccttctcatttagaatcccaagatccagttgttcttggtagaactagagctttattgcatgccaagaacgatttgaaggaaaaaacaaaggccttaggtgtgttattacatggtgatgctgcttttgctgggcagggtgttgtttatgaaaccatgggtttcttgaccttgccagaatactctactggtggtactattcatgttattacaaacaaccagatcggattcactacggatccaagatttgcaaggtccacaccatatccttccgatttggctaaggccattgatgccccaattttccatgttaacgctaatgacgtggaagctgtgacctttattttcaatttagccgcagaatggagacataagttccacacagatgccataattgatgtcgttggttggagaaaacatggacataatgaaaccgatcagccatcttttactcaaccattaatgtacaaaaaaattgcaaaacaaaaatctgtcattgacgtctatacggaaaaattgataagtgaaggcacattttctaaaaaagatattgatgagcacaagaaatgggtatggaacttatttgaagatgctttcgaaaaggcaaaggattacgtcccatctcaaagagaatggttaactgctgcctgggaaggattcaaatccccaaaggaattggccactgagatattaccacatgaaccaactaatgttccagagagtactttgaaagaattgggtaaggtactctcttcttggccagaaggttttgaagtgcacaaaaatttgaagagaattttgaaaaatagaggaaaatctattgagacaggtgaaggcatcgattgggccaccggtgaagcattagcgttcggtacattggttttggatggtcagaacgttagggtttccggtgaagatgtagaaagaggtacattttctcaacgtcatgcagtcttgcatgaccaacaatctgaagccatttacacaccgttaagcactttgaataatgaaaaggcagacttcaccattgcaaattcctctttatctgagtacggtgtaatgggtttcgaatatggttattctttaacctccccagattatttagtcatgtgggaggctcaattcggtgactttgcaaatacagcacaggttattattgaccaatttattgccggtggtgaacaaaaatggaagcaacgctctggtttagttttgtctttaccccatggttatgatggccaggggccagaacattcttctggtagattggaaagattcttgcaattggccaatgaagacccaagatatttcccatctgaagaaaagttacagagacaacatcaggattgtaatttccaggttgtttatccaactacgcctgctaatttattccacattttaaggagacagcaacatcgtcaattccgtaaaccattggcgttattcttttctaaacagttattacgtcacccattggccagatcttctctttccgaattcactgaaggcggattccaatggattatcgaagatattgaacatggaaaaagtattggtacgaaagaggaaaccaagagattagttttgttaagtggccaagtgtacactgccttgcataaaagacgtgaaagtttgggtgataagaccactgctttcttaaagattgaacagttgcacccattcccatttgctcagttgcgtgattctttaaattcttatccaaacttggaagaaattgtttggtgccaggaagagccattgaacatgggttcttgggcatacacagaaccacgcttacacacaacattaaaagaaacggataaatataaggatttcaaggtcagatactgtggtagaaacccaagtggtgctgttgctgccggtagcaaatctttgcatttggccgaagaagatgcctttttgaaagatgttttccaacaatcctga

SEQ ID NO: 5387 - DNA, 894 bp, Saccharomyces cerevisiae
atgtcggagttacagtcacaacctaaaaagattgccgttgttacaggcgcctcaggtggtattggatatgaggtaacgaaggaattagccagaaatggctatttggtttatgcatgtgcaagaagactagaaccaatggcacaattggccatccaatttggtaacgatagtatcaaaccatataagttggatatttccaagccagaagaaattgtaacattttctggttttttgcgagctaatttacctgatggtaaattagatttattgtacaacaatgccggtcagagttgtacattccctgcattggatgcaacagatgctgcagtagaacaatgctttaaggtcaatgtgtttggtcatatcaacatgtgccgtgaattgtcggagttccttattaaagcgaaaggaaccattgtcttcactggttccttggcaggagttgtgtcattcccctttggtagcatttattccgcttctaaagctgctatccaccaatatgctcgtgggttacatctagagatgaagcccttcaacgtgagagtgattaacgctattactggcggtgtggctactgatatcgctgataaaaggcccttgcctgaaacctcaatatacaacttccctgaaggtagggaagcttttaattcaagaaaaaccatggctaaggacaataagcccatgccagctgatgcgtacgcaaagcaactggttaaagatatcttgagcactagtgaccctgtagatgtttatagaggaacgttcgccaacatcatgcgttttgtcatgatatttgttccttactggctattggaaaaaggactttccaaaaaatttaaattggacaaagttaataatgctttgaagtcgaaacagaagaataaggacgattag

SEQ ID NO: 5388 - DNA, 894 bp, Artificial Sequence
  Description of Artificial Sequence: Synthetic polynucleotide
atgtctgagttacagtctcaacctaaaaagattgccgttgttacaggcgcctctggtggtattggatatgaggtaacgaaggaattagccagaaatggctatttggtttatgcatgtgcaagaagattagaaccaatggcacaattggccatccaatttggtaacgatagtatcaaaccatataagttggatatttccaagccagaagaaattgtaacattttctggttttttgagagctaatttacctgatggtaaattagatttattgtacaacaatgccggtcagagttgtacattccctgcattggatgcaacagatgctgcagtagaacaatgctttaaggtcaatgtgtttggtcatatcaacatgtgccgtgaattgagtgagttccttattaaagcgaaaggaaccattgtcttcactggttccttggcaggagttgtgtctttcccctttggtagcatttattccgcttctaaagctgctatccaccaatatgctcgtgggttacatttagagatgaagcccttcaacgtgagagtgattaacgctattactggcggtgtggctactgatatcgctgataaaaggcccttgcctgaaaccagtatatacaacttccctgaaggtagggaagcttttaattctagaaaaaccatggctaaggacaataagcccatgccagctgatgcgtacgcaaagcaattggttaaagatatcttgagcactagtgaccctgtagatgtttatagaggaacgttcgccaacatcatgcgttttgtcatgatatttgttccttactggttattggaaaaaggactttccaaaaaatttaaattggacaaagttaataatgctttgaagagtaaacagaagaataaggacgattga

SEQ ID NO: 5389 - DNA, 1431 bp, Saccharomyces cerevisiae
atgaaattctcaactgccgttactacgttgattagttctggtgccatcgtgtctgctttaccacacgtggatgttcaccaagaagatgcccaccaacataagagggccgttgcgtacaaatacgtttacgaaactgttgttgtcgattctgatggccacactgtaactcctgctgcttcagaagtcgctactgctgctacctctgctatcattacaacatctgtgttggctccaacctcctccgcagccgctgcggatagctccgcttccattgctgtttcatctgctgccttagccaagaatgagaaaatctctgatgccgctgcatctgccactgcctcaacatctcaaggggcatcctcctcctcctcctcctcctcggcaacttctaccctagaaagcagctctgtttcttcatctagtgaagaagctgctccaacatctactgtcgtgtcaacttcttccgcaacccaatctagtgcttcttctgccactaaatctagtacttcttccacttcaccatctacttctacttctacttccacttcttctacttcctcttcctcttcctcctcctcctcctcttcttcttcttcttctggcagtggtagtatctacggtgatttggccgacttttcaggcccaagtgagaaattccaagacggcactattccatgtgacaaattcccatctggtcaaggtgtcatttctattgactggattggcgagggtggatggtccggtgtggaaaacaccgacacttccactggcggttcatgcaaggaggggtcctactgttcctactcctgccaaccaggtatgtctaagacccaatggccatccgatcaaccatctgacggtagatctgtcgggggtttgttgtgtaaaaatggttatttgtaccgttctaacactgacgcggattacttatgtgaatggggtgtcgaggctgcctatgttgtttctaaactaagcaagggtgtcgccatttgcagaaccgactacccgggcactgaaaacatggttatcccaacctatgttgaagggggtagctctttgccattgaccgttgttgaccaagatacttactttacttgggaaggcaaaaagacatctgctcaatactacgttaataacgccggcgtctcagttgaagatgggtgtatctggggtacttctggatctggtattggtaactgggcaccattaaactttggtgctggctccactggtggagtgacatacttatcattgattcctaacccaaacaacagcgacgcattgaactacaacgtcaagatagttgctgctgatgattcatccaatgtcatcggtgaatgtgtttacgaaaatggtgagttctctggcggtgctgacgggtgtaccgtctctgttacttccggtaaagctcatttcgtcttatacaattaa

SEQ ID NO: 5390 - DNA, 1431 bp, Artificial Sequence
  Description of Artificial Sequence: Synthetic polynucleotide
atgaaattctctactgccgttactacgttgattagttctggtgccatcgtgtctgctttaccacacgtggatgttcaccaagaagatgcccaccaacataagagggccgttgcgtacaaatacgtttacgaaactgttgttgtcgattctgatggccacactgtaactcctgctgcttctgaagtcgctactgctgctacctctgctatcattacaacatctgtgttggctccaacctcctccgcagccgctgcggatagctccgcttccattgctgtttcttctgctgccttagccaagaatgagaaaatctctgatgccgctgcatctgccactgcctctacatctcaaggggcatcctcctcctcctcctcctcctctgcaacttctaccttagaaagcagctctgtttcttcttctagtgaagaagctgctccaacatctactgtcgtgtccacttcttccgcaacccaatctagtgcttcttctgccactaaatctagtacttcttccacttctccatctacttctacttctacttccacttcttctacttcctcttcctcttcctcctcctcctcctcttcttcttcttcttctggcagtggtagtatctacggtgatttggccgacttttctggcccaagtgagaaattccaagacggcactattccatgtgacaaattcccatctggtcaaggtgtcatttctattgactggattggcgagggtggatggtccggtgtggaaaacaccgacacttccactggcggttcttgcaaggaggggtcctactgttcctactcctgccaaccaggtatgtctaagacccaatggccatccgatcaaccatctgacggtagatctgtcgggggtttgttgtgtaaaaatggttatttgtaccgttctaacactgacgcggattacttatgtgaatggggtgtcgaggctgcctatgttgtttctaaattaagcaagggtgtcgccatttgcagaaccgactacccgggcactgaaaacatggttatcccaacctatgttgaagggggtagctctttgccattgaccgttgttgaccaagatacttactttacttgggaaggcaaaaagacatctgctcaatactacgttaataacgccggcgtctctgttgaagatgggtgtatctggggtacttctggatctggtattggtaactgggcaccattaaactttggtgctggctccactggtggagtgacatacttatctttgattcctaacccaaacaacagcgacgcattgaactacaacgtcaagatagttgctgctgatgattcttccaatgtcatcggtgaatgtgtttacgaaaatggtgagttctctggcggtgctgacgggtgtaccgtctctgttacttccggtaaagctcatttcgtcttatacaattga

SEQ ID NO: 5391 - DNA, 1056 bp, Saccharomyces cerevisiae
atgaagcaggagccacatagacaatccgaagaaaaagagaagccgaaaggaccaatggctgttgaacgagagcagcatacctcattatcttctggtacaaccgtgacagctagtacaggagacgagagtaccaacagtagaccagtggaatcatcgcaaacagaaaagtctctatcgcttcgaataagaatattaaaacaacttgggtttgacgatattcaagaactaaatgcatgcgacactggcctagtggagcaatttttaaacgtacgattgataaacgacacaaaagaactagaaaagatacgcgagtcaaatcttgcgaaactaaaccagattattgataaatgtatggaaagtgataaaataagtgattcgacattaaacaagattcttgatatgtccatgaatagagatacaaataatgataacaacaatcatcttacgataccgtctccgataacgacaaagaaacgcaagataaacgcctccgaacttgcaagtccacgaggccatagaagatatagatctgatatacctacagtgtcagaagttgagacaggggtcggataccctcaaatacaccagcaaccaggcgcatatactttacctatgcctgcaaatcagtggatgagcaacccgtatatgcaacctccgcaaccacaagtgcaacagataatgccgcagtatttatatccaccagggatgggaccacaagctcagcttcctacaatgagctcaaactcggagtcccagacaccagtgatgagctcacagtttctttccttgaaccagcatggcctttaccaacaaaatataggtgctcatccggtaatgagtatgggcccacaggcaaatatatacgggcagcagcaccagctgcaacctggtcaggaacgagaccagtcaagaaaaagttttagtcatagaaggtcacaaagtgccaatatttccatggcaaattttaggtcgcccatgcgaaatccccagccggcttcgtcccaaaggcccgtcaattttctcattcatacaccaaaacatcctcctcccacatga

SEQ ID NO: 5392 - DNA, 1056 bp, Artificial Sequence
  Description of Artificial Sequence: Synthetic polynucleotide
atgaagcaggagccacatagacaatccgaagaaaaagagaagccgaaaggaccaatggctgttgaaagagagcagcataccagtttatcttctggtacaaccgtgacagctagtacaggagacgagagtaccaacagtagaccagtggaaagttctcaaacagaaaagtctttatctcttagaataagaatattaaaacaacttgggtttgacgatattcaagaattgaatgcatgcgacactggcttggtggagcaatttttaaacgtaagattgataaacgacacaaaagaattggaaaagatacgcgagagcaatcttgcgaaattgaaccagattattgataaatgtatggaaagtgataaaataagtgattctacattaaacaagattcttgatatgtccatgaatagagatacaaataatgataacaacaatcatcttacgataccgtctccgataacgacaaagaaacgcaagataaacgcctccgaacttgcaagtccaagaggccatagaagatatagatctgatatacctacagtgtctgaagttgagacaggggtcggataccctcaaatacaccagcaaccaggcgcatatactttacctatgcctgcaaatcagtggatgagcaacccgtatatgcaacctccgcaaccacaagtgcaacagataatgccgcagtatttatatccaccagggatgggaccacaagctcagcttcctacaatgagcagtaacagtgagtcccagacaccagtgatgagctctcagtttctttccttgaaccagcatggcctttaccaacaaaatataggtgctcatccggtaatgagtatgggcccacaggcaaatatatacgggcagcagcaccagttacaacctggtcaggaaagagaccagtctagaaaaagttttagtcatagaaggtctcaaagtgccaatatttccatggcaaattttaggtctcccatgagaaatccccagccggcttcttcccaaaggcccgtcaattttctcattcatacaccaaaacatcctcctcccacatga

SEQ ID NO: 5393 - DNA, 1629 bp, Saccharomyces cerevisiae
atggcaggagcaacatcaagtataattcgggaaaatgattttgaggacgagcttgcggagagtatgcagtcatataatagagaaactgcagacaaattggctttgactaggaccgagagtgtaaagccagaaccggagataaccgctccgcctcactcacgcttttcccgttctttcaagacagttttaatagctcagtgcgctttcactgggtttttctccacaatagcaggtgccatctactatccagttctgagcgttatagaaagaaaattcgatattgacgaggaattggtgaatgtcactgttgtagtatattttgtatttcagggtcttgcccccacattcatgggcgggtttgccgattcactgggcaggagaccggtggtgcttgtcgcaatcgtcatttattttggtgcctgcatcggtcttgcttgtgctcaaacgtatgctcagatcattgtgctaagatgtctacaagccgccggtatttcacccgtgattgcgattaacagcggaataatgggagatgttactactagagccgagcgcggcgggtacgttggatatgttgctggatttcaagttctaggttctgcgttcggagcccttatcggtgccggattatcatctagatggggatggagagccatcttttggttcttagcaattggatctggcatttgcttcctagcctcgtttttaattttgccagaaacaaagaggaacatatccgggaatggttctgtcaccccaaaatcatacttaaatagagctcccattcttgttttgccaacagtaagaaaatcattgcatttggataatccagattacgaaacattggaactgcccacgcaactaaatctactggcgcccttcaagattttgaaagcttatgaaatttgtatacttatgctagtcgctggattacaatttgccatgtatactacgcaccttacggcgttatccacagctttgagtaaacaatatcacttgactgttgcaaaggtaggattatgctaccttccctccggtatctgcacattatgtagtattgtcattgctggaagatatttgaattggaattacaggcgcagattaaaatattaccaaaattggttgggcaagaagagatcaaagcttttagaagaacacgacaacgaccttaatttggtgcaacgtatcatagaaaatgatcccaaatacacctttaatatcttcaaggcgaggttgcaacccgcatttgttaccttgcttttaagcagtagcggattttgtgcgtacggatggtgcattactgtcaaagcccctttagcggccgttctttgcatgagtggatttgcgtcgctgttttccaattgcattttgactttttcaacaactctaatagttgatctttttcccacgaagacatctacggctacgggatgtttaaaccttttcagatgcattctatctgctgtgtttatagctgcattgagtaaaatggtagaaaaaatgaaattcggaggtgtttttacatttttgggggctttaacctcctcgtcatcgatcctcttatttattctcttgagaaaaggtaaagaattagcctttaagaggaaaaagcaagaactgggagtaaattaa

SEQ ID NO: 5394 - DNA, 1629 bp, Artificial Sequence
  Description of Artificial Sequence: Synthetic polynucleotide
atggcaggagcaacatctagtataattagagaaaatgattttgaggacgagcttgcggagagtatgcagagttataatagagaaactgcagacaaattggctttgactaggaccgagagtgtaaagccagaaccggagataaccgctccgcctcactctcgcttttcccgttctttcaagacagttttaatagctcagtgcgctttcactgggtttttctccacaatagcaggtgccatctactatccagttttaagcgttatagaaagaaaattcgatattgacgaggaattggtgaatgtcactgttgtagtatattttgtatttcagggtcttgcccccacattcatgggcgggtttgccgattctttaggcaggagaccggtggtgcttgtcgcaatcgtcatttattttggtgcctgcatcggtcttgcttgtgctcaaacgtatgctcagatcattgtgttgagatgtttgcaagccgccggtatttctcccgtgattgcgattaacagcggaataatgggagatgttactactagagccgagcgcggcgggtacgttggatatgttgctggatttcaagttttaggttctgcgttcggagcccttatcggtgccggattatcttctagatggggatggagagccatcttttggttcttagcaattggatctggcatttgcttcttggcctcttttttaattttgccagaaacaaagaggaacatatccgggaatggttctgtcaccccaaaatcttacttaaatagagctcccattcttgttttgccaacagtaagaaaatctttgcatttggataatccagattacgaaacattggaattgcccacgcaattgaatttattggcgcccttcaagattttgaaagcttatgaaatttgtatacttatgcttgtcgctggattacaatttgccatgtatactacgcaccttacggcgttatccacagctttgagtaaacaatatcacttgactgttgcaaaggtaggattatgctaccttccctccggtatctgcacattatgtagtattgtcattgctggaagatatttgaattggaattacaggcgcagattaaaatattaccaaaattggttgggcaagaagagatccaagcttttagaagaacacgacaacgaccttaatttggtgcaacgtatcatagaaaatgatcccaaatacacctttaatatcttcaaggcgaggttgcaacccgcatttgttaccttgcttttaagcagtagcggattttgtgcgtacggatggtgcattactgtcaaagcccctttagcggccgttctttgcatgagtggatttgcgtctttattttccaattgcattttgactttttctacaactttgatagttgatctttttcccacgaagacatctacggctacgggatgtttaaaccttttcagatgcattttatctgctgtgtttatagctgcattgagtaaaatggtagaaaaaatgaaattcggaggtgtttttacatttttgggggctttaacctcctcttcttctatcctcttatttattctcttgagaaaaggtaaagaattagcctttaagaggaaaaagcaagaattaggagtaaattga

SEQ ID NO: 5395 - DNA, 1692 bp, Saccharomyces cerevisiae
atgaccaaacaacaaacttctgtaatgcgtaacgcatctatagccaaggaagaacgtgaaggatctgataataataatgtggacagatccagctcagatgccatcagtgacaacgacgcagaaagatctaattctcattctgaaatagataacgaatcaaattttgatatggtgccttattcaaggttcagccataagcaaaaaatgcttcttgtcgttcagtgtgccttcacaggctttttttcaaccgtggcagggtctatctactatccagtgcttactattattgagaggaaatttaacatcacagaagagttagctaatgtcactattgtggtttattttattttccaaggggtggctccttcaattatgggtggtttagctgatacatttggaaggcggcctattgtattatgggcaatcttagcctacttctgtgcctgcatcggactggcatgtgcacataattacgcccaaatcctggctttaaggtgtttacaggcagcaggtatttctcctgttattgcaataaatagcggaataatgggagatgtaacgacaaaagtagagaggggtggatatgttggattggttgcagggttccaagttgttggaactgcattcggtgcattgattggtgccggattatcctcgaaatggggttggagggcaattttttggtttttggctattggttccggaatttgtctagttttttcaaccttattgatgccagagacaaaaagaactttggtgggaaacggctccgtaacaccaaggtcatttttgaataggtctttgatattgcatgttggttccgtaaaaaaaacattacatttagacgatcctgaccctgagaccttagaaccacgtactagcgtggattttttagcacctttaaaaattttgcacatacgagaaatagacattttattgtccattgccggcctgcaattttccacgtggaccactcatcaaacagccttaacaattgtattgagtaaaaagtacaatctatctgttgcaaaaataggcctgtgctttttacctgcaggaatctcgacactgacaagtattatctctgctggtcggtacttaaattggagctacagaacaagaaaggttaaatacaacagatggattaaagaacaagaattacagctgatggagaaatataaaggtgataaaaacaaggtagcagaacttattcactctaattctcattatgcattcaatttagtggaggcaaggttgcatccagcatttgtgacacttcttctcagtagcattggctttactgcctttggatggtgtatttcggtgaaaacaccgcttgctgctgtattatgcacaagtgcatttgcaagtttattttcaaactgtattttgaccttctctactactttgatagtagatctctttccgtctaaggcttctaccgcaacaggttgcttaaatttatttagatgtctcctatccgcaattttcattgcagcactgaccaagatggtcgagaagatgagatatggaggtgtttttacgtttttgagtgctataacttcatcttcatcgcttttattattctatctcctgaagaatgggaaacaactatcgttcgataggattagggcaaatgataagtcggctggaaggtcagttggtaaaaattcagaaaaagtttcgacgtga

SEQ ID NO: 5396 - DNA, 1692 bp, Artificial Sequence
  Description of Artificial Sequence: Synthetic polynucleotide
atgaccaaacaacaaacttctgtaatgcgtaacgcatctatagccaaggaagaacgtgaaggatctgataataataatgtggacagatccagcagtgatgccatcagtgacaacgacgcagaaagatctaattctcattctgaaatagataacgaaagtaattttgatatggtgccttattctaggttcagccataagcaaaaaatgcttcttgtcgttcagtgtgccttcacaggctttttttccaccgtggcagggtctatctactatccagtgcttactattattgagaggaaatttaacatcacagaagagttagctaatgtcactattgtggtttattttattttccaaggggtggctccttctattatgggtggtttagctgatacatttggaaggagacctattgtattatgggcaatcttagcctacttctgtgcctgcatcggattagcatgtgcacataattacgcccaaatcttggctttaaggtgtttacaggcagcaggtatttctcctgttattgcaataaatagcggaataatgggagatgtaacgacaaaagtagagaggggtggatatgttggattggttgcagggttccaagttgttggaactgcattcggtgcattgattggtgccggattatcctctaaatggggttggagggcaattttttggtttttggctattggttccggaatttgtttggttttttccaccttattgatgccagagacaaaaagaactttggtgggaaacggctccgtaacaccaaggtcttttttgaataggtctttgatattgcatgttggttccgtaaaaaaaacattacatttagacgatcctgaccctgagaccttagaaccacgtactagcgtggattttttagcacctttaaaaattttgcacataagagaaatagacattttattgtccattgccggcttacaattttccacgtggaccactcatcaaacagccttaacaattgtattgagtaaaaagtacaatttatctgttgcaaaaataggcttatgctttttacctgcaggaatcagtacattaacaagtattatctctgctggtagatacttaaattggagctacagaacaagaaaggttaaatacaacagatggattaaagaacaagaattacagttgatggagaaatataaaggtgataaaaacaaggtagcagaacttattcactctaattctcattatgcattcaatttagtggaggcaaggttgcatccagcatttgtgacacttcttctcagtagcattggctttactgcctttggatggtgtatttctgtgaaaacaccgcttgctgctgtattatgcacaagtgcatttgcaagtttattttccaactgtattttgaccttctctactactttgatagtagatctctttccgtctaaggcttctaccgcaacaggttgcttaaatttatttagatgtctcttatccgcaattttcattgcagcattgaccaagatggtcgagaagatgagatatggaggtgtttttacgtttttgagtgctataacttcttcttcttctcttttattattctatctcttgaagaatgggaaacaattatctttcgataggattagggcaaatgataagtctgctggaaggtctgttggtaaaaattctgaaaaagtttccacgtga

SEQ ID NO: 5397 - DNA, 1224 bp, Saccharomyces cerevisiae
atgtacttggaatatcttcaaccgaagttgaacctaatggatgagtctagcactataagcaaaaatttccctgattattcaccaaatttaaacacacccattacttcaaattttaatgaagaaacgggttcggactgctctttagttactccaagaataatttccagttcaaattcgaattcgaactccaattctaattcgaactccaactccaactcaggctctattgacgaaaatgagctaaacaactctaattcatcctcctcgtctgcaagacagataaggaaaaaatggaaagagcctgaggatatagcattcattactacaataatgaataattctcaattactaacattcgtagaatatttcaagcctatgaagaatttttggaaaaaaatttcaaaaatcctattccaacaatatgggtacgagagaaactctcgtcaatgtcatgatagatttaaagtcttatacacaaagtctttgaaagtgcatccatcaaagaaatccaagcaaaagaaaaaaaaatcaaaacaagaggcaggctcaaacttaaattttgatccgtcaaaattatctagaatgcagtatttgctagtgcagttacaaaacacttttagttttgtaaacggaaacattatactcaagtcgcaaaaaacattgaagccgaacaagaatggtactaatgataatattaataaccattattataataattgtaacaataacaataataatattaacaatagtaacaatagcaacaataataatagcaataatattaataggaatagtaatcatagtactaatgtttttagtacaccagagcatattcagtcaagtatcaacctcgataaattagaatctttgccagctttggataccaaaggagaaccatccttcattagcccggctcaattttcccttttgtcatcagcaccggcagacaatctaatcctgcaaactccaccatcgccatttttccagcaaacaatgcctatacagctaccgcgcgatgcacaacaagaacaaatttccccagttttctctacagatgtcatatacatgtggcaaacaatgtttaacactattgaaaatttaaaggaacaagtaaactgcttaaaaaatgaagttaagcaattaaaccataaattttaccaacaaaataaaccgttgcataatatgtcaacttcagactcagaaaattttatgcaacaacattaa

SEQ ID NO: 5398 - DNA, 1224 bp, Artificial Sequence
  Description of Artificial Sequence: Synthetic polynucleotide
atgtacttggaatatcttcaaccgaagttgaacttgatggatgagtctagcactataagcaaaaatttccctgattattctccaaatttaaacacacccattacttccaattttaatgaagaaacgggttctgactgctctttagttactccaagaataatttccagtagtaatagtaatagcaactccaattctaatagcaactccaactccaacagtggctctattgacgaaaatgagttgaacaactctaattcttcctcctcttctgcaagacagataaggaaaaaatggaaagagcctgaggatatagcattcattactacaataatgaataattctcaattattaacattcgtagaatatttcaagcctatgaagaatttttggaaaaaaatttccaaaatcttattccaacaatatgggtacgagagaaactctcgtcaatgtcatgatagatttaaagtcttatacacaaagtctttgaaagtgcatccatctaagaaatccaagcaaaagaaaaaaaaatctaaacaagaggcaggctctaacttaaattttgatccgtccaaattatctagaatgcagtatttgttggtgcagttacaaaacacttttagttttgtaaacggaaacattatactcaagtctcaaaaaacattgaagccgaacaagaatggtactaatgataatattaataaccattattataataattgtaacaataacaataataatattaacaatagtaacaatagcaacaataataatagcaataatattaataggaatagtaatcatagtactaatgtttttagtacaccagagcatattcagagcagtatcaacctcgataaattagaatctttgccagctttggataccaaaggagaaccatccttcattagcccggctcaattttcccttttgagttctgcaccggcagacaatttgatcttgcaaactccaccatctccatttttccagcaaacaatgcctatacagttaccgcgcgatgcacaacaagaacaaatttccccagttttctctacagatgtcatatacatgtggcaaacaatgtttaacactattgaaaatttaaaggaacaagtaaactgcttaaaaaatgaagttaagcaattaaaccataaattttaccaacaaaataaaccgttgcataatatgtctacttctgactctgaaaattttatgcaacaacattga

SEQ ID NO: 5399 - DNA, 696 bp, Saccharomyces cerevisiae
atgtcatttctatgtgggtcagcttcaacgtcaaataaaccgatcgaaagaaagatcgttattttgggcgacggtgcctgtggtaaaacttcgttgctgaatgttttcaccagaggttattttcccgaagtttatgagcctactgtttttgaaaactatatccatgatattttcgttgacagtaaacatatcacgctatcgttgtgggatactgcgggccaagaggaatttgacaggttacgatccttgtcttattcagatacgcaatgtataatgttatgtttcagtattgattcacgcgattctttagaaaatgtccaaaataaatgggtgggtgaaatcactgatcattgtgaaggcgtcaagttagtcttagttgcactaaagtgtgacttaagaaacaatgaaaatgaatctaacgcaatcacaccgaacaatatccaacaggataacagcgtttctaacgacaacggaaataacataaatagcacctcaaacggcaaaaacctgataagttatgaagaaggtctagctatggctaaaaagatcggtgcgctacgttatttggaatgtagcgctaagctgaataaaggtgtcaacgaagctttcacagaagccgcaagagttgctttaaccgcgggcccagtagcaaccgaagtgaaaagtgacagtggatccagctgtaccattatgtaa

SEQ ID NO: 5400 - DNA, 696 bp, Artificial Sequence
  Description of Artificial Sequence: Synthetic polynucleotide
atgagttttttatgtgggtctgcttccacgtccaataaaccgatcgaaagaaagatcgttattttgggcgacggtgcctgtggtaaaacttctttgttgaatgttttcaccagaggttattttcccgaagtttatgagcctactgtttttgaaaactatatccatgatattttcgttgacagtaaacatatcacgttatctttgtgggatactgcgggccaagaggaatttgacaggttaagatccttgtcttattctgatacgcaatgtataatgttatgtttcagtattgattctcgcgattctttagaaaatgtccaaaataaatgggtgggtgaaatcactgatcattgtgaaggcgtcaagttagtcttagttgcattgaagtgtgacttaagaaacaatgaaaatgaatctaacgcaatcacaccgaacaatatccaacaggataacagcgtttctaacgacaacggaaataacataaatagcaccagtaacggcaaaaacttgataagttatgaagaaggtttagctatggctaaaaagatcggtgcgttgcgttatttggaatgtagcgctaagttgaataaaggtgtcaacgaagctttcacagaagccgcaagagttgctttaaccgcgggcccagtagcaaccgaagtgaaaagtgacagtggatccagctgtaccattatgtga

SEQ ID NO: 5401 - DNA, 957 bp, Saccharomyces cerevisiae
atgacagtaatcaccattgccaagagaggccttccaaaattaaccacttccacttcttcgacaacaactgccagttcaagtagtacgataacatctgttgcttcttcttcatcttctttaccacttttgtccaactctacatcctcttctattataccaagtattactcctccctctagaaatggtaatccttatattttggattccggggatatgcctaatggaacagttttcattgtagtggggggaatcgcgggagtgatttttttggcaatattgctatggtgggtaataacaacttattcttcgcataggttgaccagaagtgttcaggactacgaatcaaagatgttttccacacaacatacccagttttacggcgattccccatatatggattatcccgccaaagaaaatttccaagatcaggtccatatcagcgagtccgatattagtcccggaaataaggatgaatcggtgaaagatgcacttgtatctcatactaataatgaaaaaccattcttaagtaatttcgaaaggccgctattctctcttgcatccgaatccaacagaaattcacttttcatttcaccaacaggtgatatcttatacaaaacaaggctatctaaactttaccaagaaagccctagattattacagaaacctgtgattatgacaagtgataatgtatctacaaattctctggtgtctacaatctcttcatcatccgcatcgtcgctcgataacggtaatgaaaaggaggtgggtgaagacataaggaaacccgcaaaaattgcatcttcaccaagtcgaaagctgcttaattcaccagaaagtgatggtagcgtaaatcgtaaccatagtaagggtaatttgttggtcgtacagtccaaaagaaaacctacaccttcgacttatctcgagcacatgctggaggggaaagaacaggatgagtaa

SEQ ID NO: 5402 - DNA, 957 bp, Artificial Sequence
  Description of Artificial Sequence: Synthetic polynucleotide
atgacagtaatcaccattgccaagagaggccttccaaaattaaccacttccacttcttctacaacaactgccagtagtagtagtacgataacatctgttgcttcttcttcttcttctttaccacttttgtccaactctacatcctcttctattataccaagtattactcctccctctagaaatggtaatccttatattttggattccggggatatgcctaatggaacagttttcattgtagtggggggaatcgcgggagtgatttttttggcaatattgttatggtgggtaataacaacttattcttctcataggttgaccagaagtgttcaggactacgaatccaagatgttttccacacaacatacccagttttacggcgattccccatatatggattatcccgccaaagaaaatttccaagatcaggtccatatcagcgagtccgatattagtcccggaaataaggatgaatctgtgaaagatgcacttgtatctcatactaataatgaaaaaccattcttaagtaatttcgaaaggccgcttttctctcttgcatccgaatccaacagaaattctcttttcatttctccaacaggtgatatcttatacaaaacaaggttatctaaactttaccaagaaagccctagattattacagaaacctgtgattatgacaagtgataatgtatctacaaattctttggtgtctacaatctcttcttcttccgcatcttctctcgataacggtaatgaaaaggaggtgggtgaagacataaggaaacccgcaaaaattgcatcttctccaagtaggaagcttcttaattctccagaaagtgatggtagcgtaaatcgtaaccatagtaagggtaatttgttggtcgtacagtccaaaagaaaacctacaccttccacttatctcgagcacatgttagaggggaaagaacaggatgagtga

SEQ ID NO: 5403 - DNA, 1158 bp, Saccharomyces cerevisiae
atggtttttgatttgaaaagaattgttagaccaaaaatttataacttggaaccttatcgctgtgcaagagatgatttcaccgagggtatattgctagacgccaatgaaaatgcccatggacctactccagttgaattgagcaagaccaatttacatcgttacccggatcctcaccaattggaattcaagaccgcaatgacgaaatacaggaacaaaacaagcagttatgccaatgacccagaggtaaaacctttaactgctgacaatctgtgcctaggtgtgggatctgatgagagtattgatgctattattagagcatgctgtgttcccgggaaagaaaagattctggttcttccaccaacatattctatgtactctgtttgtgcaaacattaatgatatagaagtcgtccaatgtcctttaactgtttccgacggttcttttcaaatggataccgaagctgtattaaccattttgaaaaacgactcgctaattaagttgatgttcgttacttcaccaggtaatccaaccggagccaaaattaagaccagtttaatcgaaaaggtcttacagaattgggacaatgggttagtcgttgttgatgaagcttacgtagatttttgtggtggctctacagctccactagtcaccaagtatcctaacttggttactttgcaaactctatccaagtcattcggtttagccgggattaggttgggtatgacatatgcaacagcagagttggccagaattttaaatgcaatgaaggcgccttataatatttcctccctagcctctgaatatgcactaaaagctgttcaagacagtaatctaaagaagatggaagccacttcgaaaataatcaatgaagagaaaatgcgcctcttaaaggaattaactgctttggattacgttgatgaccaatatgttggtggattagatgctaattttcttttaatacggatcaacgggggtgacaatgtcttggcaaagaagttatattaccaattggctactcaatctggggttgtcgtcagatttagaggtaacgaattaggctgttccggatgtttgagaattaccgttggaacccatgaggagaacacacatttgataaagtacttcaaggagacgttatataagctggccaatgaataa

SEQ ID NO: 5404 - DNA, 1158 bp, Artificial Sequence
  Description of Artificial Sequence: Synthetic polynucleotide
atggtttttgatttgaaaagaattgttagaccaaaaatttataacttggaaccttatcgctgtgcaagagatgatttcaccgagggtatattgttggacgccaatgaaaatgcccatggacctactccagttgaattgagcaagaccaatttacatcgttacccggatcctcaccaattggaattcaagaccgcaatgacgaaatacaggaacaaaacaagcagttatgccaatgacccagaggtaaaacctttaactgctgacaatttatgcttgggtgtgggatctgatgagagtattgatgctattattagagcatgctgtgttcccgggaaagaaaagattttggttcttccaccaacatattctatgtactctgtttgtgcaaacattaatgatatagaagtcgtccaatgtcctttaactgtttccgacggttcttttcaaatggataccgaagctgtattaaccattttgaaaaacgactctttgattaagttgatgttcgttacttctccaggtaatccaaccggagccaaaattaagaccagtttaatcgaaaaggtcttacagaattgggacaatgggttagtcgttgttgatgaagcttacgtagatttttgtggtggctctacagctccattagtcaccaagtatcctaacttggttactttgcaaactttatccaagagtttcggtttagccgggattaggttgggtatgacatatgcaacagcagagttggccagaattttaaatgcaatgaaggcgccttataatatttcctccttggcctctgaatatgcattgaaagctgttcaagacagtaatttgaagaagatggaagccacttctaaaataatcaatgaagagaaaatgcgcctcttaaaggaattaactgctttggattacgttgatgaccaatatgttggtggattagatgctaattttcttttaataagaatcaacgggggtgacaatgtcttggcaaagaagttatattaccaattggctactcaatctggggttgtcgtcagatttagaggtaacgaattaggctgttccggatgtttgagaattaccgttggaacccatgaggagaacacacatttgataaagtacttcaaggagacgttatataagttggccaatgaatga

SEQ ID NO: 5405 - DNA, 4383 bp, Saccharomyces cerevisiae
atgtcttctttgaaggatgaagtacccactgagacttccgaagacttcggttttaagtttttaggtcaaaaacaaattctaccttccttcaatgaaaaactgccatttgcatctctacaaaatctcgatatttcaaacagtaagtctttattcgttgctgcctctggtagtaaggcggtggtcggcgaattacaattactgagagatcatatcacctccgactctactccgttaacgttcaagtgggagaaagaaatcccagatgtaatatttgtgtgctttcatggtgatcaggttttggtttcaaccagaaatgcattatattcgttagacttggaggaattgagtgaatttcgaacggtcacttcttttgagaagccagttttccaattgaagaacgttaataacactttagtaattttaaattcagtcaatgatttatcagcactggatttaagaacaaaatcgactaagcaactggcacaaaacgttacctcttttgatgtcacaaattcgcagttagcagttctactaaaagatagaagttttcaaagttttgcatggcgaaatggcgaaatggaaaaacaatttgagttctctctaccgtcagaattagaagagcttccagtagaagaatattcccctttgagtgttaccattctctctccacaggattttttggcggttttcggtaatgttatatcagagaccgatgacgaagtttcatacgatcaaaaaatgtacattataaagcacatagacggcagcgcctcatttcaagaaacttttgatattacacctccattcgggcaaatagtaaggttcccatatatgtacaaagttaccttgtctggtttaattgaacctgatgcaaacgtaaatgtgctagcatcatcatgttcaagtgaagtaagtatatgggactcgaaacaagttattgaaccttcccaggattctgaacgagcagtattgcccatcagtgaggaaacagataaggacacaaatccaataggtgtggcagttgacgtcgttacttcaggcactattctagaaccttgttccggtgttgatacgatagagcgattgccgctcgtttacatattgaataacgaaggtagcttacagatagtcgggttgtttcatgtggcagcaatcaaaagcggccattatagcataaatctggaatctttagaacatgagaaatctctctctcctacatcagaaaaaattcctattgctggacaggagcaggaagaaaaaaagaaaaataatgaatcaagtaaggctttatcagagaatcctttcacatcagcaaatacatcaggcttcacttttcttaaaacacaaccagccgctgccaatagcctgcagtctcaaagttcttcaacctttggtgctccctcatttggatcatccgcatttaaaattgacttgccatcagtctcatctaccagtactggtgtagcgtccagtgaacaagacgcaacagatcctgcttctgctaagccagtattcggcaaacccgcgttcggagctattgccaaagaaccgtcaacatcagaatatgcctttggcaagccatcttttggtgctccctcctttggctctggaaagtcatctgttgaatcgcctgcctccggatctgcctttggtaagccctcttttggtactccttcctttggctctggaaattcatctgttgagccgcctgcctccggatctgcatttggtaagccctcttttggtactccttcctttggctctggaaattcatctgctgagccgcctgcttccggatctgcctttggtaagccctcttttggtacatctgcattcggaactgcatcaagtaacgaaactaactctggatccatatttggaaaggctgcatttggttcatcatcttttgcacccgccaacaatgaacttttcggatcaaactttactatttcaaaacctacagttgacagcccaaaggaggtagattcaacgtcacctttcccatcttctggcgatcaaagtgaagatgagtctaagagtgatgtagactcttcttcgacaccttttggtacgaaacctaacacctctacgaaaccaaagaccaatgcctttgattttgggagttcttcctttggatctggattttcaaaggctctggaatctgttggttccgatacaacttttaaattcggtactcaggcttcacctttctcttcacagttaggaaacaaatcaccattcagttccttcacaaaagatgatactgaaaatggatctttaagtaagggctctaccagtgaaatcaatgacgataatgaagaacacgaaagcaatggtcccaacgtaagcggtaatgatttgacagattctacggttgagcaaacatcttctactagattaccggaaactccctcggatgaagatggtgaagttgtcgaggaggaagcgcaaaaatcccccataggcaagctaactgaaactataaaaaaaagtgccaatattgacatggctggtttaaaaaatcctgtatttggaaatcatgtcaaagcaaaatccgaatcgccgttttcagcatttgcaacaaatattaccaaaccaagctctacaacacctgctttttcgtttggtaactccacaatgaataaaagtaatacatctacggtttcaccaatggaagaagctgatactaaagaaactagtgaaaagggccccataaccttgaagagtgtggagaatccgtttctaccagcgaaagaagaaagaactggagaaagttctaaaaaggatcataacgatgacccaaaagatggttatgtatcaggaagtgaaatatctgtaaggacttctgaaagtgcttttgataccacagcaaacgaagaaattccaaagtcacaggacgtgaacaatcatgaaaaaagcgaaacagacccaaaatatagtcaacatgctgtggttgatcacgataacaagtctaaagaaatgaatgaaacttcgaagaataatgaaaggagcggtcaaccaaatcatggtgtccaaggagatggaatagcattgaaaaaagacaatgaaaaagagaattttgattcaaatatggcaataaagcaattcgaagaccaccaatcttcagaagaggacgcgagcgaaaaagacagtagacaaagcagtgaagttaaagaatcagatgataacatgtcactcaacagtgaccgggatgaaagtatatctgagtcctacgataaactggaagatattaatactgatgagctacctcatggtggagaagcttttaaagcacgtgaagtgagcgcttccgctgattttgatgtacaaacttcattagaagacaattatgctgaatctggcatacagacagacctttcagaaagttccaaggaaaatgaagttcaaacggatgccatacccgtgaaacacaacagtacacaaactgttaagaaggaagcagtcgacaatggtctgcaaactgagcctgttgaaacatgtaatttttctgttcaaacatttgaaggtgacgaaaattatttagcagagcaatgcaaaccaaagcaattgaaagaatattacacaagtgcaaaagtatcaaatattcctttcgtttcacaaaattctacgttaaggttgattgagagtacatttcagacggtcgaagctgagtttactgttctgatggaaaacatccggaatatggatactttttttactgatcaatcgagcatccctttggtgaagcgtacagtgcggtctatcaataatctgtatacttggagaataccagaggctgaaattctattaaatattcagaataatatcaagtgtgaacaaatgcaaataacaaatgctaacattcaagacctgaaggaaaaagttacagattatgtcaggaaagatattgcacaaataactgaagatgtagccaatgcaaaagaggagtatctgtttttaatgcattttgatgatgcttcgagtggatacgttaaagatctcagcacgcatcaatttagaatgcaaaagacattacgtcaaaagctattcgatgtgtccgccaaaattaatcatactgaagagttgctgaacattttaaaattgttcactgtaaagaataagagattggacgataatccattagtggcaaaactagctaaagaatctcttgcacgtgacggtttactaaaagaaatcaaattattgcgtgagcaagtgagtaggttacaattggaggagaaaggtaaaaaggcttcgtcgttcgatgcatcctcttcaataacaaaggacatgaaaggatttaaagtagtagaagttgggttggccatgaatacgaaaaagcaaattggtgatttcttcaaaaatttgaacatggcaaaatag

SEQ ID NO: 5406 - DNA, 4383 bp, Artificial Sequence
  Description of Artificial Sequence: Synthetic polynucleotide
atgtcttctttgaaggatgaagtacccactgagacttccgaagacttcggttttaagtttttaggtcaaaaacaaattttaccttccttcaatgaaaaattaccatttgcatctttacaaaatctcgatatttccaacagtaagtctttattcgttgctgcctctggtagtaaggcggtggtcggcgaattacaattattaagagatcatatcacctccgactctactccgttaacgttcaagtgggagaaagaaatcccagatgtaatatttgtgtgctttcatggtgatcaggttttggtttctaccagaaatgcattatattctttagacttggaggaattgagtgaatttagaacggtcacttcttttgagaagccagttttccaattgaagaacgttaataacactttagtaattttaaattctgtcaatgatttaagtgcattggatttaagaacaaaatctactaagcaattggcacaaaacgttacctcttttgatgtcacaaattctcagttagcagttttgttgaaagatagaagttttcaaagttttgcatggagaaatggcgaaatggaaaaacaatttgagttctctttaccgagtgaattagaagagcttccagtagaagaatattcccctttgagtgttaccattctctctccacaggattttttggcggttttcggtaatgttatatctgagaccgatgacgaagtttcttacgatcaaaaaatgtacattataaagcacatagacggcagcgcctcttttcaagaaacttttgatattacacctccattcgggcaaatagtaaggttcccatatatgtacaaagttaccttgtctggtttaattgaacctgatgcaaacgtaaatgtgttggcatcttcttgtagtagtgaagtaagtatatgggactctaaacaagttattgaaccttcccaggattctgaaagagcagtattgcccatcagtgaggaaacagataaggacacaaatccaataggtgtggcagttgacgtcgttacttctggcactattttggaaccttgttccggtgttgatacgatagagagattgccgctcgtttacatattgaataacgaaggtagcttacagatagtcgggttgtttcatgtggcagcaatcaaaagcggccattatagcataaatttggaatctttagaacatgagaaatctctctctcctacaagtgaaaaaattcctattgctggacaggagcaggaagaaaaaaagaaaaataatgaaagtagtaaggctttatctgagaatcctttcacaagtgcaaatacaagtggcttcacttttcttaaaacacaaccagccgctgccaatagcttacagtctcaaagttcttccacctttggtgctcccagttttggatcttccgcatttaaaattgacttgccaagtgtcagctctaccagtactggtgtagcgtccagtgaacaagacgcaacagatcctgcttctgctaagccagtattcggcaaacccgcgttcggagctattgccaaagaaccgtccacaagtgaatatgcctttggcaagccatcttttggtgctccctcctttggctctggaaagtcttctgttgaatctcctgcctccggatctgcctttggtaagccctcttttggtactccttcctttggctctggaaattcttctgttgagccgcctgcctccggatctgcatttggtaagccctcttttggtactccttcctttggctctggaaattcttctgctgagccgcctgcttccggatctgcctttggtaagccctcttttggtacatctgcattcggaactgcaagtagtaacgaaactaactctggatccatatttggaaaggctgcatttggttcttcttcttttgcacccgccaacaatgaacttttcggaagtaactttactatttccaaacctacagttgacagcccaaaggaggtagattctacgtctcctttcccatcttctggcgatcaaagtgaagatgagtctaagagtgatgtagactcttcttctacaccttttggtacgaaacctaacacctctacgaaaccaaagaccaatgcctttgattttgggagttcttcctttggatctggattttccaaggctttggaatctgttggttccgatacaacttttaaattcggtactcaggcttcccctttctcttctcagttaggaaacaaatctccattcagttccttcacaaaagatgatactgaaaatggatctttaagtaagggctctaccagtgaaatcaatgacgataatgaagaacacgaaagcaatggtcccaacgtaagcggtaatgatttgacagattctacggttgagcaaacatcttctactagattaccggaaactccctctgatgaagatggtgaagttgtcgaggaggaagcgcaaaaatcccccataggcaagttgactgaaactataaaaaaaagtgccaatattgacatggctggtttaaaaaatcctgtatttggaaatcatgtcaaagcaaaatccgaatctccgttttctgcatttgcaacaaatattaccaaaccaagctctacaacacctgctttttcttttggtaactccacaatgaataaaagtaatacatctacggtttctccaatggaagaagctgatactaaagaaactagtgaaaagggccccataaccttgaagagtgtggagaatccgtttttaccagcgaaagaagaaagaactggagaaagttctaaaaaggatcataacgatgacccaaaagatggttatgtatctggaagtgaaatatctgtaaggacttctgaaagtgcttttgataccacagcaaacgaagaaattccaaagtctcaggacgtgaacaatcatgaaaaaagcgaaacagacccaaaatatagtcaacatgctgtggttgatcacgataacaagtctaaagaaatgaatgaaacttctaagaataatgaaaggagcggtcaaccaaatcatggtgtccaaggagatggaatagcattgaaaaaagacaatgaaaaagagaattttgattctaatatggcaataaagcaattcgaagaccaccaatcttctgaagaggacgcgagcgaaaaagacagtagacaaagcagtgaagttaaagaaagtgatgataacatgagtctcaacagtgacagagatgaaagtatatctgagtcctacgataaattagaagatattaatactgatgagcttcctcatggtggagaagcttttaaagcacgtgaagtgagcgcttccgctgattttgatgtacaaacttctttagaagacaattatgctgaatctggcatacagacagacctttctgaaagttccaaggaaaatgaagttcaaacggatgccatacccgtgaaacacaacagtacacaaactgttaagaaggaagcagtcgacaatggtttacaaactgagcctgttgaaacatgtaatttttctgttcaaacatttgaaggtgacgaaaattatttagcagagcaatgcaaaccaaagcaattgaaagaatattacacaagtgcaaaagtatctaatattcctttcgtttctcaaaattctacgttaaggttgattgagagtacatttcagacggtcgaagctgagtttactgttttgatggaaaacatcagaaatatggatactttttttactgatcaaagcagcatccctttggtgaagcgtacagtgagatctatcaataatttatatacttggagaataccagaggctgaaattttattaaatattcagaataatatcaagtgtgaacaaatgcaaataacaaatgctaacattcaagacttgaaggaaaaagttacagattatgtcaggaaagatattgcacaaataactgaagatgtagccaatgcaaaagaggagtatttatttttaatgcattttgatgatgcttccagtggatacgttaaagatctcagcacgcatcaatttagaatgcaaaagacattacgtcaaaagcttttcgatgtgtccgccaaaattaatcatactgaagagttgttgaacattttaaaattgttcactgtaaagaataagagattggacgataatccattagtggcaaaattggctaaagaatctcttgcacgtgacggtttattgaaagaaatcaaattattgcgtgagcaagtgagtaggttacaattggaggagaaaggtaaaaaggcttcttctttcgatgcatcctcttctataacaaaggacatgaaaggatttaaagtagtagaagttgggttggccatgaatacgaaaaagcaaattggtgatttcttcaaaaatttgaacatggcaaaatga

SEQ ID NO: 5407 - DNA, 846 bp, Saccharomyces cerevisiae
atggcactacgatttttcaacgatatatctagagatgtcaatggcctattcaatagggacttttttcacaccaaccccctctctttgaatatttcaacaaccacggaaaatggtgtgaattttactctgaaggcgaagcagggcgtgacagaaggccccatccaaactagcgtagaaggacggttttatgacaggaaggagggagtgtcgctatctcagagttggtcgaaccagaacaggttaaatacaagaatcgaattttccaagatagcacctggttggaaaggtgatgtcaacgcatttttgactccccaatccatcaagaacgccaaatttaatttgagctacgcccaaaaatcgtttgcagcaagaacttctatagacatcttgcaacctaaggactttgtcggaagtgttactttgggccaccgcgggtttgttggcggcactgacatcgcatatgacacagctgcgggtttatgtgcacgctatgctatgtcaatcgggtatcttgccagagaatattcgtttattttgtctactaacaacaggcaatgcgcaactgcttcattttttcaaaacgttaaccgctatttgcaagtgggaactaaagccactttacaatcgaagacaagttctaatatgaacattgaatttgttaccagatacgtaccagattctatttcgcaagttaaggcaaaaattgcagattcaggcctgactacattgtcgtacaagcgaaatttgaataaagatatttctttgggtgtgggtatgtctttcaatgcgctacaactgactgaaccagtccacaaatttggctggtctctatcgttctcgccctga

SEQ ID NO: 5408 - DNA, 846 bp, Artificial Sequence
  Description of Artificial Sequence: Synthetic polynucleotide
atggcattaagatttttcaacgatatatctagagatgtcaatggccttttcaatagggacttttttcacaccaaccccctctctttgaatatttctacaaccacggaaaatggtgtgaattttactttgaaggcgaagcagggcgtgacagaaggccccatccaaactagcgtagaaggaagattttatgacaggaaggagggagtgtctttatctcagagttggagcaaccagaacaggttaaatacaagaatcgaattttccaagatagcacctggttggaaaggtgatgtcaacgcatttttgactccccaatccatcaagaacgccaaatttaatttgagctacgcccaaaaaagttttgcagcaagaacttctatagacatcttgcaacctaaggactttgtcggaagtgttactttgggccaccgcgggtttgttggcggcactgacatcgcatatgacacagctgcgggtttatgtgcacgctatgctatgtccatcgggtatcttgccagagaatattcttttattttgtctactaacaacaggcaatgcgcaactgcttctttttttcaaaacgttaaccgctatttgcaagtgggaactaaagccactttacaatccaagacaagttctaatatgaacattgaatttgttaccagatacgtaccagattctatttctcaagttaaggcaaaaattgcagattctggcttaactacattgagttacaagagaaatttgaataaagatatttctttgggtgtgggtatgtctttcaatgcgttgcaattgactgaaccagtccacaaatttggctggtctttatctttctctccctga

SEQ ID NO: 5409 - DNA, 630 bp, Saccharomyces cerevisiae
atgaacatatacacatcacccacgcgaacaccgaacatcgcaccaaagagtggccaaagaccatctcttcctatgctggccacagatgagaggtctacggacaaagaaagcccgaatgaagaccgtgaattcgtgccttgttcgagtttggacgtgcgcagaatctacccaaaaggcccattacttgttctcccggaaaagatctacctttattcagagcccacggtaaaagagcttttaccctttgatgtggtcatcaacgttgctgaagaggcaaacgatttacgaatgcaggttcctgctgtcgagtaccatcactaccgatgggaacatgattcgcagattgcgttggacttgccatcattgactagcatcatacacgcagctacgactaagcgagagaagatactgatacattgccaatgtgggctgtcgagatccgcaacgctgattattgcatatataatgaaatatcataacttgagtctgaggcactcatatgatctgttgaaatcaagggcagacaagataaacccttccatagggcttattttccagttgatggaatgggaggttgctcttaacgcgaagactaacgtgcaagccaacagttatagaaaagtaccgtga

SEQ ID NO: 5410 - DNA, 630 bp, Artificial Sequence
  Description of Artificial Sequence: Synthetic polynucleotide
atgaacatatacacatctcccacgagaacaccgaacatcgcaccaaagagtggccaaagaccatctcttcctatgttggccacagatgagaggtctacggacaaagaaagcccgaatgaagaccgtgaattcgtgccttgtagtagtttggacgtgcgcagaatctacccaaaaggcccattacttgttctcccggaaaagatctacctttattctgagcccacggtaaaagagcttttaccctttgatgtggtcatcaacgttgctgaagaggcaaacgatttaagaatgcaggttcctgctgtcgagtaccatcactacagatgggaacatgattctcagattgcgttggacttgccatctttgactagcatcatacacgcagctacgactaagagagagaagatattaatacattgccaatgtgggctttctagatccgcaacgttgattattgcatatataatgaaatatcataacttgagtttgaggcactcctatgatttattgaaatctagggcagacaagataaacccttccatagggcttattttccagttgatggaatgggaggttgctcttaacgcgaagactaacgtgcaagccaacagttatagaaaagtaccgtga

SEQ ID NO: 5411 - DNA, 3252 bp, Saccharomyces cerevisiae
atgaatgagactactacaaaacagccgctaaagaaaaggtccctgagcagctatctttcaaacgtgagcacgagacgggaggagctggaaaagatttctaaacaagaaacatccgaagaggaagatactgccggcaagcatgaacaaagggaaacactgtcggaagaagtaagtgataagtttccagaaaatgttgcatcgtttcgctcacagactacaagcgttcatcaagccacccaaaataacctgaatgcaaaggaatccgaagacctggcccataagaatgatgcgagttcacacgaaggagaggttaatggggacagccgtccggacgatgttcctgaaacgaatgaaaaaataagccaagcaatacgagcgaaaatttcgtcatcatcatcatcacccaatgtacgtaatgttgatatccaaaaccatcaacctttttcgagagaccaacttcgagcgatgttgaaagaaccaaaaaggaaaactgttgatgatttcatagaagaagagggtttgggagctgttgaagaagaggatttaagtgatgaggtacttgaaaaaaatacaacagaaccagaaaatgtggaaaaagatatagagtatagcgactcagataaggacacagacgatgtgggaagcgatgatcccacggcacccaactcaccaataaaacttggtcgtcgcaaactggttagaggtgaccaacttgatgcaacaacaagttccatgtttaataacgaatcagattctgaattatcagatatcgatgatagcaagaatattgctttatccagtagcctatttagaggcggttcttcacctgtgaaagagacaaacaacaacctttcaaatatgaattcttcaccagcacaaaatccaaaaaggggttctgtctccaggagtaatgatagtaacaagagttctcatatagctgtttccaagcgccccaaacagaagaagggcatatatagggattctggtggtagaacaagactacagattgcctgtgacaagggcaaatatgatgtagtcaaaaagatgattgaagaaggaggttacgatattaatgaccaagacaatgctggtaatacagcattgcatgaagcggcgttgcaaggtcatattgagattgtggaactgttgatagaaaatggtgcagatgtaaatatcaagtctattgaaatgttcggcgatactcccttgatcgatgcttccgccaatggacacttggatgttgtcaagtatcttcttaaaaacggtgcggacccaactatacgtaacgctaaagggttaactgcgtttgaatctgtcgatgatgaatctgaatttgatgatgaagaagaccaaaagattttgcgtgaaataaaaaaaaggttgagtatagccgctaaaaaatggactaacagagcaggaattcataatgacaaatctaaaaatggcaataatgctcacacaatagatcagccaccttttgataataccacaaaagccaaaaacgaaaaggccgctgactcaccttcaatggcttccaatattgatgagaaagctccggaagaggaattctattggacagatgttacttctagagcgggaaaagaaaaactgtttaaagcttcgaaggagggacatttaccatacgttggtacgtatgtagaaaatggtggtaagatagacttaaggtcatttttcgaaagcgttaagtgtggccatgaagatattacaagtatctttttggcattcggatttcccgtaaatcaaacttcaagggataataaaacatccgctttaatggtagctgtaggtcgtggccatcttggaactgttaaactgctattagaggcaggtgcagatccaaccaaaagagataaaaagggtcgtaccgctttgtactatgccaaaaacagcataatgggaataacaaacagtgaagaaattcaattgattgaaaatgctataaataactatttgaagaagcactctgaagataataatgatgatgatgatgatgatgataataataatgaaacatataaacatgaaaaaaagagagagaaaacgcaatcacccatattagcaagccgaagaagtgccactcctagaattgaagacgaagaggacgatacgaggatgctcaatctggcagacgatgactttaataacgatcgtgatgtcaaggaatctacaacttcggattcgcgcaagagattggatgacaatgaaaatgttggtactcaatactcattggactggaaaaaacgtaaaacaaatgccttgcaagatgaagaaaaattaaaaagtatctcaccactctctatggaacctcattctccaaagaaggcaaaatctgtagagataagtaaaatacatgaagaaacggctgctgaaagagaagcaagactcaaggaagaggaagaatacagaaagaaaagattagaaaagaaaagaaaaaaagaacaggaactactacaaaagctggccgaagatgagaaaaaaaggatcgaagaacaggagaagcagaaagtcttagaaatggaaagattggaaaaagctactttagagaaagcaagaaaaatggaaagggaaaaagaaatggaagaaatctcttatagaagggcagtaagggacttatatccgttaggactgaagattattaacttcaacgataaacttgattacaaaagatttttgccgctatattattttgtagacgaaaaaaacgataaatttgtgctcgacttgcaagtaatgatattgttgaaggatatcgacttgctctcaaaggacaaccaaccaacttctgagaagattcccgtcgatccctcgcacctgactccattgtggaatatgttgaaattcattttcctgtatggaggtagttatgatgataaaaagaacaacatggaaaataaaagatatgttgtaaactttgatggggttgatttggacacaaagattgggtatgagcttttggagtacaaaaaatttgttagtttgcccatggcgtggattaaatgggataacgttgttattgaaaaccacgcaaaaagaaaagaaattgaaggaaatatgattcaaatatcaataaacgaatttgcacgatggagaaacgataagctgaacaaagcgcagcagccgacgcgcaaacagcgttctctaaaaatacctcgagagttaccggttaaatttcaacaccgtatgagcatatcctccgtcctccagcagacatccaaagaaccattttggtaa

SEQ ID NO: 5412 - DNA, 3252 bp, Artificial Sequence
  Description of Artificial Sequence: Synthetic polynucleotide
atgaatgagactactacaaaacagccgttgaagaaaaggtccttaagcagctatctttccaacgtgagcacgagaagagaggagttagaaaagatttctaaacaagaaacatccgaagaggaagatactgccggcaagcatgaacaaagggaaacattatctgaagaagtaagtgataagtttccagaaaatgttgcaagttttcgctctcagactacaagcgttcatcaagccacccaaaataacttgaatgcaaaggaatccgaagacttggcccataagaatgatgcgagttctcacgaaggagaggttaatggggacagccgtccggacgatgttcctgaaacgaatgaaaaaataagccaagcaataagagcgaaaatttcttcttcttcttcttctcccaatgtacgtaatgttgatatccaaaaccatcaacctttttccagagaccaacttagagcgatgttgaaagaaccaaaaaggaaaactgttgatgatttcatagaagaagagggtttgggagctgttgaagaagaggatttaagtgatgaggtacttgaaaaaaatacaacagaaccagaaaatgtggaaaaagatatagagtatagcgacagtgataaggacacagacgatgtgggaagcgatgatcccacggcacccaactctccaataaaacttggtcgtcgcaaattggttagaggtgaccaacttgatgcaacaacaagttccatgtttaataacgaaagtgattctgaattaagtgatatcgatgatagcaagaatattgctttatccagtagcttgtttagaggcggttcttctcctgtgaaagagacaaacaacaacctttctaatatgaattcttctccagcacaaaatccaaaaaggggttctgtctccaggagtaatgatagtaacaagagttctcatatagctgtttccaagcgccccaaacagaagaagggcatatatagggattctggtggtagaacaagattacagattgcctgtgacaagggcaaatatgatgtagtcaaaaagatgattgaagaaggaggttacgatattaatgaccaagacaatgctggtaatacagcattgcatgaagcggcgttgcaaggtcatattgagattgtggaattattgatagaaaatggtgcagatgtaaatatcaagtctattgaaatgttcggcgatactcccttgatcgatgcttccgccaatggacacttggatgttgtcaagtatcttcttaaaaacggtgcggacccaactatacgtaacgctaaagggttaactgcgtttgaatctgtcgatgatgaatctgaatttgatgatgaagaagaccaaaagattttgcgtgaaataaaaaaaaggttgagtatagccgctaaaaaatggactaacagagcaggaattcataatgacaaatctaaaaatggcaataatgctcacacaatagatcagccaccttttgataataccacaaaagccaaaaacgaaaaggccgctgactctccttctatggcttccaatattgatgagaaagctccggaagaggaattctattggacagatgttacttctagagcgggaaaagaaaaattatttaaagcttccaaggagggacatttaccatacgttggtacgtatgtagaaaatggtggtaagatagacttaaggtcttttttcgaaagcgttaagtgtggccatgaagatattacaagtatctttttggcattcggatttcccgtaaatcaaacttctagggataataaaacatccgctttaatggtagctgtaggtcgtggccatcttggaactgttaaattattattagaggcaggtgcagatccaaccaaaagagataaaaagggtcgtaccgctttgtactatgccaaaaacagcataatgggaataacaaacagtgaagaaattcaattgattgaaaatgctataaataactatttgaagaagcactctgaagataataatgatgatgatgatgatgatgataataataatgaaacatataaacatgaaaaaaagagagagaaaacgcaatctcccatattagcaagcagaagaagtgccactcctagaattgaagacgaagaggacgatacgaggatgctcaatttggcagacgatgactttaataacgatcgtgatgtcaaggaatctacaacttctgattctcgcaagagattggatgacaatgaaaatgttggtactcaatactctttggactggaaaaaacgtaaaacaaatgccttgcaagatgaagaaaaattaaaaagtatctctccactctctatggaacctcattctccaaagaaggcaaaatctgtagagataagtaaaatacatgaagaaacggctgctgaaagagaagcaagactcaaggaagaggaagaatacagaaagaaaagattagaaaagaaaagaaaaaaagaacaggaattattacaaaagttggccgaagatgagaaaaaaaggatcgaagaacaggagaagcagaaagtcttagaaatggaaagattggaaaaagctactttagagaaagcaagaaaaatggaaagggaaaaagaaatggaagaaatctcttatagaagggcagtaagggacttatatccgttaggattgaagattattaacttcaacgataaacttgattacaaaagatttttgccgttatattattttgtagacgaaaaaaacgataaatttgtgctcgacttgcaagtaatgatattgttgaaggatatcgacttgctctctaaggacaaccaaccaacttctgagaagattcccgtcgatccctctcacttgactccattgtggaatatgttgaaattcattttcctctatggaggtagttatgatgataaaaagaacaacatggaaaataaaagatatgttgtaaactttgatggggttgatttggacacaaagattgggtatgagcttttggagtacaaaaaatttgttagtttgcccatggcgtggattaaatgggataacgttgttattgaaaaccacgcaaaaagaaaagaaattgaaggaaatatgattcaaatatccataaacgaatttgcaagatggagaaacgataagttgaacaaagcgcagcagccgacgcgcaaacagcgttctttgaaaatacctcgtgagttaccggttaaatttcaacaccgtatgagcatatcctccgtcctccagcagacatccaaagaaccattttggtga

SEQ ID NO: 5413 - DNA, 456 bp, Saccharomyces cerevisiae
atgttgcgtacttctcttactaaaggggcacggctaactgggacaagatttgttcaaacaaaggccctttcgaaggcaacattgacagatctgcccgaaagatgggaaaatatgccaaacttagaacagaaagagattgcagataatttgacagaacgtcaaaagcttccatggaaaactctcaataacgaggaaatcaaagcagcttggtacatatcctacggcgagtggggacctagaagacctgtacacggaaaaggcgatgttgcatttataactaaaggagtatttttagggttaggaatctcatttgggctctttggtttagtgagactattagccaatcctgaaactccaaagactatgaacagggaatggcagttgaaatcagacgagtatctgaagtcaaaaaatgccaatccttggggaggttattctcaagttcaatctaaataa

SEQ ID NO: 5414 - DNA, 456 bp, Artificial Sequence
  Description of Artificial Sequence: Synthetic polynucleotide
atgttgcgtacttctcttactaaaggggcaagattaactgggacaagatttgttcaaacaaaggccctttccaaggcaacattgacagatttgcccgaaagatgggaaaatatgccaaacttagaacagaaagagattgcagataatttgacagaacgtcaaaagcttccatggaaaactctcaataacgaggaaatcaaagcagcttggtacatatcctacggcgagtggggacctagaagacctgtacacggaaaaggcgatgttgcatttataactaaaggagtatttttagggttaggaatctcttttgggctctttggtttagtgagattattagccaatcctgaaactccaaagactatgaacagggaatggcagttgaaaagtgacgagtatttgaagagtaaaaatgccaatccttggggaggttattctcaagttcaatctaaatga

SEQ ID NO: 5415 - DNA, 1134 bp, Saccharomyces cerevisiae
atgtcattttccttcggctttacttccaatgactttgatgatgatgagcttgttgctcaacctgaaacattcgttgaaagcagcaaagaaaacgaaaataccactgcttacatcaatccattagattcggatttcttgtcgcaagctggagttgtgcagccaaatgtggaagacctaggaacaatattggaaagtcttaaggatgttagattgacatttgaagagttccaatctccgatatatagaaaaccattgatcaagagggaactattcgatgtcaaacatcagctaatgttagagacagatgcccaatccaacaacaactccacggaactggacattttactaggtgatacttctgaagatttgagaaagaacatctatgaaggtgggttgaaatcatgggagtgctcttatgatttagttgatttgttgtcagagaacgttgatagaataagcaacgatatcgacgcggttgtcgaaataggctgtggtacggcactaccctcagagtttcttttcagatctgctcttctacggaatgatagaagtaaaggtttaaagtttgttttgactgactataatgccagtgtattaagattagttaccataccgaatttggttataacatgggctaaaacggttttgacaaaggaacaatggtacgccttacagaaagacgaatgtgaagatattccaataaataatgaggaactgcttcttacctcaaagctgttagctgccttttacgacgatgtacaaagcaggaatatcagcgtcactcttatatcaggatcgtggggacgtaaatttagtaatttgatccatgaagtactctcaggtagccaaaaagtcctttcattatcctcagaaacaatttatcaacctgacaatttgcccgttatagcggaaacaatacttgacatacacaatttaccacaaaccgatgtcaaaacttacgtagccgcaaaggatatttattttggagtcggtggtagcatcactgaatttgaagcttatttggacgacaaaataaactccgaacatctaccaattcattctgaaaggtttaaagttaactctggcttaaaaaggtcgattatatgcattgaaacaaataaagctatccgatag

SEQ ID NO: 5416 - DNA, 1134 bp, Artificial Sequence
  Description of Artificial Sequence: Synthetic polynucleotide
atgagtttttccttcggctttacttccaatgactttgatgatgatgagcttgttgctcaacctgaaacattcgttgaaagcagcaaagaaaacgaaaataccactgcttacatcaatccattagattctgatttcttgtctcaagctggagttgtgcagccaaatgtggaagacttgggaacaatattggaaagtcttaaggatgttagattgacatttgaagagttccaatctccgatatatagaaaaccattgatcaagagggaattattcgatgtcaaacatcagttgatgttagagacagatgcccaatccaacaacaactccacggaattagacattttattgggtgatacttctgaagatttgagaaagaacatctatgaaggtgggttgaaaagttgggagtgctcttatgatttagttgatttgttgagtgagaacgttgatagaataagcaacgatatcgacgcggttgtcgaaataggctgtggtacggcattgccctctgagtttcttttcagatctgctcttttgagaaatgatagaagtaaaggtttaaagtttgttttgactgactataatgccagtgtattaagattagttaccataccgaatttggttataacatgggctaaaacggttttgacaaaggaacaatggtacgccttacagaaagacgaatgtgaagatattccaataaataatgaggaattgcttcttacctccaagcttttagctgccttttacgacgatgtacaaagcaggaatatcagcgtcactcttatatctggatcttggggacgtaaatttagtaatttgatccatgaagtactctctggtagccaaaaagtcctttctttatccagtgaaacaatttatcaacctgacaatttgcccgttatagcggaaacaatacttgacatacacaatttaccacaaaccgatgtcaaaacttacgtagccgcaaaggatatttattttggagtcggtggtagcatcactgaatttgaagcttatttggacgacaaaataaactccgaacatttaccaattcattctgaaaggtttaaagttaactctggcttaaaaaggtctattatatgcattgaaacaaataaagctatcagatga

SEQ ID NO: 5417 - DNA, 2781 bp, Saccharomyces cerevisiae
atgtctcatcacaagaaacgtgtttacccacaagctcagctccagtatggacaaaatgccacccctctacaacagccagcacaattcatgcctccgcaggatcctgctgcagctggaatgagctatggtcagatgggaatgccgccacagggtgcagtcccttccatggggcagcaacaattcctaacccctgctcaagaacagttacaccagcaaattgatcaggccaccacttccatgaacgatatgcatctgcacaacgtaccgctagtcgatcctaacgcttatatgcagccacaggttcccgtgcaaatgggcacacctttgcagcaacagcaacaaccaatggcagcgcctgcgtatggccaacctagcgccgcaatgggccaaaacatgaggcccatgaaccagttgtatccaatcgatctgttgacggaattgcctcctccaattaccgatctgaccttgcctcccccaccgttggttattcctccagaaaggatgttagttccttctgaattgtccaatgcgtctccagattatatcaggtcgaccttgaacgccgttcctaagaacagctccctgctgaagaagtctaaacttccatttgggcttgttatcagaccataccaacacttgtacgacgatatcgacccgcctccattgaatgaagatggacttattgtccgttgtcgtcgttgtcgttcttacatgaacccttttgtcacttttatcgagcaaggcagaagatggagatgtaacttttgtcgtctggccaatgacgttcctatgcaaatggaccagagcgatccaaacgacccaaagagtagatacgacagaaatgaaatcaaatgtgctgtgatggaatatatggccccaaaggaatatactctaagacaaccacctccagccacttactgtttcctgatcgatgtctcccagtcctctatcaagagtgggttactggccactaccatcaacacccttttgcaaaatcttgattccattccaaaccatgatgaaagaaccagaatttccatcttatgtgtagacaacgccattcactactttaaaatcccattggattctgaaaacaatgaagagtccgccgatcaaatcaacatgatggatattgccgacctggaagagcctttcttgcccagaccaaactctatggttgtgtccttaaaggcctgcagacaaaacattgaaactttattgaccaagattcctcaaatcttccaatctaatttaatcacaaatttcgcactgggccccgctttgaaatccgcttatcatttaattggtggcgttggtggtaaaataattgttgtgtcaggtactttgcccaacttaggcataggaaaattacaaaggagaaatgaaagtggtgttgttaatacatccaaggaaactgcacaactactttcctgtcaagactcattttataagaatttcaccatcgattgttctaaagtacagattactgtcgatttatttttggcttctgaagattatatggacgttgcatcactatcgaatttgagtcgtttcactgctggtcaaacgcatttctatcctggtttttcaggcaagaacccaaatgatattgtcaaattttccactgagtttgccaagcacatttccatggatttctgtatggaaaccgtaatgagagcccgtggttccacaggtttgagaatgagtagattctatggtcacttcttcaatagatcatctgatttatgtgcattttccaccatgccaagagatcaatcatacttattcgaagttaacgttgatgaatccattatggctgactattgttatgttcaagtagcggtacttttatctctgaataatagtcaacgtagaataagaattataacattggctatgccaaccacggaatcgttggcagaagtctacgcatctgctgaccaattagctatagcgtcgttttacaactcgaaggcggtggagaaagcattgaattccagtttggacgatgcaagagtattgatcaacaaatccgtgcaagatatcttagccacgtacaagaaggaaatagtggtgtccaacactgcagggggggccccattgaggttatgtgccaatttgagaatgttcccattgttaatgcattctttaactaagcatatggcatttagatctggtattgtcccaagtgaccatcgcgcctcggccttgaacaacttagaatcattacctttgaaatatctaatcaaaaacatctaccctgatgtttattcgctgcatgatatggctgatgaggctgggttaccagtgcaaactgaagatggtgaagctactggcacaattgttttgcctcaaccaatcaatgctacctcttcgttgtttgaaagatacggtctatacttgatagataatggtaacgaattgtttttgtggatgggtggtgacgctgtaccagcgctagtattcgatgtgtttggaacacaggatatctttgacattccaattggcaaacaggaaatacctgttgttgaaaattctgaattcaatcaaagagtaagaaacattatcaaccaattgagaaaccatgatgatgtcatcacttaccaatcattgtatattgttaggggtgcctctttgagcgagcccgttaaccatgcatctgctagggaagttgcaacgctaagactatgggcttctagcaccttagtggaggataagattttgaataacgaaagttacagagaattcttacaaatcatgaaagccagaattagcaaataa

SEQ ID NO: 5418 - DNA, 2781 bp, Artificial Sequence
  Description of Artificial Sequence: Synthetic polynucleotide
atgtctcatcacaagaaacgtgtttacccacaagctcagctccagtatggacaaaatgccacccctttacaacagccagcacaattcatgcctccgcaggatcctgctgcagctggaatgagctatggtcagatgggaatgccgccacagggtgcagtcccttccatggggcagcaacaattcttgacccctgctcaagaacagttacaccagcaaattgatcaggccaccacttccatgaacgatatgcatttgcacaacgtaccgttagtcgatcctaacgcttatatgcagccacaggttcccgtgcaaatgggcacacctttgcagcaacagcaacaaccaatggcagcgcctgcgtatggccaacctagcgccgcaatgggccaaaacatgaggcccatgaaccagttgtatccaatcgatttattgacggaattgcctcctccaattaccgatttgaccttgcctcccccaccgttggttattcctccagaaaggatgttagttccttctgaattgtccaatgcgtctccagattatatcaggtctaccttgaacgccgttcctaagaacagctccttattgaagaagtctaaacttccatttgggcttgttatcagaccataccaacacttgtacgacgatatcgacccgcctccattgaatgaagatggacttattgtccgttgtcgtcgttgtcgttcttacatgaacccttttgtcacttttatcgagcaaggcagaagatggagatgtaacttttgtcgtttggccaatgacgttcctatgcaaatggaccagagcgatccaaacgacccaaagagtagatacgacagaaatgaaatcaaatgtgctgtgatggaatatatggccccaaaggaatatactttgagacaaccacctccagccacttactgtttcttgatcgatgtctcccagtcctctatcaagagtgggttattagccactaccatcaacacccttttgcaaaatcttgattccattccaaaccatgatgaaagaaccagaatttccatcttatgtgtagacaacgccattcactactttaaaatcccattggattctgaaaacaatgaagagtccgccgatcaaatcaacatgatggatattgccgacttggaagagcctttcttgcccagaccaaactctatggttgtgtccttaaaggcctgcagacaaaacattgaaactttattgaccaagattcctcaaatcttccaatctaatttaatcacaaatttcgcattgggccccgctttgaaatccgcttatcatttaattggtggcgttggtggtaaaataattgttgtgagtggtactttgcccaacttaggcataggaaaattacaaaggagaaatgaaagtggtgttgttaatacatccaaggaaactgcacaattactttcctgtcaagactctttttataagaatttcaccatcgattgttctaaagtacagattactgtcgatttatttttggcttctgaagattatatggacgttgcatctttatccaatttgagtcgtttcactgctggtcaaacgcatttctatcctggtttttctggcaagaacccaaatgatattgtcaaattttccactgagtttgccaagcacatttccatggatttctgtatggaaaccgtaatgagagcccgtggttccacaggtttgagaatgagtagattctatggtcacttcttcaatagatcttctgatttatgtgcattttccaccatgccaagagatcaatcttacttattcgaagttaacgttgatgaatccattatggctgactattgttatgttcaagtagcggtacttttatctttgaataatagtcaacgtagaataagaattataacattggctatgccaaccacggaatctttggcagaagtctacgcatctgctgaccaattagctatagcgtctttttacaactccaaggcggtggagaaagcattgaattccagtttggacgatgcaagagtattgatcaacaaatccgtgcaagatatcttagccacgtacaagaaggaaatagtggtgtccaacactgcagggggggccccattgaggttatgtgccaatttgagaatgttcccattgttaatgcattctttaactaagcatatggcatttagatctggtattgtcccaagtgaccatcgcgcctctgccttgaacaacttagaatctttacctttgaaatatttgatcaaaaacatctaccctgatgtttattctttgcatgatatggctgatgaggctgggttaccagtgcaaactgaagatggtgaagctactggcacaattgttttgcctcaaccaatcaatgctacctcttctttgtttgaaagatacggtttatacttgatagataatggtaacgaattgtttttgtggatgggtggtgacgctgtaccagcgttggtattcgatgtgtttggaacacaggatatctttgacattccaattggcaaacaggaaatacctgttgttgaaaattctgaattcaatcaaagagtaagaaacattatcaaccaattgagaaaccatgatgatgtcatcacttaccaatctttgtatattgttaggggtgcctctttgagcgagcccgttaaccatgcatctgctagggaagttgcaacgttgagattatgggcttctagcaccttagtggaggataagattttgaataacgaaagttacagagaattcttacaaatcatgaaagccagaattagcaaatga

SEQ ID NO: 5419 - DNA, 2091 bp, Saccharomyces cerevisiae
atggtaggctcgaaggatattgatctattcaacctgagagagaacgagcaaatcgtttctccttgtcttatcgtgcacggaaaatgcaataagcaaaatggtgcgaagaccgttcaagtgcagcatccacaattgcctccaattacttaccccatacataatcagttcttcaaggccactgtgatattgactcctggtgagaacaagttgacctttgttacagacactaacaccgctaggacaatcgtatgttactacacaccactgacgcagaaccctcccgtacacctgtgtctgatcttggccaaggattcgcctttacagtttgactctcctcgagaacagaaggacagagagggcgggaatggcctcgaattggcaatcaagaagctaagacttggggccagactcatgcaagcgtacacgaacgagcaaatgctgagaaacagtatgggaaataggacgtttccctttgttgaagaatttacctgggacacgctgttcgaacggcctgctatgagaaacaccatcaaaatacatgtagttcgttcggaaaagacggtgaaggaaatccaggaccctgacatagctcaacagaattccaaagggaaaaacaccggcgccctttttgggatagccatggacgcccttaaaagttacggcggacccttcaccaataacgaaaagcctgttcaggcagcttgtatgtttctagacacccactgggatggtaagttgattagaggccacgccgcattgggtgggggtgacgacagcattaagctcgccatttttgggtcgcacgggctttactcatggcctacttgtctcgagcaattggtgccttattttactgatgagacaagatcctccaccagtgaagtcgccaacgactgtaatgagtgtggtacttactgggaatgtttgactatcacgttgggagcatttatgcatgagattggtcacttactgggttgtcctcatcaggaaagcggtgttatgctaagaggctataccactttgaataggtctttcttgactaaagaggcttattctgtaagaactaattcaactggtgctagtcctcccatcttccccaaggaagaatgtacctggaaccgtctcgatacggtaagatttttgtaccacccctctttcactttaccacaggattattacgatccatcgttcatgagacctacaaaattgggcggataccccaatataaaacactctgtatatcctttgggtaacggcagttgccgcatattatcgcccacaggaatctatttgattgaaattatatgtgatgatttggccaggggccatattgaatacttgccggtttccctaggtggacaggggcctcaacgggaagttatagtaacattagatgatttacgtgccaggttgcccaagaatgaactcgccaagtttggcaataccttcaaattgaaaattctttctgttaatgcaccggaaaccgagttcgacaagttcccatctttgttagatgttcagccattagacatgtcgaaatatgggttttctaaaaatgttcaaggtatcaaatcaccactttatggtcgcagcgacggtggtaatgctgtcggcgtcgtcgcttttgatgttagattagtcactgctgtgagaatataccatggctatgcattagatggtgtgaggttttattacaaggaaaaaccaactggaacaaaggatgctcccgcatccaagccctctgtaccaccaagaaattatttctcaaaaattacacatagtatcaaaaatcatgcttcaataaacgaagaaaatctaaaaagtgtactctttggacatgaaacacaaaattttacggatgctacactagaaccgggtgaaataatcattgggtttaatctgaggtgcggagcttgggttgatgctatccaaattataacgagtcatgggagaatgaccgacatgtttggtaacaaagacggaggtgggttcgctgaattgcagccacctaatggccaatatatcctaggtgtgactggcagagtcggtcaatgggtcgacgccttcggaattatttacggagctttatag

SEQ ID NO: 5420 - DNA, 2091 bp, Artificial Sequence
  Description of Artificial Sequence: Synthetic polynucleotide
atggtaggctccaaggatattgatcttttcaacttgagagagaacgagcaaatcgtttctccttgtcttatcgtgcacggaaaatgcaataagcaaaatggtgcgaagaccgttcaagtgcagcatccacaattgcctccaattacttaccccatacataatcagttcttcaaggccactgtgatattgactcctggtgagaacaagttgacctttgttacagacactaacaccgctaggacaatcgtatgttactacacaccattaacgcagaaccctcccgtacacttatgtttaatcttggccaaggattctcctttacagtttgactctcctagagaacagaaggacagagagggcgggaatggcctcgaattggcaatcaagaagttgagacttggggccagactcatgcaagcgtacacgaacgagcaaatgttgagaaacagtatgggaaataggacgtttccctttgttgaagaatttacctgggacacgcttttcgaaaggcctgctatgagaaacaccatcaaaatacatgtagttcgttctgaaaagacggtgaaggaaatccaggaccctgacatagctcaacagaattccaaagggaaaaacaccggcgccctttttgggatagccatggacgcccttaaaagttacggcggacccttcaccaataacgaaaagcctgttcaggcagcttgtatgtttttggacacccactgggatggtaagttgattagaggccacgccgcattgggtgggggtgacgacagcattaagctcgccatttttgggtctcacgggctttactcttggcctacttgtctcgagcaattggtgccttattttactgatgagacaagatcctccaccagtgaagtcgccaacgactgtaatgagtgtggtacttactgggaatgtttgactatcacgttgggagcatttatgcatgagattggtcacttattgggttgtcctcatcaggaaagcggtgttatgttgagaggctataccactttgaataggtctttcttgactaaagaggcttattctgtaagaactaattctactggtgctagtcctcccatcttccccaaggaagaatgtacctggaaccgtctcgatacggtaagatttttgtaccacccctctttcactttaccacaggattattacgatccatctttcatgagacctacaaaattgggcggataccccaatataaaacactctgtatatcctttgggtaacggcagttgccgcatattatctcccacaggaatctatttgattgaaattatatgtgatgatttggccaggggccatattgaatacttgccggtttccttgggtggacaggggcctcaaagagaagttatagtaacattagatgatttacgtgccaggttgcccaagaatgaactcgccaagtttggcaataccttcaaattgaaaattctttctgttaatgcaccggaaaccgagttcgacaagttcccatctttgttagatgttcagccattagacatgtccaaatatgggttttctaaaaatgttcaaggtatcaaatctccactttatggtcgcagcgacggtggtaatgctgtcggcgtcgtcgcttttgatgttagattagtcactgctgtgagaatataccatggctatgcattagatggtgtgaggttttattacaaggaaaaaccaactggaacaaaggatgctcccgcatccaagccctctgtaccaccaagaaattatttctccaaaattacacatagtatcaaaaatcatgcttctataaacgaagaaaatttgaaaagtgtactctttggacatgaaacacaaaattttacggatgctacattagaaccgggtgaaataatcattgggtttaatttaaggtgcggagcttgggttgatgctatccaaattataacgagtcatgggagaatgaccgacatgtttggtaacaaagacggaggtgggttcgctgaattgcagccacctaatggccaatatatcttgggtgtgactggcagagtcggtcaatgggtcgacgccttcggaattatttacggagctttatga

SEQ ID NO: 5421 - DNA, 2484 bp, Saccharomyces cerevisiae
atgttcaaaccagtagacttctctgaaacatctcctgtgccgcctgatattgatcttgctcctacacaatctccacaccatgtggcacctagtcaagactccagttatgatcttttatcccggagttccgatgataaaattgatgctgaaaagggtccgcatgatgaattatctaagcacttaccactttttcagaaaagacctttgagcgatactcctatatcgagcaattggaactctcctggaatcactgaagaaaatacaccttctgactctcctgaaaatagcgctactaatttgaaatcgctacatcgattgcatattaacgacgaaacgcaactaaaaaatgctaaaattcccacaaacgatactactgactacatgcctccttcagatggagcaaatgaggtaactcggattgatttgaaagacattaaatcacctacgagacaccataaaagaagacctaccaccatcgatgttcctggtttaacaaagtctaaaacatctccagatggtctcatatcaaaggaagatagtggatcaaagttagtgattgtcatggtcggactgccagctacgggaaagtcatttattacaaataaattatccagatttttaaattattctttatactattgtaaagtgtttaatgtcggtaacactagaaggaagtttgctaaggagcatggcctaaaggaccaggattcaaagtttttcgagccgaaaaacgccgactctactaggttgagagacaaatgggccatggatactctggatgaattgctagattatttattagaaggttcaggatctgtgggaatttttgatgctacaaatacctctcgtgaaagaagaaaaaacgttctggctagaatcagaaagagaagtcctcatttgaaggttttatttttagaatctgtttgttcggatcatgcactggtacagaaaaatattagactcaaattatttggtccagattacaaaggtaaagatcctgaaagctctttaaaagattttaaaagtcgcctggcaaactacttgaaagcctatgaaccaattgaggatgacgaaaatttgcagtacatcaaaatgatagatgtgggaaagaaagtcatcgcatacaatattcaagggtttttagcttcgcagacggtatattatttgttaaatttcaatttggctgacagacaaatttggataacgagaagtggcgagagcgaagataatgttagtggccgtataggcggaaattcccatttgactcctcgtggtctaagatttgctaaaagtctaccaaaattcattgccagacagagagaaatattttatcaaaatctcatgcaacaaaaaaagaataatgaaaatacagatgggaacatttataatgactttttcgtttggaccagcatgcgtgctaggactatagggactgctcaatatttcaacgaagatgattatcctatcaaacaaatgaaaatgttagatgagttaagtgcaggtgattatgatggtatgacatatccagaaattaaaaacaactttcctgaagaattcgaaaaaagacagaaagataagttgagatacagataccctggtattggcggtgaatcgtatatggacgttattaatagactcagacctgttatcacagaactagaaagaatcgaggataacgttcttattattacacaccgggtggtggcaagagccttattgggttattttatgaacttgagtatgggtattattgccaatttggatgtcccattacattgtgtatattgcctagaaccaaaaccatatggaatcacttggtcattatgggagtatgatgaagcatcggattcattttctaaggtcccacaaacggacttgaataccaccagagtaaaggaggttggccttgtttataatgaaagaagatattctgttataccaacagctccgccaagtgcaagaagcagctttgcaagtgactttttgtcaagaaaaagatctaatcctacttctgcatcttcatcccagagtgaattatcagaacaacccaagaatagcgttagtgctcaaactggcagcaataataccactctcattgggagcaactttaacatcaagaatgaaaatggtgattcgagaataccattatctgcaccacttatggccactaatacttctaataacatcttagatggtggaggtacctcaatttcgatacatcgtcccagggttgttccaaatcaaaacaacgtgaatcctcttttggctaacaacaataaagcggcttctaatgtacctaatgtaaagaagtcagcggctacaccaaggcaaatttttgaaatagataaagtggacgaaaagttatccatgttgaaaaataaaagttttctattacatggaaaggattatcctaataatgctgataataatgacaacgaagatataagggcaaaaaccatgaatcgcagccaaagtcacgtttaa

SEQ ID NO: 5422 - DNA, 2484 bp, Artificial Sequence
  Description of Artificial Sequence: Synthetic polynucleotide
atgttcaaaccagtagacttctctgaaacatctcctgtgccgcctgatattgatcttgctcctacacaatctccacaccatgtggcacctagtcaagactccagttatgatcttttatccagaagttccgatgataaaattgatgctgaaaagggtccgcatgatgaattatctaagcacttaccactttttcagaaaagacctttgagcgatactcctatatctagcaattggaactctcctggaatcactgaagaaaatacaccttctgactctcctgaaaatagcgctactaatttgaaatctttgcatagattgcatattaacgacgaaacgcaattgaaaaatgctaaaattcccacaaacgatactactgactacatgcctccttctgatggagcaaatgaggtaactagaattgatttgaaagacattaaatctcctacgagacaccataaaagaagacctaccaccatcgatgttcctggtttaacaaagtctaaaacatctccagatggtctcatatccaaggaagatagtggatccaagttagtgattgtcatggtcggattaccagctacgggaaagagctttattacaaataaattatccagatttttaaattattctttatactattgtaaagtgtttaatgtcggtaacactagaaggaagtttgctaaggagcatggcttgaaggaccaggattctaagtttttcgagccgaaaaacgccgactctactaggttgagagacaaatgggccatggatactttagatgaattgttggattatttattagaaggttctggatctgtgggaatttttgatgctacaaatacctctcgtgaaagaagaaaaaacgttttggctagaatcagaaagagaagtcctcatttgaaggttttatttttagaatctgtttgttctgatcatgcattggtacagaaaaatattagactcaaattatttggtccagattacaaaggtaaagatcctgaaagctctttaaaagattttaaaagtcgcttggcaaactacttgaaagcctatgaaccaattgaggatgacgaaaatttgcagtacatcaaaatgatagatgtgggaaagaaagtcatcgcatacaatattcaagggtttttagcttctcagacggtatattatttgttaaatttcaatttggctgacagacaaatttggataacgagaagtggcgagagcgaagataatgttagtggccgtataggcggaaattcccatttgactcctcgtggtttaagatttgctaaaagtttaccaaaattcattgccagacagagagaaatattttatcaaaatctcatgcaacaaaaaaagaataatgaaaatacagatgggaacatttataatgactttttcgtttggaccagcatgcgtgctaggactatagggactgctcaatatttcaacgaagatgattatcctatcaaacaaatgaaaatgttagatgagttaagtgcaggtgattatgatggtatgacatatccagaaattaaaaacaactttcctgaagaattcgaaaaaagacagaaagataagttgagatacagataccctggtattggcggtgaaagttatatggacgttattaatagactcagacctgttatcacagaattggaaagaatcgaggataacgttcttattattacacacagagtggtggcaagagccttattgggttattttatgaacttgagtatgggtattattgccaatttggatgtcccattacattgtgtatattgcttagaaccaaaaccatatggaatcacttggtctttatgggagtatgatgaagcatctgattctttttctaaggtcccacaaacggacttgaataccaccagagtaaaggaggttggccttgtttataatgaaagaagatattctgttataccaacagctccgccaagtgcaagaagcagctttgcaagtgactttttgtccagaaaaagatctaatcctacttctgcatcttcttcccagagtgaattatctgaacaacccaagaatagcgttagtgctcaaactggcagcaataataccactctcattgggagcaactttaacatcaagaatgaaaatggtgattccagaataccattatctgcaccacttatggccactaatacttctaataacatcttagatggtggaggtacctctatttctatacatcgtcccagggttgttccaaatcaaaacaacgtgaatcctcttttggctaacaacaataaagcggcttctaatgtacctaatgtaaagaagtctgcggctacaccaaggcaaatttttgaaatagataaagtggacgaaaagttatccatgttgaaaaataaaagttttttattacatggaaaggattatcctaataatgctgataataatgacaacgaagatataagggcaaaaaccatgaatcgcagccaaagtcacgtttga

SEQ ID NO: 5423 - DNA, 945 bp, Saccharomyces cerevisiae
atgtcttttctacaaaattttcatataagtcccggccaaacaataagatctactagaggtttcaagtggaatactgccaatgcagctaataatgcaggctctgtatcgcctactaaggcaactccccataacaatactattaacggcaataataataatgccaatactattaacaatagagcagattttacaaacaatccagtaaacggatataatgaaagcgaccatggaaggatgtctcccgtcctcactacgccaaagaggcacgcccctccgcctgaacaattacaaaatgtaacggactttaactatacaccatcgcatcagaagccgtttctacaaccgcaagcaggtacgacagttacaacacatcaagacatcaagcaaattgtggagatgacactggggtctgagggagtccttaaccaagctgtgaagttaccgcgtggtgaggatgagaatgaatggctagcggttcattgcgtggatttttacaatcagattaatatgttatacgggtccatcacagaattttgctccccacaaacatgcccgaggatgatagcgacgaacgaatatgaatatctttgggcatttcaaaagggtcagccccccgtttcggtaagtgcccctaagtatgtggaatgtttgatgaggtggtgtcaagaccaatttgatgacgaatctctttttccttccaaagtcaccggtaccttcccggagggattcatccaacgagtaattcaaccaattctaaggcgattattcagagtttatgcgcatatttactgtcatcattttaatgaaattcttgaactaaatttacaaaccgtactaaacacaagttttagacatttttgtctttttgcacaagagttcgaactactaagaccggctgattttggtccgctgttagaattagtgatggagttgagggataggtag

SEQ ID NO: 5424 - DNA, 945 bp, Artificial Sequence
  Description of Artificial Sequence: Synthetic polynucleotide
atgtcttttttgcaaaattttcatataagtcccggccaaacaataagatctactagaggtttcaagtggaatactgccaatgcagctaataatgcaggctctgtatctcctactaaggcaactccccataacaatactattaacggcaataataataatgccaatactattaacaatagagcagattttacaaacaatccagtaaacggatataatgaaagcgaccatggaaggatgtctcccgtcctcactacgccaaagaggcacgcccctccgcctgaacaattacaaaatgtaacggactttaactatacaccatctcatcagaagccgtttttgcaaccgcaagcaggtacgacagttacaacacatcaagacatcaagcaaattgtggagatgacattagggtctgagggagtccttaaccaagctgtgaagttaccgcgtggtgaggatgagaatgaatggttagcggttcattgcgtggatttttacaatcagattaatatgttatacgggtccatcacagaattttgctccccacaaacatgcccgaggatgatagcgacgaacgaatatgaatatctttgggcatttcaaaagggtcagccccccgtttctgtaagtgcccctaagtatgtggaatgtttgatgaggtggtgtcaagaccaatttgatgacgaatctctttttccttccaaagtcaccggtaccttcccggagggattcatccaaagagtaattcaaccaattttaaggagattattcagagtttatgcgcatatttactgtcatcattttaatgaaattcttgaattgaatttacaaaccgtattgaacacaagttttagacatttttgtctttttgcacaagagttcgaattattaagaccggctgattttggtccgttgttagaattagtgatggagttgagggataggtga

SEQ ID NO: 5425 - DNA, 2061 bp, Saccharomyces cerevisiae
atgtcgaaaaacaacacaatgacctctgcggtctctgatatgctgtcacagcaacagctaaatcttcagcacctgcataacttgcagcagcatacgagaagtatgacttcagcagatcatgccaacgttttacaacaacagcaacaacaacaacaacaacaacagcagcagcagcagcaacagcagcagagcgcaagctttcaaaatggcagtttgacatccgatataaaccaacaaagctatttgaatggacaaccagttccttccactagtaattcaacgtttcaaaacaataggacgctgacgatgaattctggagggttgcaaggtatcataagcaatggttctcctaatatcgactcgaacaccaatgtaaccattgctgtcccagatcccaataataacaacgggaaacagctccaagggaaaaactctttaaccaacacttcaatactgtcgagggctaggtcttccttacaacgtcaaagacttgctcagcaacagcaacaacaacaagatcctagatctccattagtaatactggtccctacagctgcgcaaccaacagatattcttgcagcgaggttttcagcttggagaaatgtcatcaagtcggtgatcgtttacttaacagaaatcgcttctattcaggatgaaattgttagacagcaactaagattatcacatgctgtacaattcccattcttttcgatcgagaatcaataccaaccaagctcgcaggaggataaatcagtacaaaagttttttttgccattgggtaatggctcgatacaggacttaccaacaattttgaaccagtatcatgaatccctagcatccagcgcgtctaaggcatcaagggaattgaccaatgatgttattcctcgtttggaagacttgaggagagatctaatagtcaagataaaggaaataaaatcactgcagtcggatttcaaaaattcttgttccaaagagttacaacaaacaaaacaggccatgaagcaatttcaggagtctttaaaggatgcgcgctattcagtgccaaaacaagatccattcttaaccaagctggcgcttgatagacaaattaaaaagcaacttcaggaggaaaactttctgcatgaagcttttgataatttagagacttcaggcgctgaattagaaaaaattgtagttatggaaattcaaaactctttaacaatatatgccagattactgggacaagaagcacaattggttttcgatatattgatatccaaattagattctggatttttcaacgttgacccacaatttgaatgggataacttcatttcaagggatcccaactttttattgcctaatctaccgatgaggacattcaaagaaatcgtttacaaataccaattcgatcctttgacttatgaaatcaaatcagggtttttagaaagaagatcaaaatttctaaaatcctattcaaaagggtattatgtgctgacaccgaactttttacatgaattcaagaccgcggacagaaaaaaagatttagtaccagtgatgtcgttagcattaagtgaatgtactgtgacggaacattcccggaaaaacagtacatcatcaccaaattcgactggttcggatgctaagtttgtgttgcatgctaagcaaaacggcataattcgtcgtggtcacaattgggtttttaaagccgattcttatgaatcaatgatgtcttggtttgataatttgaagatcttaacatctacttcgaatatacaagacaagtataaattcataacacaaaaattaaacttgaattcagatgggaaacccaagctaaccaataaccataccagcattaataagtatcagctgagtaatgccaatagcacaatggtagaaaatgatgaaaacgatgatataaatagtaattatgtggggtccacggtaacaccaaaattggacaatcaaacaaatacgaatacatccatgtcttcattacctgatactaatgattctgaattacaagatcaagttcccaatatttatattcaaactccaataaacgatttcaaatcataa

SEQ ID NO: 5426 - DNA, 2061 bp, Artificial Sequence
  Description of Artificial Sequence: Synthetic polynucleotide
atgtccaaaaacaacacaatgacctctgcggtctctgatatgctttctcagcaacagttgaatcttcagcacttgcataacttgcagcagcatacgagaagtatgacttctgcagatcatgccaacgttttacaacaacagcaacaacaacaacaacaacaacagcagcagcagcagcaacagcagcagagcgcaagctttcaaaatggcagtttgacatccgatataaaccaacaaagctatttgaatggacaaccagttccttccactagtaattctacgtttcaaaacaataggacgttaacgatgaattctggagggttgcaaggtatcataagcaatggttctcctaatatcgactccaacaccaatgtaaccattgctgtcccagatcccaataataacaacgggaaacagctccaagggaaaaactctttaaccaacacttccatattatctagggctaggtcttccttacaacgtcaaagacttgctcagcaacagcaacaacaacaagatcctagatctccattagtaatattggtccctacagctgcgcaaccaacagatattcttgcagcgaggttttctgcttggagaaatgtcatcaagtctgtgatcgtttacttaacagaaatcgcttctattcaggatgaaattgttagacagcaattgagattatctcatgctgtacaattcccattcttttctatcgagaatcaataccaaccaagctctcaggaggataaatctgtacaaaagttttttttgccattgggtaatggctctatacaggacttaccaacaattttgaaccagtatcatgaatccttggcatccagcgcgtctaaggcaagcagggaattgaccaatgatgttattcctcgtttggaagacttgaggagagatttgatagtcaagataaaggaaataaaatctttgcagagcgatttcaaaaattcttgttccaaagagttacaacaaacaaaacaggccatgaagcaatttcaggagtctttaaaggatgcgcgctattctgtgccaaaacaagatccattcttaaccaagttggcgcttgatagacaaattaaaaagcaacttcaggaggaaaactttttacatgaagcttttgataatttagagacttctggcgctgaattagaaaaaattgtagttatggaaattcaaaactctttaacaatatatgccagattattaggacaagaagcacaattggttttcgatatattgatatccaaattagattctggatttttcaacgttgacccacaatttgaatgggataacttcatttctagggatcccaactttttattgcctaatttaccgatgaggacattcaaagaaatcgtttacaaataccaattcgatcctttgacttatgaaatcaaaagtgggtttttagaaagaagaagtaaatttttgaaatcctattctaaagggtattatgtgttaacaccgaactttttacatgaattcaagaccgcggacagaaaaaaagatttagtaccagtgatgtctttagcattaagtgaatgtactgtgacggaacattccagaaaaaacagtacatcttctccaaattctactggttctgatgctaagtttgtgttgcatgctaagcaaaacggcataattcgtcgtggtcacaattgggtttttaaagccgattcttatgaaagtatgatgtcttggtttgataatttgaagatcttaacatctacttccaatatacaagacaagtataaattcataacacaaaaattaaacttgaattctgatgggaaacccaagttgaccaataaccataccagcattaataagtatcagttgagtaatgccaatagcacaatggtagaaaatgatgaaaacgatgatataaatagtaattatgtggggtccacggtaacaccaaaattggacaatcaaacaaatacgaatacatccatgtcttctttacctgatactaatgattctgaattacaagatcaagttcccaatatttatattcaaactccaataaacgatttcaaaagttga

SEQ ID NO: 5427 - DNA, 141 bp, Saccharomyces cerevisiae
atgaagacatggatgtattcgtatttgtttgattgtccaattttggtgttaccgtggaccccacataattactatttatatcatcgttttcatcattttctaccattgtgctattggcattactcagctgatacttattaa

SEQ ID NO: 5428 - DNA, 141 bp, Artificial Sequence
  Description of Artificial Sequence: Synthetic polynucleotide
atgaagacatggatgtattcttatttgtttgattgtccaattttggtgttaccgtggaccccacataattactatttatatcatcgttttcatcattttttaccattgtgctattggcattactctgctgatacttattga

SEQ ID NO: 5429 - DNA, 1524 bp, Saccharomyces cerevisiae
atgataacaccaagattctctataacacaggatgaggaatttatatttctcaaaatattcataagtaatattaggttcagtgcagtgggtttagagataatcatccaagaaaatatgatcatttttcacttatccccttactatttaagattaagatttcctcacgaattaatcgatgatgagaggtctaccgctcaatacgattccaaagatgaatgcatcaatgtaaaagtagccaaactgaataaaaatgaatatttcgaagatttggacctaccgacaaagttgttggctaggcaaggcgatcttgcaggtgccgatgcattaacagaaaatactgatgcgaaaaaaacccaaaagccccttattcaagaggtcgaaactgatggcgtgtcgaataatattaaagatgatgtgaagactattggtcaaatgggagaggggtttaattgggagatagagcaaaagatggattccagcaccaataatggaatattgaagacaaaatatgggtttgataacttatatgatacagttatatcagtgtcgacaagcaacgggaacgatatcaatgaattagacgatcctgaacacactgacgcgaacgatagagttattgaaaggttaagaaaagaaaatttgaagtttgatcctgagtactatgtttccgagtatatgacacataaatacggtaacgaggaagacttggaaattaacggcattaaagaactactgaagtttacaccttcgatcgtaaagcaatacctgcaatggtacaaagacagtacgaacccaaatctggtcatgccaattgagtttactgacgaggaacaaaaacagatgcaggacaatttacccaagaagtcttatctcgtggaagatataaaaccactttatgtcactatactcagcgttcttttcagttatgtgtttgaacagatcgaaaacgaaggtactcataccacagagagtgcttggaccatgggaaaattgtgccctcaaatatcattcttagaccaacaattaaaacaggtgaacgaactgcaagacggtatgaaagaaatatcaaaggttaataaagacagctctctcatcaagattgcaatcattacaggtatcaggagagccctgagttatccactacatagaaactatgacctagcaatgaaagcgtggacattcgtatattatattctacgaggtggtaagagactagtcataagggcgcttttggacattcatgaaacatttcgtttccatgatgtttactacgtctacgacaaagttctcttggatgatctgactgcgtggttcatttctcagggtagtgagaacgtcataagaagtctggccttggaaatgagaaaagagcaagagtcactttccaagcaggatattgaatttgaatgtattgcatcgttcaacgaacaaactggcgaacctgagtgggagacactaaatataagagagatggaaattttggcagagtctgaataccgagagcagcagcagaacccacaatga

SEQ ID NO: 5430 - DNA, 1524 bp, Artificial Sequence
  Description of Artificial Sequence: Synthetic polynucleotide
atgataacaccaagattctctataacacaggatgaggaatttatatttctcaaaatattcataagtaatattaggttcagtgcagtgggtttagagataatcatccaagaaaatatgatcatttttcacttatccccttactatttaagattaagatttcctcacgaattaatcgatgatgagaggtctaccgctcaatacgattccaaagatgaatgcatcaatgtaaaagtagccaaattgaataaaaatgaatatttcgaagatttggacttgccgacaaagttgttggctaggcaaggcgatcttgcaggtgccgatgcattaacagaaaatactgatgcgaaaaaaacccaaaagccccttattcaagaggtcgaaactgatggcgtgagtaataatattaaagatgatgtgaagactattggtcaaatgggagaggggtttaattgggagatagagcaaaagatggattccagcaccaataatggaatattgaagacaaaatatgggtttgataacttatatgatacagttatatctgtgtctacaagcaacgggaacgatatcaatgaattagacgatcctgaacacactgacgcgaacgatagagttattgaaaggttaagaaaagaaaatttgaagtttgatcctgagtactatgtttccgagtatatgacacataaatacggtaacgaggaagacttggaaattaacggcattaaagaattattgaagtttacaccttccatcgtaaagcaatacttacaatggtacaaagacagtacgaacccaaatttggtcatgccaattgagtttactgacgaggaacaaaaacagatgcaggacaatttacccaagaagtcttatctcgtggaagatataaaaccactttatgtcactatactcagcgttcttttcagttatgtgtttgaacagatcgaaaacgaaggtactcataccacagagagtgcttggaccatgggaaaattgtgccctcaaatatctttcttagaccaacaattaaaacaggtgaacgaattacaagacggtatgaaagaaatatccaaggttaataaagacagctctctcatcaagattgcaatcattacaggtatcaggagagccttgagttatccattgcatagaaactatgacttggcaatgaaagcgtggacattcgtatattatattttaagaggtggtaagagattggtcataagggcgcttttggacattcatgaaacatttcgtttccatgatgtttactacgtctacgacaaagttctcttggatgatttgactgcgtggttcatttctcagggtagtgagaacgtcataagaagtttggccttggaaatgagaaaagagcaagagtctctttccaagcaggatattgaatttgaatgtattgcatctttcaacgaacaaactggcgaacctgagtgggagacattaaatataagagagatggaaattttggcagagtctgaatacagagagcagcagcagaacccacaatga

SEQ ID NO: 5431 - DNA, 1278 bp, Saccharomyces cerevisiae
atgagtggctctacagaatctaaaaaacaaccaagaagaagatttattgggagaaaatctggcaacagtaataatgacaaattaactacagtggctgaaaatggcaacgaaataatccacaagcaaaagagtagaatcgccctaggtaggagtgttaatcatgtgccagaagatatattgaatgacaaagagttgaatgaagccatcaaattattgccctctaactacaactttgaaatccacaaaactgtgtggaatatcaggaaatataatgctaaaagaatagccctacagatgcctgaaggtttgctgatttactcattgattataagtgacattttggaacagttctgtggtgttgaaactctagtaatgggggatgtgtcttatggtgcatgctgtattgatgattttactgctagggcattggattgcgattttattgtgcattacgctcattcgtgtttagttcctattgacgttacaaagattaaagtactatatgtctttgttactataaatattcaagaagatcatattatcaaaacgctgcagaagaattttcctaagggatctagaatcgctacatttggtaccattcagtttaatcctgcggtacacagcgtcagagataaactgcttaacgatgaagaacacatgctgtatattattccaccacaaatcaagcctctatcgaggggtgaagtattggggtgtacttctgaaagattagataaagaacaatacgatgccatggtattcatcggtgatggtagatttcatttggagtctgcaatgatacataatccggaaattcctgcattcaagtatgacccatacaacagaaagttcactagagaaggatacgatcaaaagcaactcgtggaagttagagcagaggccattgaagtcgctcggaagggtaaagtttttggtctgatcttaggtgcattaggtagacaaggtaatttaaacactgtaaaaaacttggaaaaaaacctgatcgcagcaggtaaaaccgtggtgaaaattattctaagtgaagtttttccccaaaagctcgcaatgttcgatcaaattgatgtttttgttcaggtcgcatgtcctagactgtccatcgattggggttatgccttcaataaaccactattaacaccatatgaggctagtgtcttactaaagaaagatgtcatgttcagcgaaaaatattatccaatggattattacgaagctaaaggatacgggcgtggggaaactccgaaacatgcgattgaatag

SEQ ID NO: 5432 - DNA, 1278 bp, Artificial Sequence
  Description of Artificial Sequence: Synthetic polynucleotide
atgagtggctctacagaatctaaaaaacaaccaagaagaagatttattgggagaaaatctggcaacagtaataatgacaaattaactacagtggctgaaaatggcaacgaaataatccacaagcaaaagagtagaatcgcccttggtaggagtgttaatcatgtgccagaagatatattgaatgacaaagagttgaatgaagccatcaaattattgccctctaactacaactttgaaatccacaaaactgtgtggaatatcaggaaatataatgctaaaagaatagccttgcagatgcctgaaggtttgttaatttactctttgattataagtgacattttggaacagttctgtggtgttgaaactttggtaatgggggatgtgtcttatggtgcatgctgtattgatgattttactgctagggcattggattgcgattttattgtgcattacgctcattcttgtttagttcctattgacgttacaaagattaaagtattatatgtctttgttactataaatattcaagaagatcatattatcaaaacgttgcagaagaattttcctaagggatctagaatcgctacatttggtaccattcagtttaatcctgcggtacacagcgtcagagataaattacttaacgatgaagaacacatgctttatattattccaccacaaatcaagcctttatctaggggtgaagtattggggtgtacttctgaaagattagataaagaacaatacgatgccatggtattcatcggtgatggtagatttcatttggagtctgcaatgatacataatccggaaattcctgcattcaagtatgacccatacaacagaaagttcactagagaaggatacgatcaaaagcaactcgtggaagttagagcagaggccattgaagtcgctagaaagggtaaagtttttggtttgatcttaggtgcattaggtagacaaggtaatttaaacactgtaaaaaacttggaaaaaaacttgatcgcagcaggtaaaaccgtggtgaaaattattttaagtgaagtttttccccaaaagctcgcaatgttcgatcaaattgatgtttttgttcaggtcgcatgtcctagattatccatcgattggggttatgccttcaataaaccattattaacaccatatgaggctagtgtcttattgaagaaagatgtcatgttcagcgaaaaatattatccaatggattattacgaagctaaaggatacgggcgtggggaaactccgaaacatgcgattgaatga

SEQ ID NO: 5433 - DNA, 228 bp, Saccharomyces cerevisiae
atgaaccgttttgtaattatttgccttctttttacttattatgtcatatggtcgctcctgcctatcttcgagatcgagaactccaatccagttgtgagtttactcttccccatttctagcaatgttgcaattttcctgcccatcttcttactgttgatcgggtttactttaactggttctgttttaggtgtattgcttatacgcagcgataaaaagaaaaaagtttaa

SEQ ID NO: 5434 - DNA, 228 bp, Artificial Sequence
  Description of Artificial Sequence: Synthetic polynucleotide
atgaaccgttttgtaattatttgccttctttttacttattatgtcatatggtctctcttacctatcttcgagatcgagaactccaatccagttgtgagtttactcttccccatttctagcaatgttgcaattttcttgcccatcttcttattattgatcgggtttactttaactggttctgttttaggtgtattgcttatacgcagcgataaaaagaaaaaagtttga

SEQ ID NO: 5435 - DNA, 306 bp, Saccharomyces cerevisiae
atgctaaaggtggaaaagttcaaaaaattgaagcgattcgaggtctattattgtttaaaaaattcttttctggaagaagtagatatcgagatgaaatattcctgcagtataacaactataatgagcaatggttcagcaagcttgttgatgaactgggaagaattaacacctggtcactgttttacctcttacacaactaaccctatcgcaggtgactatggtttgaatgcatcagcaatagacggccacacggaagagttagtggcgacccacccagcgggaaccttggagaatgcaacgcagtag

SEQ ID NO: 5436 - DNA, 306 bp, Artificial Sequence
  Description of Artificial Sequence: Synthetic polynucleotide
atgttgaaggtggaaaagttcaaaaaattgaagagattcgaggtctattattgtttaaaaaattcttttttggaagaagtagatatcgagatgaaatattcctgcagtataacaactataatgagcaatggttctgcaagcttgttgatgaactgggaagaattaacacctggtcactgttttacctcttacacaactaaccctatcgcaggtgactatggtttgaatgcatctgcaatagacggccacacggaagagttagtggcgacccacccagcgggaaccttggagaatgcaacgcagtga

SEQ ID NO: 5437 - DNA, 1944 bp, Saccharomyces cerevisiae
atgaaatatcccgcttttagcattaacagtgacacggtacacttaacggacaaccccctggacgactatcagcgtctctacctcgtcagcgtactggatagggactcgccgccggccagtttcagcgccggactcaatattagaaaggttaactataaatcctccattgctgcgcagttcacacatccaaacttcattatcagtgctcgggacgcagggaacggggaagaggcggcggcgcagaacgttctgaactgcttcgagtaccagtttcccaacctacaaacaattcagagcctagtccacgaacaaacgttgctatcgcagctcgctagctccgccactcctcactccgccttgcatctgcacgataaaaatattctgatgggtaagatcatactaccttcccggtctaacaaaacaccagtctcagcatcacccaccaagcaagaaaagaaggctctgtcaacagcatcgcgtgaaaatgccacctcctcgctgacaaagaatcagcagttcaagttgaccaaaatggaccataatctgatcaatgacaagctcatcaaccctaacaactgcgtaatatggtcgcatgactccggctatgtgttcatgacgggcatctggcggctgtatcaggatgttatgaaggggcttataaacttgcccagaggtgacagcgtttccactagccaacagcagttcttttgcaaggctgaattcgagaaaattctatctttttgcttttacaatcacagttcgttcacttctgaggaatcttcaagcgtactgttgtcgtcctccacctcttcgccgccaaagagacggacatccacagggtctaccttcttggacgccaatgcgtcttcttcatctacttcttcaacgcaggcaaacaattacatcgattttcattggaacaacatcaagcccgaactgcgggaccttatttgccagtcttacaaagacttcctgatcaatgaacttggtcctgaccaaatagacttgcccaacttaaatccggcaaattttacgaaaagaataagaggtggttacatcaaaattcagggtacttggttgccgatggaaatctcaaggttgctatgcctgcggttttgttttccgatcagatactttctggtgcctatttttggtccagatttccccaaagattgcgaatcgtggtatttggctcatcaaaacgttacatttgctagttctaccactggtgcaggtgctgctactgctgctactgctgctgctaatacaagtaccaattttacgtctactgcagtggcaagacctaggcagaagcccagacccaggccaagacaaagatctacttccatgtcccattccaaagcgcagaaacttgttattgaggacgccttgccctcattcgactcatttgtagaaaacttgggcctttcctcaaatgacaagaacttcattaaaaaaaacagcaaaaggcaaaagtcgtccacatacacctctcaaacttcttctccaatagggccaagagatccaacggtgcaaattttgtcaaacctagcatccttctacaacacccacggtcaccggtattcatatccgggaaatatctatataccacagcaaagatactctttacccccaccaaaccagctctcgtcgccacagcggcagctaaactatacttacgaccacattcacccagttccttctcagtaccagtctccaagacactacaacgtcccctcttcaccaatcgcgcctgctcctcccactttccctcaaccttatggtgatgatcactatcattttttgaaatatgctagcgaagtttataagcaacaaaaccaacgaccagctcataatacaaataccaatatggacacctctttttcgccaagggcgaacaattcactgaacaatttcaaatttaaaacaaactcaaaacaataa

SEQ ID NO: 5438 - DNA, 1944 bp, Artificial Sequence
  Description of Artificial Sequence: Synthetic polynucleotide
atgaaatatcccgcttttagcattaacagtgacacggtacacttaacggacaaccccttagacgactatcagcgtctctacctcgtcagcgtattggatagggactctccgccggccagtttcagcgccggactcaatattagaaaggttaactataaatcctccattgctgcgcagttcacacatccaaacttcattatcagtgctagagacgcagggaacggggaagaggcggcggcgcagaacgttttgaactgcttcgagtaccagtttcccaacttacaaacaattcagagcttagtccacgaacaaacgttgctttctcagctcgctagctccgccactcctcactccgccttgcatttgcacgataaaaatattttgatgggtaagatcatattaccttccagatctaacaaaacaccagtctctgcatctcccaccaagcaagaaaagaaggctttatctacagcatctcgtgaaaatgccacctcctctttaacaaagaatcagcagttcaagttgaccaaaatggaccataatttgatcaatgacaagctcatcaaccctaacaactgcgtaatatggtctcatgactccggctatgtgttcatgacgggcatctggagattatatcaggatgttatgaaggggcttataaacttgcccagaggtgacagcgtttccactagccaacagcagttcttttgcaaggctgaattcgagaaaattttatctttttgcttttacaatcacagttctttcacttctgaggaatcttctagcgtacttttgtcttcctccacctcttctccgccaaagagaagaacatccacagggtctaccttcttggacgccaatgcgtcttcttcttctacttcttctacgcaggcaaacaattacatcgattttcattggaacaacatcaagcccgaattaagagaccttatttgccagtcttacaaagacttcttgatcaatgaacttggtcctgaccaaatagacttgcccaacttaaatccggcaaattttacgaaaagaataagaggtggttacatcaaaattcagggtacttggttgccgatggaaatctccaggttgctttgcttgagattttgttttccgatcagatactttttagtgcctatttttggtccagatttccccaaagattgcgaaagttggtatttggctcatcaaaacgttacatttgctagttctaccactggtgcaggtgctgctactgctgctactgctgctgctaatacaagtaccaattttacgtctactgcagtggcaagacctaggcagaagcccagacccaggccaagacaaagatctacttccatgtcccattccaaagcgcagaaacttgttattgaggacgccttgccctctttcgactcttttgtagaaaacttgggcctttcctctaatgacaagaacttcattaaaaaaaacagcaaaaggcaaaagtcttccacatacacctctcaaacttcttctccaatagggccaagagatccaacggtgcaaattttgtctaacttggcatccttctacaacacccacggtcacagatattcttatccgggaaatatctatataccacagcaaagatactctttacccccaccaaaccagctctcttctccacagagacagttgaactatacttacgaccacattcacccagttccttctcagtaccagtctccaagacactacaacgtcccctcttctccaatcgcgcctgctcctcccactttccctcaaccttatggtgatgatcactatcattttttgaaatatgctagcgaagtttataagcaacaaaaccaaagaccagctcataatacaaataccaatatggacacctctttttctccaagggcgaacaattctttgaacaatttcaaatttaaaacaaactccaaacaatga

SEQ ID NO: 5439 - DNA, 1650 bp, Saccharomyces cerevisiae
atggcaagacaaaagatgttttataacaaattactcggcatgctcagcgtaggattcgggtttgcttgggcgctcgagaacattactatatacgaatttgactttggcaagggcattctcgatcaaagctacggcggtgtattttcaaacaacggcccttcgcaagtgcagctgcgggatgcagtcttgatgaatgggacagtggtatacgattcaaacggcgcttgggacagtagtgcgctggaggaatggctccagggacagaaaaaagtttccatcgaaaaaatatttgaaaatattgggcccagcgccgtgtatccgtctatttcgcctggggtcgtgattgcgtcaccatcgcaaacgcatccagactacttctaccaatggataagggacagcgcgttgacgataaacagtattgtctctcattctgcgggcccggcaatagagacgttattgcagtacctgaacgtttcattccacttgcaaagaagcaacaacacattgggcgctggcattggttacactaacgatacagtggctttgggagaccctaagtggaacgtcgacaacacggctttcacggaagattggggtcgtcctcaaaacgatgggcctgctcttcgaagcattgccatcttaaaaatcatcgactacatcaagcaatctggcactgatctgggggccaagtacccattccagtccaccgcagatatctttgatgatattgtacgttgggacctgaggttcattattgaccactggaattcttccggatttgatctatgggaggaagtcaatggcatgcatttctttactttactggtacaactgtctgcagtggacaagtcgctgtcgtattttaacgcctcagaacggtcgtctccctttgttgaagaattgcgtcagacacgccgggacatctccaagtttttagtggaccctgcgaatgggtttatcaacggcaagtacaattatattgttgggacacccatgattgccgacacattgagatccggactggacatatccactttattagctgcgaacaccgtccacgatgcgccatctgcttcccatcttccgttcgatatcaatgaccctgccgtcctgaacacgttgcaccatttgatgttgcacatgcgttcgatataccccatcaacgatagctccaaaaatgcaacgggtattgccctgggccggtatcctgaggacgtatatgatggatatggctttggcgagggaaatccctgggtcctggccacgtgtaccgcttcaacaacgctttatcagctcatttacagacacatctctgagcagcatgacttggttgtcccaatgaacaacgattgttcgaacgcattttggagcgagctggtattctccaacctcacgactttgggaaatgacgaaggctatttgattttggagttcaatacacctgccttcaatcaaaccatacaaaaaatcttccaactagctgattcattcttggtcaagctgaaagctcacgtgggaacagacggggaactaagtgaacaatttaacaaatacacagggtttatgcagggtgcccaacaccttacctggtcctatacttcattctgggatgcctatcaaataagacaagaagttttacagagtttgtag

SEQ ID NO: 5440 - DNA, 1650 bp, Artificial Sequence
  Description of Artificial Sequence: Synthetic polynucleotide
atggcaagacaaaagatgttttataacaaattactcggcatgctcagcgtaggattcgggtttgcttgggcgctcgagaacattactatatacgaatttgactttggcaagggcattctcgatcaaagctacggcggtgtattttccaacaacggcccttctcaagtgcagttaagagatgcagtcttgatgaatgggacagtggtatacgattccaacggcgcttgggacagtagtgcgctcgaggaatggctccagggacagaaaaaagtttccatcgaaaaaatatttgaaaatattgggcccagcgccgtgtatccgtctatttctcctggggtcgtgattgcgtctccatctcaaacgcatccagactacttctaccaatggataagggacagcgcgttgacgataaacagtattgtctctcattctgcgggcccggcaatagagacgttattgcagtacttgaacgtttctttccacttgcaaagaagcaacaacacattgggcgctggcattggttacactaacgatacagtggctttgggagaccctaagtggaacgtcgacaacacggctttcacggaagattggggtcgtcctcaaaacgatgggcctgctcttagaagcattgccatcttaaaaatcatcgactacatcaagcaatctggcactgatttaggggccaagtacccattccagtccaccgcagatatctttgatgatattgtacgttgggacttgaggttcattattgaccactggaattcttccggatttgatttatgggaggaagtcaatggcatgcatttctttactttattggtacaattatctgcagtggacaagtctttatcttattttaacgccagtgaaagatcttctccctttgttgaagaattgcgtcagacacgcagagacatctccaagtttttagtggaccctgcgaatgggtttatcaacggcaagtacaattatattgttgggacacccatgattgccgacacattgagatccggattggacatatccactttattagctgcgaacaccgtccacgatgcgccatctgcttcccatcttccgttcgatatcaatgaccctgccgtcttgaacacgttgcaccatttgatgttgcacatgcgttctatataccccatcaacgatagctccaaaaatgcaacgggtattgccttaggcagatatcctgaggacgtatatgatggatatggctttggcgagggaaatccctgggtccttgccacgtgtaccgcttctacaacgctttatcagctcatttacagacacatctctgagcagcatgacttggttgtcccaatgaacaacgattgttctaacgcattttggagcgagttggtattctccaacctcacgactttgggaaatgacgaaggctatttgattttggagttcaatacacctgccttcaatcaaaccatacaaaaaatcttccaattggctgattctttcttggtcaagttgaaagctcacgtgggaacagacggggaattaagtgaacaatttaacaaatacacagggtttatgcagggtgcccaacaccttacctggtcctatacttctttctgggatgcctatcaaataagacaagaagttttacagagtttgtga

SEQ ID NO: 5441 - DNA, 468 bp, Saccharomyces cerevisiae
atggatagaccaagaacattacgcacatatagaggactcataagagccattctgaaatatgaaaggccaagcaagatagtcaattggggcaatctacgaaaggcaatgataacaaagttggaatatgctaagaaacaaaatcagagagactcgcatgagaacatcaacagacagttagagaaatggaaaaaactagatccggtaagcgacagatctttgaatttgtttatagccgactctaagtcattacgttccatattacaaaacgatataaagtgggagaaaaaggtggcccagggacaaaacgttgacgagatattcgaacacgctttggacatcatcaagttcttggacaaccaaagagaatacgaggagctggtcgacagatacaatcctggcaacaagttgacacaggatgagaaagtgaaaagaactgcaaacgtggttgggctggacgttccgacatag

SEQ ID NO: 5442 - DNA, 468 bp, Artificial Sequence
  Description of Artificial Sequence: Synthetic polynucleotide
atggatagaccaagaacattacgcacatatagaggactcataagagccattttgaaatatgaaaggccaagcaagatagtcaattggggcaatttaagaaaggcaatgataacaaagttggaatatgctaagaaacaaaatcagagagactctcatgagaacatcaacagacagttagagaaatggaaaaaattggatccggtaagcgacagatctttgaatttgtttatagccgactctaagtctttacgttccatattacaaaacgatataaagtgggagaaaaaggtggcccagggacaaaacgttgacgagatattcgaacacgctttggacatcatcaagttcttggacaaccaaagagaatacgaggagttggtcgacagatacaatcctggcaacaagttgacacaggatgagaaagtgaaaagaactgcaaacgtggttgggttggacgttccgacatga

SEQ ID NO: 5443 - DNA, 1551 bp, Saccharomyces cerevisiae
atggcagagaaatcaatatttaatgagcctgatgtggatttccatttgaaattaaatcaacaattatttcatattccttatgaactactgtccaaacgtatcaagcatactcaagcggtaattaataaggaaaccaaatcactacatgaacacacggccgcattaaatcaaatatttgaacataatgacgttgagcacgacgagttggcactagcaaaaataactgaaatgattaggaaagttgaccatatagaaagatttttaaatacgcaaatcaagtcctactgtcagattttgaacagaattaaaaaaaggctggagtttttccacgaactgaaggacatcaagtcacaaaattcaggaacatcgcacaatggaaataatgagggtaccaggactaaattgatacagtggtatcagagttatacaaacattttaattggtgattatctgacgaggaataacccgattaaatacaactcggagacaaaggatcattggaactctggcgtagtgtttttgaaacagagccaactggatgatctcattgattatgatgtcctcttggaggctaatagaatttcgacttcgttactacatgagcgtaatctcttacccctaatttcatggataaacgagaacaaaaagacactgaccaaaaagtcctctatattagagtttcaagcaagattgcaagaatatattgaactactaaaggtggataactataccgacgctatagtatgttttcaaagattccttttaccattcgttaagagcaacttcaccgatttaaaattagcatctggacttctgatttttatcaaatactgtaatgatcaaaagccaacttcttctaccagctctggattcgatactgaagagattaagtctcaaagtttaccaatgaagaaagatcgaatatttcaacatttttttcacaaatctttacctagaattacctccaaacctgcggtgaatacaacagactatgacaagagttccttaataaatttacaaagtggagatttcgaaagatatctgaatttattagatgatcaaagatggtcggtattaaatgatttattcttgagcgacttttattccatgtatggcatatcacaaaatgaccctttattgatatacctgtcactaggtatatcgtctttgaagacaagagattgcctgcacccttctgacgatgaaaatggaaatcaagagacggaaactgccacaacagcagagaaagaagttgaagatttacaactctttacgctacattcactaaaaaggaaaaattgtcccgtttgcagtgagactttcaaaccaataacacaggcattaccatttgctcatcacattcagtctcaattatttgaaaatccaatactattaccaaatggaaatgtttacgacagtaaaaaattgaagaaattggccaaaacattgaaaaagcaaaacttaatttctttaaatccaggtcaaattatggatccagttgacatgaaaatattttgcgaatcagattctatcaaaatgtacccaacctga

SEQ ID NO: 5444 - DNA, 1551 bp, Artificial Sequence
  Description of Artificial Sequence: Synthetic polynucleotide
atggcagagaaatctatatttaatgagcctgatgtggatttccatttgaaattaaatcaacaattatttcatattccttatgaattattatccaaacgtatcaagcatactcaagcggtaattaataaggaaaccaaatctttgcatgaacacacggccgcattaaatcaaatatttgaacataatgacgttgagcacgacgagttggcattggcaaaaataactgaaatgattaggaaagttgaccatatagaaagatttttaaatacgcaaatcaagtcctactgtcagattttgaacagaattaaaaaaaggttagagtttttccacgaattgaaggacatcaagtctcaaaattctggaacaagtcacaatggaaataatgagggtaccaggactaaattgatacagtggtatcagagttatacaaacattttaattggtgattatttgacgaggaataacccgattaaatacaacagtgagacaaaggatcattggaactctggcgtagtgtttttgaaacagagccaattggatgatctcattgattatgatgtcctcttggaggctaatagaatttctacttctttattacatgagcgtaatctcttacccttaatttcttggataaacgagaacaaaaagacattaaccaaaaagtcctctatattagagtttcaagcaagattgcaagaatatattgaattattgaaggtggataactataccgacgctatagtatgttttcaaagattccttttaccattcgttaagagcaacttcaccgatttaaaattagcatctggacttttgatttttatcaaatactgtaatgatcaaaagccaacttcttctaccagctctggattcgatactgaagagattaagtctcaaagtttaccaatgaagaaagatagaatatttcaacatttttttcacaaatctttacctagaattacctccaaacctgcggtgaatacaacagactatgacaagagttccttaataaatttacaaagtggagatttcgaaagatatttgaatttattagatgatcaaagatggtctgtattaaatgatttattcttgagcgacttttattccatgtatggcatatctcaaaatgaccctttattgatatacctttctttgggtatatcttctttgaagacaagagattgccttcacccttctgacgatgaaaatggaaatcaagagacggaaactgccacaacagcagagaaagaagttgaagatttacaactctttacgttgcattctttgaaaaggaaaaattgtcccgtttgcagtgagactttcaaaccaataacacaggcattaccatttgctcatcacattcagtctcaattatttgaaaatccaatattattaccaaatggaaatgtttacgacagtaaaaaattgaagaaattggccaaaacattgaaaaagcaaaacttaatttctttaaatccaggtcaaattatggatccagttgacatgaaaatattttgcgaaagtgattctatcaaaatgtacccaacctga

SEQ ID NO: 5445 - DNA, 1011 bp, Saccharomyces cerevisiae
atggccaggaaattgaagggtaagattgggagtaaaggcctaaaaggtgcattattaaggcacaaggccaaagtgaaattagtgaggaatattgaaagtaagcaaaaacatgaactaagaaagaaaaattcgagcgctaataacaaaaccgtgaagagaaaccaagaattccaaaaacttaatcaagggaaggttatgccctttgagaaggatgaaactttgatgctatgtggtgaaggagatttttcttttgccagatccattgttgaacaaaactatattgaaagtgacaatttaatcataacaagttacgataattctgtgaatgagctgaaattgaaatatccgcatacttttgaggaaaattaccagtacttaaaagatctaaatattccgatatttttccagattgacgttacgaagctcgtaaagagctttaaaatttccaaaaataatacttggtttaaaataatcaacaggcttagcgatcatcgttggggtaacaaacctttacaaaatatagttttcaattttccccataatggaaaaggtattaaggatcaagaaagaaatattagagagcatcaggacttaatttttaactttttccaaaattccttacaattatttaatcttataaacacgaaaattcaaaatgatactcttcgttatacgcaaggctatgatcttaatgaggatactccccaggctaaaaaattgaccgccgaaggttatggtaacatcatactgtcccttttcgatggagagccctatgattcatggcaaatcaaacttttagccaaaaaaaatggactaactctgagcagatcgagcaaattccaatgggaaaattttccaggatatcatcaccggagaacgaatagcgaacaagatactacaaaacctgcgaaagaacgtgatgctaggttctacatctttagtaaatatgtctcgaatagttcaaaacataaccgtaaaagcaaaaaagacacagattctgattcagactaa

SEQ ID NO: 5446 - DNA, 1011 bp, Artificial Sequence
  Description of Artificial Sequence: Synthetic polynucleotide
atggccaggaaattgaagggtaagattgggagtaaaggcttgaaaggtgcattattaaggcacaaggccaaagtgaaattagtgaggaatattgaaagtaagcaaaaacatgaattgagaaagaaaaatagtagcgctaataacaaaaccgtgaagagaaaccaagaattccaaaaacttaatcaagggaaggttatgccctttgagaaggatgaaactttgatgctttgtggtgaaggagatttttcttttgccagatccattgttgaacaaaactatattgaaagtgacaatttaatcataacaagttacgataattctgtgaatgagttgaaattgaaatatccgcatacttttgaggaaaattaccagtacttaaaagatttgaatattccgatatttttccagattgacgttacgaagctcgtaaagagctttaaaatttccaaaaataatacttggtttaaaataatcaacaggcttagcgatcatcgttggggtaacaaacctttacaaaatatagttttcaattttccccataatggaaaaggtattaaggatcaagaaagaaatattagagagcatcaggacttaatttttaactttttccaaaattccttacaattatttaatcttataaacacgaaaattcaaaatgatactcttcgttatacgcaaggctatgatcttaatgaggatactccccaggctaaaaaattgaccgccgaaggttatggtaacatcatattatcccttttcgatggagagccctatgattcttggcaaatcaaacttttagccaaaaaaaatggattaactttaagcagaagcagcaaattccaatgggaaaattttccaggatatcatcacagaagaacgaatagcgaacaagatactacaaaacctgcgaaagaacgtgatgctaggttctacatctttagtaaatatgtctccaatagttctaaacataaccgtaaaagcaaaaaagacacagattctgattctgactga

SEQ ID NO: 5447 - DNA, 2433 bp, Saccharomyces cerevisiae
atgaatactccacagattagtctgtatgaacccgggacaatattaactgtgggatctcatcatgctaagattatcaaataccttacgagtggtggattcgcacaagtatatactgccgaaatttcccctcctgacccatatagcaatgctaacatagcatgcttgaaaagagtcattgtcccccataaacagggtttaaataccttgagagctgaagtggatgctatgaaactccttagaaataataagcatgttgtttcttacatagattcacatgctgcaaggtctgtaaatggtatagcatatgaggtgtttgtgttaatggaattttgtgaacgtggaggtcttatagattttatgaacaccagattacaaaatagattacaagaatctgaaatattagaaattatgagtcaaaccgtccaaggtataactgcaatgcacgctctgcagccgccattgattcatagagatattaagattgagaatgtacttatttctcatgatggcttgtataaagtttgtgattttggttccgtttccggtgtgataaggccacctagaaatactcaagagtttaattatgttcaacacgacatcctaacaaatactacagctcagtatagatcacctgaaatgattgacctgtacagagggttacctatcgacgaaaaatctgatatttgggctcttggtgtctttctttacaaaatatgttactatactacgccgtttgaaaaaagtggtgaagccggtatactacatgcaaggtatcaatatccatcctttccgcagtatagtgacaggttgaaaaatttgatacgtcttatgttaatggaagcaccatctcagaggccaaatatttgtcaagttttagaggaggtttccaggttacagaataagccttgcccgattagaaatttttacttgttaagagcaatgaatcagaatgcgaatacccaattggccggtgaaccgtcttcgacaacttatgttccaacacagaaatttattcccgtacaaagccttcagagcatcaaccagccaccaaatatgatgcctgtaactcacgtcagtactactcctaatttgggtactttccctatatctattaatgataataacaagacagaagtaacggcgcatgctggcttacaggttggaagccattcaaatttgactagtcccttaatgaaaacaaaatccgttccactttctgatgaatttgcatcactatattataaagagctacacccttttcaaaagtctcagactttcaaatcagtagaaagtttccaatccccacaaaggaagtctatgcctccattatcgcttactcctgttaataatgacatttttgatagagtttcggcaataaatcgtccaaataactacgttgattctgagacgcaaactatagataacatggctgtgccaaacttaaaactatctcccaccattacaagcaaatcactaagctccacaaaagaaattgctgctccagataatataaatggaagcaagattgtgcgttcactaagctctaagttaaaaaaggttattactggtgaatctcgcggcaattctccgattaaatcaaggcaaaatactggtgatagtatcagatcagcatttggtaagcttcgtcatgggtttacaggaaactcagtgaacaatagcaggtctgcttcctttgataataacaatgtcaacggcaatggtaacaatacaaacaggcgattagtttcgtcttcaacctcctcctttcctaaatttaattctgataccaaaagaaaagaggaatcagacaagaatcagagactggaaaaacgtcgcagtatgcctccttcaattttatcagattttgaccagcatgagaggaataactcgagaactggatcaagggactattacaggtctcattctccagtgaagaaaactcaagcatcagctaaaacgacatcaaagcctactttgataccagataatggcaacgttaatataaatcaagaaaagaaggaatcaattcaaagaagagtgcataacttactaaagagttctgatgatccggtaacgtataaatccgcatccgggtatggtaaatatacagatattggtacagaaacttccaatcgacattcaagtgtaagaataacaccaatcacagaagaaaagtttaagaaaacccttaaggatggtgttttggacatcaaaacgaaaagcaacggtaaagataaatcaagaccaccacgtccaccaccaaaaccactacatttaaggacagaaattcagaagataagaaactttagtcgtttacaatcaaagaaactgccgattgaaagaatttccagcgaagccacagaaactattgttgatgttaacgtagatgatttagaagccgattttagaaaaaggtttcccagcaaagtttaa

SEQ ID NO: 5448 - DNA, 2433 bp, Artificial Sequence
  Description of Artificial Sequence: Synthetic polynucleotide
atgaatactccacagattagtctttatgaacccgggacaatattaactgtgggatctcatcatgctaagattatcaaataccttacgagtggtggattcgcacaagtatatactgccgaaatttcccctcctgacccatatagcaatgctaacatagcatgcttgaaaagagtcattgtcccccataaacagggtttaaataccttgagagctgaagtggatgctatgaaactccttagaaataataagcatgttgtttcttacatagattctcatgctgcaaggtctgtaaatggtatagcatatgaggtgtttgtgttaatggaattttgtgaacgtggaggtcttatagattttatgaacaccagattacaaaatagattacaagaatctgaaatattagaaattatgagtcaaaccgtccaaggtataactgcaatgcacgctttacagccgccattgattcatagagatattaagattgagaatgtacttatttctcatgatggcttgtataaagtttgtgattttggttccgtttccggtgtgataaggccacctagaaatactcaagagtttaattatgttcaacacgacatcttaacaaatactacagctcagtatagatctcctgaaatgattgacttgtacagagggttacctatcgacgaaaaatctgatatttgggctcttggtgtctttctttacaaaatatgttactatactacgccgtttgaaaaaagtggtgaagccggtatattacatgcaaggtatcaatatccatcctttccgcagtatagtgacaggttgaaaaatttgatacgtcttatgttaatggaagcaccatctcagaggccaaatatttgtcaagttttagaggaggtttccaggttacagaataagccttgcccgattagaaatttttacttgttaagagcaatgaatcagaatgcgaatacccaattggccggtgaaccgtcttctacaacttatgttccaacacagaaatttattcccgtacaaagccttcagagcatcaaccagccaccaaatatgatgcctgtaactcacgtcagtactactcctaatttgggtactttccctatatctattaatgataataacaagacagaagtaacggcgcatgctggcttacaggttggaagccattctaatttgactagtcccttaatgaaaacaaaatccgttccactttctgatgaatttgcatctttgtattataaagagttgcacccttttcaaaagtctcagactttcaaatctgtagaaagtttccaatccccacaaaggaagtctatgcctccattatctcttactcctgttaataatgacatttttgatagagtttctgcaataaatcgtccaaataactacgttgattctgagacgcaaactatagataacatggctgtgccaaacttaaaattatctcccaccattacaagcaaatctttaagctccacaaaagaaattgctgctccagataatataaatggaagcaagattgtgcgttctttaagctctaagttaaaaaaggttattactggtgaatctcgcggcaattctccgattaaatctaggcaaaatactggtgatagtatcagaagtgcatttggtaagcttcgtcatgggtttacaggaaactctgtgaacaatagcaggtctgcttcctttgataataacaatgtcaacggcaatggtaacaatacaaacaggagattagtttcttcttccacctcctcctttcctaaatttaattctgataccaaaagaaaagaggaaagtgacaagaatcagagattagaaaaacgtcgcagtatgcctccttctattttaagtgattttgaccagcatgagaggaataactctagaactggatctagggactattacaggtctcattctccagtgaagaaaactcaagcatctgctaaaacgacatccaagcctactttgataccagataatggcaacgttaatataaatcaagaaaagaaggaaagtattcaaagaagagtgcataacttattgaagagttctgatgatccggtaacgtataaatccgcatccgggtatggtaaatatacagatattggtacagaaacttccaatagacattctagtgtaagaataacaccaatcacagaagaaaagtttaagaaaacccttaaggatggtgttttggacatcaaaacgaaaagcaacggtaaagataaatctagaccaccacgtccaccaccaaaaccattgcatttaaggacagaaattcagaagataagaaactttagtcgtttacaatccaagaaattaccgattgaaagaatttccagcgaagccacagaaactattgttgatgttaacgtagatgatttagaagccgattttagaaaaaggtttcccagcaaagtttga

SEQ ID NO: 5449 - DNA, 1116 bp, Saccharomyces cerevisiae
atgtttagatctgttgctactagattatctgcctgccgtgggttagcatctaacgctgctcgcaaatcactcactattggtcttatccccggtgacggtatcggtaaggaagtcattcctgctggtaagcaagttttggaaaaccttaactccaagcacggcctaagcttcaactttattgatctctacgccggtttccaaacattccaagaaacaggaaaggcgttgcctgatgagactgttaaagtgttgaaggaacaatgtcaaggtgctcttttcggtgcagttcagtctccaactactaaggtggaaggttactcctcaccaattgttgctctaaggagggaaatgggccttttcgctaatgttcgtcctgttaagtctgtagagggagaaaagggtaaaccaattgacatggttatcgtcagagaaaatactgaggacctgtacattaaaattgaaaaaacatacattgacaaggccacaggtacaagagttgctgatgccacaaagagaatatccgaaattgcaacaagaagaattgcaaccattgcattagatattgccttgaaaagattacaaacaagaggccaagccactttgacagtgactcataaatcaaatgttctatctcaaagtgatggtctattcagagaaatctgtaaggaagtctacgaatctaacaaggacaagtacggtcaaatcaaatataacgaacaaattgtggattccatggtttataggctgttcagagaaccacaatgttttgatgtgatagtggcaccaaacctatacggggatatattatctgacggtgctgctgctttagtcggttcattaggtgttgttccaagcgccaacgtaggtccagaaattgtcattggtgaaccatgccatggttctgcaccagatattgctggtaaaggtattgctaacccaatcgccactataagatctactgctttgatgttggaattcttgggccacaacgaagctgcccaagatatctacaaggctgttgatgctaacttaagagagggttctatcaagacaccagatttaggtggtaaggcttctactcaacaagtcgttgacgacgttttgtcgagattatag

SEQ ID NO: 5450 - DNA, 1116 bp, Artificial Sequence
  Description of Artificial Sequence: Synthetic polynucleotide
atgtttagatctgttgctactagattatctgcctgccgtgggttagcatctaacgctgctcgcaaatctctcactattggtcttatccccggtgacggtatcggtaaggaagtcattcctgctggtaagcaagttttggaaaaccttaactccaagcacggcttaagcttcaactttattgatctctacgccggtttccaaacattccaagaaacaggaaaggcgttgcctgatgagactgttaaagtgttgaaggaacaatgtcaaggtgctcttttcggtgcagttcagtctccaactactaaggtggaaggttactcctctccaattgttgctttgaggagggaaatgggccttttcgctaatgttcgtcctgttaagtctgtagagggagaaaagggtaaaccaattgacatggttatcgtcagagaaaatactgaggacttgtacattaaaattgaaaaaacatacattgacaaggccacaggtacaagagttgctgatgccacaaagagaatatccgaaattgcaacaagaagaattgcaaccattgcattagatattgccttgaaaagattacaaacaagaggccaagccactttgacagtgactcataaatctaatgttttatctcaaagtgatggtcttttcagagaaatctgtaaggaagtctacgaatctaacaaggacaagtacggtcaaatcaaatataacgaacaaattgtggattccatggtttataggttgttcagagaaccacaatgttttgatgtgatagtggcaccaaacctttacggggatatattatctgacggtgctgctgctttagtcggttctttaggtgttgttccaagcgccaacgtaggtccagaaattgtcattggtgaaccatgccatggttctgcaccagatattgctggtaaaggtattgctaacccaatcgccactataagatctactgctttgatgttggaattcttgggccacaacgaagctgcccaagatatctacaaggctgttgatgctaacttaagagagggttctatcaagacaccagatttaggtggtaaggcttctactcaacaagtcgttgacgacgttttgtccagattatga

SEQ ID NO: 5451 - DNA, 795 bp, Saccharomyces cerevisiae
atgaagatacaaacaaatgctgtaaacgtccttcaacggacgtccgcttacttgaaatcaggattgttgaaagaaacacctgcgtggtacaacgttgtagcgtctatcccaccatcaaccaagtttacacgtgaacctcgttttaagaatccttccaatggacacatcataggaaaacttgttgacgtaacagaacaaccgcatgccaacaataagggactttacaagacaagacccaactcgagcgacaaaagggtgggcgtgaaaaggctgtacaggccacctaaactaacatacgttgaggataggctcagatcgctcttttacaaacaacatccatgggagttgtcgagacctaagattttagtggaaaacgaaattggtgatgaaaactacgattggagccatatgcttcagataggaagaccactcgatggtgaaagtgttatccagcgaactatgtacttaatcaaaacgaagcagtatggggacatggtcgaagcatatgaccatgccagatatgaattctatgcgttgagaatgcaagaagaaacagagcagcaagtggctttggaagaagcggagatgttcggatccctctttggagtttctgccattgaacatggtatacaaaaggaacaagaggtcctagacgtctgggaaaagaaggtagttgaagaaactgaactaatggcagcaaggacaagtaaccctgcagggtcgtggaaggacgacactacattgaatacggcgcaagaagaagaatccaccacttccgagaacctccacttctag

SEQ ID NO: 5452 - DNA, 795 bp, Artificial Sequence
  Description of Artificial Sequence: Synthetic polynucleotide
atgaagatacaaacaaatgctgtaaacgtccttcaaagaacgtccgcttacttgaaaagtggattgttgaaagaaacacctgcgtggtacaacgttgtagcgtctatcccaccatctaccaagtttacacgtgaacctcgttttaagaatccttccaatggacacatcataggaaaacttgttgacgtaacagaacaaccgcatgccaacaataagggactttacaagacaagacccaactccagcgacaaaagggtgggcgtgaaaaggttgtacaggccacctaaattaacatacgttgaggataggctcagaagtctcttttacaaacaacatccatgggagttgtccagacctaagattttagtggaaaacgaaattggtgatgaaaactacgattggagccatatgcttcagataggaagaccactcgatggtgaaagtgttatccagagaactatgtacttaatcaaaacgaagcagtatggggacatggtcgaagcatatgaccatgccagatatgaattctatgcgttgagaatgcaagaagaaacagagcagcaagtggctttggaagaagcggagatgttcggatccctctttggagtttctgccattgaacatggtatacaaaaggaacaagaggtcttggacgtctgggaaaagaaggtagttgaagaaactgaattgatggcagcaaggacaagtaaccctgcagggtcctggaaggacgacactacattgaatacggcgcaagaagaagaatccaccacttccgagaacctccacttctga

SEQ ID NO: 5453 - DNA, 1902 bp, Saccharomyces cerevisiae
atggtgcaaatgagatccaaaaacatggcatacgagtcgggaactaataactatagtgatacaatagctaatggaaataccctgccgccgcgaagcaagaagggacacagtggacgtagaaagaggagcgaaactttgcccatagcgtgtaataatttttgtgttacaagacagattgatgacgatgaacaagcgttcaaaatgctagataaagtgagtcatctgaaaaaattcagtgctgaagacggtgatgataacaatatattcgtccaatgggccgatgatattacagatatcttatttggactatgctgtacaggaacgtttttgaaacttcttataagctctgcattatccggccgggctaagacatggtttgattctacaacggagggaatcgatgaccatgtgataaaggcttacagttttgaaaaatttcttgctctactatcagaagaatttgatggagcaagatctttaagaagggaaatttttacggaactattgacgttgtccattgattctgagaagtcattagaagcatttgcccataaatcgggacgtctaactccatattatctgtcttctggtgctgcgttggatctattcctcacaaaattggagccacagttgcaaaagcaactggaaaattgtgcattcccaatgactttgaatttagcactattgataactgcctgtgaatttgcgaagagagcatctaatcataaaaaataccggtataaaaatacgagggattccgacatttgtactccaaagagtaagaatactgctatcgttagcaaattatcgaatactaaaactataagtaagaataaggttattgaaaagagtgataagaaaaattactttgataagaacagtcaacacatacccgatcctaaacgtcggaaacaaaatgaacctggaatgcggctctttcttgtcatggatgaggaaaagaatattcttacatctaggaatgtttctgccaatgcatacacatcaaaaaatggacacaccaatttaagcgatctccatacgaatcttaaaaacagtaaatctcaacaatgtgcagtggagccaatatcgattttgaatagcggcagtttggttacaggcacaattaatattgacctaattaatgatgaagttttaggcacgaaggaggaaactacaacttatgatgaacgtatggatggaaactcacgttctttgaatgagaggtgctgcgccgtcaagaaaaactcactacaacctataacatcaaatatatttcaaaaaaacgctgaaattcagggcacaaagatcgggagcgttctagatagtggtatatcgaatagcttctcctcaacagagtatatgtttccgcccacaagctctgcgacagttagtaatccagtaaaaaaaaatgaaatcagcaagagtagccaggttaaagatattgcccagtttaatccgttcatgacaaacgaaaaggagaaaaagttaaatccatcagaaagcttcaaaagccctggagtgtctatggaaataaataggctaagccgtatcgcgggcctcagaaatattccaggaaacatttacgaagacagcaaaatgcttaatttgaaaactcgaaagtgctacccactgcataactttgctgtgcgcacgaggagtgcacattttaatgaccgtccttctaattatatatcaccgcatgaaaccataaatgcgactctccgatcacctgcaagctttgatagtattcaatgtattactaggtccaagagggtagacgcagagaccaataaagcaactggttcagcaaaaagcgaaaatatagaaactaagagcagaaagttccctgaagtaataaacccttttcttgtgaacacaacgaacaagaaagaaagcgattaa

SEQ ID NO: 5454 - DNA, 1902 bp, Artificial Sequence
  Description of Artificial Sequence: Synthetic polynucleotide
atggtgcaaatgagatccaaaaacatggcatacgagagtggaactaataactatagtgatacaatagctaatggaaataccttaccgccgagaagcaagaagggacacagtggacgtagaaagaggagcgaaactttgcccatagcgtgtaataatttttgtgttacaagacagattgatgacgatgaacaagcgttcaaaatgcttgataaagtgagtcatttgaaaaaattcagtgctgaagacggtgatgataacaatatattcgtccaatgggccgatgatattacagatatcttatttggattatgctgtacaggaacgtttttgaaacttcttataagctctgcattatccggcagagctaagacatggtttgattctacaacggagggaatcgatgaccatgtgataaaggcttacagttttgaaaaatttcttgctttgttatctgaagaatttgatggagcaagatctttaagaagggaaatttttacggaattattgacgttgtccattgattctgagaagtctttagaagcatttgcccataaaagtggacgtttgactccatattatttatcttctggtgctgcgttggatcttttcctcacaaaattggagccacagttgcaaaagcaattggaaaattgtgcattcccaatgactttgaatttagcattattgataactgcctgtgaatttgcgaagagagcatctaatcataaaaaatacagatataaaaatacgagggattccgacatttgtactccaaagagtaagaatactgctatcgttagcaaattatccaatactaaaactataagtaagaataaggttattgaaaagagtgataagaaaaattactttgataagaacagtcaacacatacccgatcctaaacgtcgtaaacaaaatgaacctggaatgaggctctttcttgtcatggatgaggaaaagaatattcttacatctaggaatgtttctgccaatgcatacacaagtaaaaatggacacaccaatttaagcgatctccatacgaatcttaaaaacagtaaatctcaacaatgtgcagtggagccaatatctattttgaatagcggcagtttggttacaggcacaattaatattgacttgattaatgatgaagttttaggcacgaaggaggaaactacaacttatgatgaacgtatggatggaaactctcgttctttgaatgagaggtgctgcgccgtcaagaaaaactctttacaacctataacaagtaatatatttcaaaaaaacgctgaaattcagggcacaaagatcgggagcgttttggatagtggtatatccaatagcttctcctctacagagtatatgtttccgcccacaagctctgcgacagttagtaatccagtaaaaaaaaatgaaatcagcaagagtagccaggttaaagatattgcccagtttaatccgttcatgacaaacgaaaaggagaaaaagttaaatccatctgaaagcttcaaaagccctggagtgtctatggaaataaataggttgagccgtatcgcgggcctcagaaatattccaggaaacatttacgaagacagcaaaatgcttaatttgaaaactagaaagtgctacccattgcataactttgctgtgcgcacgaggagtgcacattttaatgaccgtccttctaattatatatctccgcatgaaaccataaatgcgactctcagatctcctgcaagctttgatagtattcaatgtattactaggtccaagagggtagacgcagagaccaataaagcaactggttctgcaaaaagcgaaaatatagaaactaagagcagaaagttccctgaagtaataaacccttttcttgtgaacacaacgaacaagaaagaaagcgattga

SEQ ID NO: 5455 - DNA, 2166 bp, Saccharomyces cerevisiae
atgagtgacagttctgtgagggaaaagaatgataatttccgtggctatcggaaaagaggaagacaagaactgaggaagattaaaagatcttctgccagaactgaaggcggaagcacagaaacattagaggacgtagcagaagatattgaccatagatccgatgaggatgaagtgtccgatgtcgacagtggcgatgatttcgatattgaggatgaagagggtaaaaaggaaaaagtttatgacgctttattgacgattctcaaatctgaacatccagagccaaaaagaagaaggcgagaggctgacgagagtaacaaagctcctgccgaagttggggaggatgagcacgaaaatacagaacatggaccagtggatgatcaattggagatagagaatggccttttgggtaatcacgaggatgataacgacgatgacagcagtggagacgaaaaagatatagacagtgaagatgagcaagatcctttcgagtctcatttcaaccaagttccggagaaattcgttgataagttgtcgaatgctttcaagaccaaaagtgtaaaatacaaatccgtaaagggctcactaagtgacagtgaatcatatatatatgctaaaccggtagtaattggtgaggaagcattggtggaaagtccgtacaggtcatcatctatatattcatactttttgaaacaaaggctaaaagtgcaaaatggactattggataaaaaaactgatccattgactgctttgcaaaaaaaattagtagaccccatgtttcagtataaagacatattatacgagtatgactcctacgaaaaggacgaagacgagtacagagatttatatgctttgcatgttttgaatcacatctacaagacaagagatagaatcttgaaaaataatcaaagattacaggataacccagacactgaacacctagatcaaggttttacaagaccaaaagtgttaattgtagtccctactagagaggtggcgtaccgcgttgtagataagataatttcaaaatctggtatagatcaggttgacaagaagggaaagttctacgaccaattccgtgacgactccttacctccaaagtccaaaccaaaatctttccaacacatatttagggggaacaccaacgatttttttgttgtcggtctcaaattcacaagaaaggctataaaactttatagcaatttttaccagtctgacattattgtatgttcgccattgggtattcaaatgatcttagaaaatacagataaaaaaaagaggcaggacgattttttgtcctcaatagagttgatggtgattgatcaattacattcaatagaataccagaacatatctcatattttcaccatctttgaccatcttaacaaaatcccggatcaacaacatgaagctgactttagcagaattcggatgtggtacattaatgaacaagctaagctcttcagacagacaatggtattcacaaaatacatctcgccagcggctaattcattaatcaatggtagatgccgtaacatggcaggaagatggaagaatcacaaggtaataggatcagaaaactccagtattgggcaatccggtttgaaaatcaggcaaatctttcaaagatttgacattattgggaattcgattattgaagagcctgactacagatttaaattttttacaagtgtcatcattcctggtattgtcaaatccaccgggtatgaagacggaatactgatttacattcctgattacactgatttcattcgtattagaaactacatgaaagagaagacgacgattttatttggggatataaatgagtactctagccaaagacagctcaatgcaaataggtcattgtttcaacaggggcgtctaaaagttatgttgtatacggaaagactgcaccattatagacgttatgaaatcaagggtgtcaagagcgtcgttttttataagcctccaaacaatcctgaattttacaatgaagttgtcagatttattggtaagaacgcctttctaggtaataccgatttaaacatatccactgttagatgcatttatagcaagcttgatggtctttcactcgaaagaattgtggggacgaaaagagcagctgtattatcgcatgcacaaaaggaaatttatgaatttaaataa

SEQ ID NO: 5456 - DNA, 2166 bp, Artificial Sequence
  Description of Artificial Sequence: Synthetic polynucleotide
atgagtgacagttctgtgagggaaaagaatgataatttccgtggctatagaaaaagaggaagacaagaattgaggaagattaaaagatcttctgccagaactgaaggcggaagcacagaaacattagaggacgtagcagaagatattgaccatagatccgatgaggatgaagtgtccgatgtcgacagtggcgatgatttcgatattgaggatgaagagggtaaaaaggaaaaagtttatgacgctttattgacgattctcaaatctgaacatccagagccaaaaagaagaaggagagaggctgacgagagtaacaaagctcctgccgaagttggggaggatgagcacgaaaatacagaacatggaccagtggatgatcaattggagatagagaatggccttttgggtaatcacgaggatgataacgacgatgacagcagtggagacgaaaaagatatagacagtgaagatgagcaagatcctttcgagtctcatttcaaccaagttccggagaaattcgttgataagttgagcaatgctttcaagaccaaaagtgtaaaatacaaatccgtaaagggctccttgagtgacagtgaaagttatatatatgctaaaccggtagtaattggtgaggaagcattggtggaaagtccgtacaggagttcttctatatattcttactttttgaaacaaaggttgaaagtgcaaaatggattattggataaaaaaactgatccattgactgctttgcaaaaaaaattagtagaccccatgtttcagtataaagacatattatacgagtatgactcctacgaaaaggacgaagacgagtacagagatttatatgctttgcatgttttgaatcacatctacaagacaagagatagaatcttgaaaaataatcaaagattacaggataacccagacactgaacacttggatcaaggttttacaagaccaaaagtgttaattgtagtccctactagagaggtggcgtaccgcgttgtagataagataatttccaaatctggtatagatcaggttgacaagaagggaaagttctacgaccaattccgtgacgactccttacctccaaagtccaaaccaaaatctttccaacacatatttagggggaacaccaacgatttttttgttgtcggtctcaaattcacaagaaaggctataaaactttatagcaatttttaccagtctgacattattgtatgttctccattgggtattcaaatgatcttagaaaatacagataaaaaaaagaggcaggacgattttttgtcctccatagagttgatggtgattgatcaattacattccatagaataccagaacatatctcatattttcaccatctttgaccatcttaacaaaatcccggatcaacaacatgaagctgactttagcagaattagaatgtggtacattaatgaacaagctaagctcttcagacagacaatggtattcacaaaatacatctctccagcggctaattctttaatcaatggtagatgccgtaacatggcaggaagatggaagaatcacaaggtaataggatctgaaaactccagtattgggcaatccggtttgaaaatcaggcaaatctttcaaagatttgacattattgggaattctattattgaagagcctgactacagatttaaattttttacaagtgtcatcattcctggtattgtcaaatccaccgggtatgaagacggaatattgatttacattcctgattacactgatttcattcgtattagaaactacatgaaagagaagacgacgattttatttggggatataaatgagtactctagccaaagacagctcaatgcaaataggtctttgtttcaacaggggcgtttgaaagttatgttgtatacggaaagattgcaccattatagacgttatgaaatcaagggtgtcaagagcgtcgttttttataagcctccaaacaatcctgaattttacaatgaagttgtcagatttattggtaagaacgcctttttaggtaataccgatttaaacatatccactgttagatgcatttatagcaagcttgatggtctttctctcgaaagaattgtggggacgaaaagagcagctgtattatctcatgcacaaaaggaaatttatgaatttaaatga

SEQ ID NO: 5457 - DNA, 1476 bp, Saccharomyces cerevisiae
atgaccagtttgtccaaaagcttcatgcagagtggacgaatctgcgcagcatgtttctatctgttattcacactactttcaattccaatctcgtttaaagttggtggtttggaatgcgggctttccttcacggtgacactgttcactttatatttcataactacgactcttaacgtgttggcaagacgacatggaggaagactatacattttttttaccaactgtctgtattactcacaacattttatcattgcatctttgctatacctgtttttgtctggattttctaatgatgagttgggaaacgttctgaaaaataaatataatgagtcggagtcgttcctggaagctttgaaaaatagcttgaattccaatcaaattaactacgtcttatattattactactatcgatttgttgtacaaccgtggcaattcgtgcttaccaagtccacacctttttttactctatcggaaggttttttcactattttagccattcaggccgtcggggaaactaatagatggttatcaaatgacttgaattcaaacacgtggattatttcctcattgttaacctccggaggtgtgattaccgcatcgctgtactatttgtatcggatttatgtcacccccatatggccgttatccatccaaacggcgtccttattaggacttgttttgtctatggtatgtggactggggttgtatggtattgtgagtcaaaaaggatccgtcatagagagctctttattttttgcgtatattgttcgttgtatttatgaaatttcccccaaattagctactaccgcgactgatgaaattttaaatttgttcaaagacgtctggcagaaacatcaaagaaatctgcccacagctgacaatcttttgtgctactttcataatgtcatattgaaaaatgcagaggtgttatgggggtcctttattcctagaggaagaaagaaaaccggtgattttcatgataaactcattagcattctatcattcgaaaaagtatccttgatatctaaaccattttggaaatttttcaagaatttcacctttagtgttccgctatccattaatgaattttgtcaagttacaattaagatggcaagcgaatcagtttccccagctatagtaatcaatttatgctttagagttctgatgttttactcggcaacgaggattattccagcattacaaagaaaaaatgacaaacagttgcgcaagagtcgcaggatcatgaagggattgtattggtacagtccttgcatattaattgctatgtatactcacctgattttacaatattcaggtgagctaaagaaagacctgtgcatatggggttgcagtgaaaagtggtttggcgtagatcaaccagaaattatagtagattcatggggattttggaactggtgcaacattttctgtactattttggtatacgctacagaattaataggttctggtagttga

SEQ ID NO: 5458 - DNA, 1476 bp, Artificial Sequence
  Description of Artificial Sequence: Synthetic polynucleotide
atgaccagtttgtccaaaagcttcatgcagagtggaagaatctgcgcagcatgtttctatcttttattcacattgctttctattccaatctcttttaaagttggtggtttggaatgcgggctttccttcacggtgacattgttcactttatatttcataactacgactcttaacgtgttggcaagaagacatggaggaagattatacattttttttaccaactgtttgtattactctcaacattttatcattgcatctttgttgtacttgtttttgtctggattttctaatgatgagttgggaaacgttttgaaaaataaatataatgagagtgagagtttcttggaagctttgaaaaatagcttgaattccaatcaaattaactacgtcttatattattactactataggtttgttgtacaaccgtggcaattcgtgcttaccaagtccacacctttttttactttatctgaaggttttttcactattttagccattcaggccgtcggggaaactaatagatggttatccaatgacttgaatagcaacacgtggattatttcctctttgttaacctccggaggtgtgattaccgcatctttgtactatttgtatagaatttatgtcacccccatatggccgttatccatccaaacggcgtccttattaggacttgttttgtctatggtatgtggattagggttgtatggtattgtgagtcaaaaaggatccgtcatagagagctctttattttttgcgtatattgttcgttgtatttatgaaatttcccccaaattagctactaccgcgactgatgaaattttaaatttgttcaaagacgtctggcagaaacatcaaagaaatttgcccacagctgacaatcttttgtgctactttcataatgtcatattgaaaaatgcagaggtgttatgggggtcctttattcctagaggaagaaagaaaaccggtgattttcatgataaactcattagcattttatctttcgaaaaagtatccttgatatctaaaccattttggaaatttttcaagaatttcacctttagtgttccgttatccattaatgaattttgtcaagttacaattaagatggcaagcgaatctgtttccccagctatagtaatcaatttatgctttagagttttgatgttttacagtgcaacgaggattattccagcattacaaagaaaaaatgacaaacagttgcgcaagagtcgcaggatcatgaagggattgtattggtacagtccttgcatattaattgctatgtatactcacttgattttacaatattctggtgagttgaagaaagacctttgcatatggggttgcagtgaaaagtggtttggcgtagatcaaccagaaattatagtagattcttggggattttggaactggtgcaacattttctgtactattttggtatacgctacagaattaataggttctggtagttga

SEQ ID NO: 5459 - DNA, 618 bp, Saccharomyces cerevisiae
atgcaacgtacgagggaattggaatcgagtgtcgcaatagaccaaactgaagtaccccgatctagattttttataatggttaaaaaattatcaagagttgccgatatcgtctatatagttgacacatttctaattccgccattgcatcctttaaagaagcagcatccaaaagttgcaaagtttttgaaggtacaacttgtctttgatttgatatcactgtttatttttgctacgcaccaactcctactgctagaagatggtaactttgggaagcactacttcaaaaggaaaacaaaacggtgctcgaaattttcgtgctctcgctgtaatgcaaacgctcaccaccccaagtggttcaaattcaaacattcactcctatgtctaggaacgttctgttttggggtttattcgttggtaaagattaataagttctttaaaactgatcagactgttgatctaaacagactcttagagctattcttttggcaacttaatgcaattcttaatatgaagttattcgccttttacggggaccatttagaatcacatagtgcgcctcttgatgtgtatgaggattcttttgcaaacaaatcatcgtcaggcggtgacgaggtttaa

SEQ ID NO: 5460 - DNA, 618 bp, Artificial Sequence
  Description of Artificial Sequence: Synthetic polynucleotide
atgcaacgtacgagggaattggaaagtagtgtcgcaatagaccaaactgaagtacccagatctagattttttataatggttaaaaaattatctagagttgccgatatcgtctatatagttgacacatttttgattccgccattgcatcctttaaagaagcagcatccaaaagttgcaaagtttttgaaggtacaacttgtctttgatttgatatctttatttatttttgctacgcaccaactcttattattggaagatggtaactttgggaagcactacttcaaaaggaaaacaaaaagatgctccaaattttcttgctctcgctgtaatgcaaacgctcaccaccccaagtggttcaaattcaaacattctctcttatgtttaggaacgttctgttttggggtttattctttggtaaagattaataagttctttaaaactgatcagactgttgatttgaacagactcttagagcttttcttttggcaacttaatgcaattcttaatatgaagttattcgccttttacggggaccatttagaaagtcatagtgcgcctcttgatgtgtatgaggattcttttgcaaacaaaagctcttctggcggtgacgaggtttga

SEQ ID NO: 5461 - DNA, 1473 bp, Saccharomyces cerevisiae
atggaggctacatcaagtgctctttcgtctacggcgaatctcgttaagacaatagttggcgctggtacacttgccattccgtacagttttaaaagcgatggtgttctggtaggggttattcttacattattggcggcggtaacatccggtctgggtctctttgtgctatcgaaatgttccaagaccttaattaatccaagaaactcttctttcttcacattatgcatgctcacctatcccactttggccccaatttttgatttggcaatgatagttcaatgctttggtgtgggcttaagttacttagttcttattggtgatctctttccaggactgtttggtggtgaaagaaattattggataattgcatcagctgtaatcatcattcccctatgtttagtgaagaaactagatcaattgaagtattctagtattctaggtcttttcgcgctagcatacatatcaattctggtgttcagtcattttgtgtttgagctgggaaagggtgaattaacaaatatattaagaaatgacatatgctggtggaaaattcacgactttaaaggattattatcaacttttagcattataatttttgcttttacgggatcaatgaacctattccccatgataaatgaattaaaagacaacagcatggaaaatatcactttcgttatcaataattcgatatccttatcaacagcactatttttgatcgttggtttatcaggatatttaaccttcggtaatgaaaccttgggtaatttaatgttgaactacgatcctaactcaatttggatagtaattggcaaattctgtcttggctcaatgttaattctttccttcccgcttctctttcatccgctgcgcatagcagttaacaatgtcatcatctggattgagatcacttatggtggggcaaatcccgaagaggacccacaagtttcggaatacactcgtgcttccaacctaagaccaattagcatgactgtggaagatccagcccagcccagtgatgcactagacgcaacttcttataacgagcaagaatgtttactacctaacgggaactttgataatggttcaattgaaagtcaagagaacaataatgatgaaagagggactatggcggtcgccggggataacgagcatcatgcgccatttgttaagtctagattttactggattactgcattattactaataagcatgtataccttggcgttgtctgtccagtcatttgcactggttctttcatttgtaggggctacaggttcaacgtctatttcattcactttacctggattattaggttacaaattaataggcttggattctttggctattgggaagatgattccaccaaaagatagattttacaaaaggtgcagcttattgctagtcttctacggactatctgtgatgtttttgtcattgtatgtaactgtattcaaccgttcagatgaagcctaa

SEQ ID NO: 5462 - DNA, 1473 bp, Artificial Sequence
  Description of Artificial Sequence: Synthetic polynucleotide
atggaggctacatctagtgctctttcttctacggcgaatctcgttaagacaatagttggcgctggtacacttgccattccgtacagttttaaaagcgatggtgttttggtaggggttattcttacattattggcggcggtaacatccggtttaggtctctttgtgttatccaaatgttccaagaccttaattaatccaagaaactcttctttcttcacattatgcatgctcacctatcccactttggccccaatttttgatttggcaatgatagttcaatgctttggtgtgggcttaagttacttagttcttattggtgatctctttccaggattatttggtggtgaaagaaattattggataattgcatctgctgtaatcatcattcccttatgtttagtgaagaaattggatcaattgaagtattctagtattttgggtcttttcgcgttggcatacatatctattttggtgttcagtcattttgtgtttgagttaggaaagggtgaattaacaaatatattaagaaatgacatatgctggtggaaaattcacgactttaaaggattattatctacttttagcattataatttttgcttttacgggatccatgaacttgttccccatgataaatgaattaaaagacaacagcatggaaaatatcactttcgttatcaataattctatatccttatctacagcattatttttgatcgttggtttatctggatatttaaccttcggtaatgaaaccttgggtaatttaatgttgaactacgatcctaactctatttggatagtaattggcaaattctgtcttggctctatgttaattctttccttcccgcttctctttcatccgttacgcatagcagttaacaatgtcatcatctggattgagatcacttatggtggggcaaatcccgaagaggacccacaagtttctgaatacactcgtgcttccaacttgagaccaattagcatgactgtggaagatccagcccagcccagtgatgcattggacgcaacttcttataacgagcaagaatgtttattgcctaacgggaactttgataatggttccattgaaagtcaagagaacaataatgatgaaagagggactatggcggtcgccggggataacgagcatcatgcgccatttgttaagtctagattttactggattactgcattattattgataagcatgtataccttggcgttgtctgtccagtcttttgcattggttctttcttttgtaggggctacaggttctacgtctatttctttcactttacctggattattaggttacaaattaataggcttggattctttggctattgggaagatgattccaccaaaagatagattttacaaaaggtgcagcttattgttggtcttctacggattatctgtgatgtttttgtctttgtatgtaactgtattcaaccgttctgatgaagcctga

SEQ ID NO: 5463 - DNA, 474 bp, Saccharomyces cerevisiae
atgtctgctaaacccgctactgacgatgccaaagatgaacttctatcaccatttcgccggctatatgcattgacaaggacaccttatcctgcgctcgcaaacgcagcactattagcatccactccggtgctatccccaagctttaaagtgcctccaacgcaatctcctgccctctcgataccaatgtctagggtattctctaaatcttctactgccagaatcggtataactactaaaaccgcccttttcttttctacaatgcaagctataggtgcatacatgatctatgacaacgacttggaaaatggggctggcttcattgctacatggtccgccttatatttgattgtagggggcaagaagtcctttagtgcgttaagatatggaagaacttggccgttggtgctatcctcggtttcattggccaacgcagtcctttatggccaacggttccttgctaccggattccagtga

SEQ ID NO: 5464 - DNA, 474 bp, Artificial Sequence
  Description of Artificial Sequence: Synthetic polynucleotide
atgtctgctaaacccgctactgacgatgccaaagatgaacttttatctccatttcgccgtttatatgcattgacaaggacaccttatcctgcgctcgcaaacgcagcattattagcatccactccggtgttatccccaagctttaaagtgcctccaacgcaatctcctgccctctccataccaatgtctagggtattctctaaatcttctactgccagaatcggtataactactaaaaccgcccttttcttttctacaatgcaagctataggtgcatacatgatctatgacaacgacttggaaaatggggctggcttcattgctacatggtccgccttatatttgattgtagggggcaagaagtcctttagtgcgttaagatatggaagaacttggccgttggtgttatcctctgtttctttggccaacgcagtcctttatggccaaagattccttgctaccggattccagtga

SEQ ID NO: 5465 - DNA, 309 bp, Saccharomyces cerevisiae
atgaacaaaattataaaagagtctaccaacttctccagatatctacgaactggcggtgtactcaacagtcttcggaccacatctaagtttgtttacattaataacaattcatatttaactcatggaggttttgatggcaatgtagctactattttcaatatttcagaattcaattacatcaattcttcggccaaggggtcacttctaacttataaaagcattaccttcttttgtccaagatatttcaagaaacggcctttagggagacatgcgaagggaaaaggcaaatctgacgaaaagattctataa

SEQ ID NO: 5466 - DNA, 309 bp, Artificial Sequence
  Description of Artificial Sequence: Synthetic polynucleotide
atgaacaaaattataaaagagtctaccaacttctccagatatttaagaactggcggtgtactcaacagtcttagaaccacatctaagtttgtttacattaataacaattcttatttaactcatggaggttttgatggcaatgtagctactattttcaatatttctgaattcaattacatcaattcttctgccaaggggtctcttttgacttataaaagcattaccttcttttgtccaagatatttcaagaaaagacctttagggagacatgcgaagggaaaaggcaaatctgacgaaaagattttatga

SEQ ID NO: 5467 - DNA, 1554 bp, Saccharomyces cerevisiae
atggctataagattgaatccaaaagtcagaaggttcttgctggataagtgtcgacaaaaacgatatggtttcctctttttaggatgtatcttcgccatactttactgtatggggacctggccatttttcgcaaaagatattgtacatgatccaaataatttgccttattccttacaggattattcgactgacaaagacgagccatttttccggggctgcactgatacaaagctgtacttgcaaaatcctgcttactccaaaatgaacgcatctttcgttatgctaacgagaaacgaagaaatagaagacgtactgaaaactatgagaagtatagagggccatttcaataagtggttcaaatatccgtacgttttcttgaatgatgacccctttacagatcattttaaggaccaaattcaagctgcaactaatgccactgtagagtttggcactgttgatgaaattatgtgggagtttcctgctaaggttcgtaattcattgcagtttaaggcttcattagaagaccaaaacgatcgcggtataatgtatggtaatatggaatcatatcacaagatgtgtcgattttactccgggatcttttataaacatccattagtttccaagtatgaatggtattggagaatagaacctgatgtggactttttttgtgacatctcgtatgatccctttttcgagatggccaaacataacaagaaatatgggtttaccgtacttataactgaactgtactggactgtccccaacttgttcagaacaaccaaaagctttataaaaaaaacggcaggtttaaaggaaaatctcggcacgttgtggaaattatttacatttaattataatattctagatacagatgatgaagaaatttctaggtgggtcaattttccctgggatgcaaagccaaagttgacagaaaagttgatggtagactttttgctagagaatcatggtcaagtcaataatgaggaagatttggaaggtatacaatatctcgttgaaagggcccgctctaaggtgccaatgctagaggattcccttgaaggggaagattacaatttgtgtcatttttggagtaactttgaaattgcccgcgttgatttattcgacaatgagatctataacgcctattttaaatttttggaagagtctggaggtttctggactgaaaggtggggtgacgcgccaattcattcaattgggttgggaatgaccttggatctagaagacgttcattatttcagagacattggttatagacactcatcgctgcagcattgtccgaagaatgccttacaaagccaagaaaatctcaacactttcgatgaaggttataacttcggatgtggatgtcgatgcgtgtgccccaagaaaggtgaagacatcgaagaccactccaccccttgcatggatattttttttgaattgcttcacggcagggaatatgagaaggaattccctggttgttacaagccctccataaaggacaaagacgtgattgaagagatcagaagagaaaattttagagtaattgaatag

SEQ ID NO: 5468 - DNA, 1554 bp, Artificial Sequence
  Description of Artificial Sequence: Synthetic polynucleotide
atggctataagattgaatccaaaagtcagaaggttcttgttggataagtgtagacaaaaaagatatggtttcctctttttaggatgtatcttcgccatactttactgtatggggacctggccatttttcgcaaaagatattgtacatgatccaaataatttgccttattccttacaggattattctactgacaaagacgagccatttttcagaggctgcactgatacaaagttgtacttgcaaaatcctgcttactccaaaatgaacgcatctttcgttatgcttacgagaaacgaagaaatagaagacgtattgaaaactatgagaagtatagagggccatttcaataagtggttcaaatatccgtacgttttcttgaatgatgacccctttacagatcattttaaggaccaaattcaagctgcaactaatgccactgtagagtttggcactgttgatgaaattatgtgggagtttcctgctaaggttcgtaattctttgcagtttaaggcttctttagaagaccaaaacgatcgcggtataatgtatggtaatatggaaagttatcacaagatgtgtagattttactccgggatcttttataaacatccattagtttccaagtatgaatggtattggagaatagaacctgatgtggactttttttgtgacatcagttatgatccctttttcgagatggccaaacataacaagaaatatgggtttaccgtacttataactgaattatactggactgtccccaacttgttcagaacaaccaaaagctttataaaaaaaacggcaggtttaaaggaaaatctcggcacgttgtggaaattatttacatttaattataatattttagatacagatgatgaagaaatttctaggtgggtcaattttccctgggatgcaaagccaaagttgacagaaaagttgatggtagactttttgttggagaatcatggtcaagtcaataatgaggaagatttggaaggtatacaatatctcgttgaaagggcccgctctaaggtgccaatgttagaggattcccttgaaggggaagattacaatttgtgtcatttttggagtaactttgaaattgcccgcgttgatttattcgacaatgagatctataacgcctattttaaatttttggaagagtctggaggtttctggactgaaaggtggggtgacgcgccaattcattctattgggttgggaatgaccttggatttggaagacgttcattatttcagagacattggttatagacactcttctttgcagcattgtccgaagaatgccttacaaagccaagaaaatctcaacactttcgatgaaggttataacttcggatgtggatgtagatgcgtgtgccccaagaaaggtgaagacatcgaagaccactccaccccttgcatggatattttttttgaattgcttcacggcagggaatatgagaaggaattccctggttgttacaagccctccataaaggacaaagacgtgattgaagagatcagaagagaaaattttagagtaattgaatga

SEQ ID NO: 5469 - DNA, 984 bp, Saccharomyces cerevisiae
atggctattcaaaaggttagtaacaaggacttgtcccgcaaggacaaaagaagatttaatatcgaatctaaagttaataagatttatcaaaatttttactcagaaagagataatcaatataaagatagactgacagcattgcaaacggatttaacttctctgcatcaaggtgataatggccaatatgcccgccaagtacgagatttggaggaagaaagagatctagagttagtcaggttgcgcctgtttgaagagtaccgtgtttctcgttccggtatcgaatttcaagaagatattgaaaaggctaaggctgaacacgagaaactcattaaattatgcaaagaaagactgtattcgtctatagagcaaaaaataaagaaattacaggaggagaggttactaatggatgtggccaatgtgcactcctatgccatgaattatagcagaccgcaataccagaagaacacgagaagtcacacagtaagtggttgggattcttcgtccaacgaatatggaagagatacagcaaacgaaagtgctactgacacgggagctggaaacgatagaagaacgctaaggagaaggaatgcttctaaagacacgagaggtaacaacaacaatcaagatgaatctgattttcaaactggtaatggttctggaagtaatggccatggttctagacaagggtcgcaattcccccatttcaacaacctaacctacaagtcaggcatgaactctgactcagattttctacaaggtataaatgaaggtactgatctatatgcatttttgtttggcgaaaagaaccccaaagacaatgctaatgggaatgaaaagaaaaaaaaccgtggtgctcaacgatattccaccaaaacagctccacctttacagtctttgaaaccagatgaggtcacagaggatatttccttgatcagagaattaacaggtcagcctccggctcctttcagactaaggtctgactaa

SEQ ID NO: 5470 - DNA, 984 bp, Artificial Sequence
  Description of Artificial Sequence: Synthetic polynucleotide
atggctattcaaaaggttagtaacaaggacttgtcccgcaaggacaaaagaagatttaatatcgaatctaaagttaataagatttatcaaaatttttactctgaaagagataatcaatataaagatagattgacagcattgcaaacggatttaacttctttgcatcaaggtgataatggccaatatgcccgccaagtaagagatttggaggaagaaagagatttagagttagtcaggttgcgcttatttgaagagtaccgtgtttctcgttccggtatcgaatttcaagaagatattgaaaaggctaaggctgaacacgagaaactcattaaattatgcaaagaaagattatattcttctatagagcaaaaaataaagaaattacaggaggagaggttattgatggatgtggccaatgtgcactcctatgccatgaattatagcagaccgcaataccagaagaacacgagaagtcacacagtaagtggttgggattcttcttccaacgaatatggaagagatacagcaaacgaaagtgctactgacacgggagctggaaacgatagaagaacgttgaggagaaggaatgcttctaaagacacgagaggtaacaacaacaatcaagatgaatctgattttcaaactggtaatggttctggaagtaatggccatggttctagacaagggagccaattcccccatttcaacaacttgacctacaagtctggcatgaactctgacagtgattttttgcaaggtataaatgaaggtactgatttatatgcatttttgtttggcgaaaagaaccccaaagacaatgctaatgggaatgaaaagaaaaaaaaccgtggtgctcaaagatattccaccaaaacagctccacctttacagtctttgaaaccagatgaggtcacagaggatatttccttgatcagagaattaacaggtcagcctccggctcctttcagattaaggtctgactga

SEQ ID NO: 5471 - DNA, 1098 bp, Saccharomyces cerevisiae
atgccacctctacccgtgctcaacagacctcaaattcatacgtctgttactgaaataagtcatgcaattgatcgtacaatcaaggaagagctctttcccgttgcctacactactgaagaagagcaatatttcaaaactaaccctaaacctgcctatatcgatgaattgattaaggacgctaaagagtttattgatttgcagtattccctgaaaaggaacaaaatagttcttatcacctctggtggtactactgttccattggaaaacaatacagtacgttttatcgataatttttctgcaggtactcgtggtgcatcgagtgctgaacagttcttagcgaacggatatagtgttattttcttacatagggaattctcattaactccgtataataggtccttctcccatagcattaatactttattcttggactacattgattctgaaggtaaaatcaaacctgaatttgctgagaatgttttgaagaacaaaaagctttatgacaagtatatggagaaagaggagaaactacttttactaccattcaccacggtcaaccaatacttatggtcactgaaaagtatagccaagctattgaataatagtggttgcttgttttatttagctgctgctgtcagtgatttttttgttccatattcaagactacctcagcacaagattcaatcaggagacaacggtaagatgggagcaaataatgacactgaaggtacaactaggactacgcctgatggtaaactgattgtgaatcttgaccctgtccctaagtttttgagaagattagtggaatcatgggccactcaagcgatgatcgtttcgttcaaattagaaactgatgaatccatgctgctttacaaatgtacacaagccctggatagatacaaccatcaactggttatcggaaaccttttacagacaagaaacaaacaggtcattttcgtatcccctgaaaacagaaagggagattgggtacgtttggatgaaaaacaccatagcattgaagagatgataatcccagaagtcatcgcacgccatgacaaatgggtggcgcattcgaaaactaagctagctacgaaataa

SEQ ID NO: 5472 - DNA, 1098 bp, Artificial Sequence
  Description of Artificial Sequence: Synthetic polynucleotide
atgccacctttgcccgtgctcaacagacctcaaattcatacgtctgttactgaaataagtcatgcaattgatcgtacaatcaaggaagagctctttcccgttgcctacactactgaagaagagcaatatttcaaaactaaccctaaacctgcctatatcgatgaattgattaaggacgctaaagagtttattgatttgcagtattccttgaaaaggaacaaaatagttcttatcacctctggtggtactactgttccattggaaaacaatacagtacgttttatcgataatttttctgcaggtactcgtggtgcaagtagtgctgaacagttcttagcgaacggatatagtgttattttcttacatagggaattctctttaactccgtataataggtccttctcccatagcattaatactttattcttggactacattgattctgaaggtaaaatcaaacctgaatttgctgagaatgttttgaagaacaaaaagctttatgacaagtatatggagaaagaggagaaattacttttattaccattcaccacggtcaaccaatacttatggtctttgaaaagtatagccaagttgttgaataatagtggttgcttgttttatttagctgctgctgtcagtgatttttttgttccatattctagattacctcagcacaagattcaaagtggagacaacggtaagatgggagcaaataatgacactgaaggtacaactaggactacgcctgatggtaaattgattgtgaatcttgaccctgtccctaagtttttgagaagattagtggaaagttgggccactcaagcgatgatcgtttctttcaaattagaaactgatgaatccatgttactttacaaatgtacacaagccttggatagatacaaccatcaattggttatcggaaaccttttacagacaagaaacaaacaggtcattttcgtatcccctgaaaacagaaagggagattgggtacgtttggatgaaaaacaccatagcattgaagagatgataatcccagaagtcatcgcacgccatgacaaatgggtggcgcattctaaaactaagttggctacgaaatga

SEQ ID NO: 5473 - DNA, 1083 bp, Saccharomyces cerevisiae
atgtcgacattgttatctgaggtagaaagtatcgatactttgccgtatgtgaaggatacaacaccgacaggaagtgactcgtcatcatttaataaattattggctccttccatagaggatgtagatgctaacccagaggaactgaggactttacgtggccaaggacggtattttggaataacagattatgactcaaacggtgcgataatggaggcagagccaaagtgtaataattgttcgcaaagaggtcatttgaaaaggaattgtccccatgtgatatgtacttactgcgggtttatggatgatcattactcacaacactgccctaaggctattatttgcactaattgtaatgcaaacggccattataaatcacagtgtcctcataaatggaagaaggtgttctgcacgctttgcaatagcaaaagacactcaagagaaagatgtcctagtatttggagatcttatttattaaaaacaaaagatgctaaccaaggtgacttcgattttcaaacagttttctgttataactgtgggaatgccggtcattttggcgatgactgtgctgaaagaaggtcatcgagagtgccgaacactgatggaagtgcattttgcggtgataacttagccacaaaatttaaacaacactattttaaccaattgaaagactataaacgtgaagcttcacaaaggcaacactttgataacgaacatgaattcaacctgcttgactatgaatataacgacgatgcatacgacctccctggctcaaggacttatagagataaaatgaaatggaagggcaaagtgcagtcaacaaggaacaaaaatagtagcaataatagatatgaaagcagtaataacaggaagaagaagtcaccatttagcgcacagaactacaaagtgacgaaaaataaaagagttcagacacaccccttagatttccccagaagtagccaaaacaacagaacgaacgattattcgagccagttcagctataatagggacgacttccccaagggtcctaagaataagaggggccgatcatcttctaacaaaagccaaagaaatggccgttattga

SEQ ID NO: 5474 - DNA, 1083 bp, Artificial Sequence
  Description of Artificial Sequence: Synthetic polynucleotide
atgtctacattgttatctgaggtagaaagtatcgatactttgccgtatgtgaaggatacaacaccgacaggaagtgactcttcttcttttaataaattattggctccttccatagaggatgtagatgctaacccagaggaattgaggactttacgtggccaaggaagatattttggaataacagattatgactccaacggtgcgataatggaggcagagccaaagtgtaataattgttctcaaagaggtcatttgaaaaggaattgtccccatgtgatatgtacttactgcgggtttatggatgatcattactctcaacactgccctaaggctattatttgcactaattgtaatgcaaacggccattataaatctcagtgtcctcataaatggaagaaggtgttctgcacgctttgcaatagcaaaagacactccagagaaagatgtcctagtatttggagatcttatttattaaaaacaaaagatgctaaccaaggtgacttcgattttcaaacagttttctgttataactgtgggaatgccggtcattttggcgatgactgtgctgaaagaaggtccagcagagtgccgaacactgatggaagtgcattttgcggtgataacttagccacaaaatttaaacaacactattttaaccaattgaaagactataaacgtgaagcttctcaaaggcaacactttgataacgaacatgaattcaacttacttgactatgaatataacgacgatgcatacgacctccctggctccaggacttatagagataaaatgaaatggaagggcaaagtgcagagtacaaggaacaaaaatagtagcaataatagatatgaaagcagtaataacaggaagaagaagtctccatttagcgcacagaactacaaagtgacgaaaaataaaagagttcagacacaccccttagatttccccagaagtagccaaaacaacagaacgaacgattattctagccagttcagctataatagggacgacttccccaagggtcctaagaataagaggggcagatcttcttctaacaaaagccaaagaaatggccgttattga

SEQ ID NO: 5475 - DNA, 2205 bp, Saccharomyces cerevisiae
atgagtgctagtgaagcaggtgtcactgagcaagtcaaaaagctgtctgtcaaggatagtagtaatgatgccgtaaaaccaaataagaaagaaaacaaaaaatccaagcaacagtccttgtacttggatcctgaaccaactttcatcgaggaaagaattgaaatgtttgacagattacaaaaggaatacaatgataaagttgcttctatgccacgtgttccattgaagattgtcttgaaggatggagccgttaaggaagccacttcttgggaaaccactccgatggatattgccaaaggaatttctaaatctttagcagacaggttatgtatttctaaggttaatggtcaattatgggacttagatagaccatttgaaggcgaagccaacgaagaaatcaaattagaactgctagatttcgaatctgacgaaggtaagaaggtcttttggcattcgtctgcccacgtcttgggtgaatcttgtgagtgccacctaggtgcccatatttgtttaggtcctccaactgatgatgggttcttttatgaaatggctgttagagatagtatgaaagatatatctgaatctccagaaagaaccgtctcccaagctgatttcccaggattggaaggcgttgccaagaatgttatcaagcaaaagcaaaaatttgaaagattggtcatgtccaaagaagatcttttgaaaatgtttcattattcgaagtataagacttacttggtacagacaaaggttccagatggaggtgctactaccgtctaccgttgcggtaaattgattgatctatgtgtcggccctcatatcccacatactgggcgtatcaaagctttcaaactattaaagaactcttcttgttatttcttaggtgatgcgacaaacgactctttacaaagagtttacggtatctcttttccagacaaaaaattaatggatgctcatttgaagttcttggcggaagcctctatgagagatcacagaaagattggtaaagaacaagaattattcttattcaatgaaatgtccccaggttcttgcttttggttacctcatggtactagaatttacaacactttggttgacttgttgagaaccgaataccgtaagagaggttacgaagaagtcatcactccaaacatgtacaactccaaattgtgggaaacctcaggtcactgggccaattacaaggaaaacatgtttactttcgaagtagagaaggaaactttcggtctaaaaccaatgaactgtccaggtcattgtttgatgttcaagtctagagaacgttcttatagagaattgccatggagagttgcagacttcggtgttatccacagaaatgaattttctggtgccttgtctggtttgactcgtgtcagaagattccaacaagatgatgctcatatcttctgtacccatgaccaaattgagtctgaaattgaaaatattttcaactttttgcaatacatttacggcgtttttggatttgaatttaagatggaattgtccactagaccagaaaagtacgttggaaagatcgaaacctgggatgccgctgaatcaaaattagaatctgccttaaagaaatggggtggtaactgggagatcaatgctggtgatggtgctttctacggtccaaagattgacattatgatttctgacgctttaagaagatggcatcaatgtgccaccatccaattagatttccaattgccaaacaggttcgaattggaatttaaatctaaagatcaagatagcgagagttacgaaagaccggtcatgatccatcgtgccattttagggtctgttgaaagaatgactgccattttgaccgagcattttgctggtaaatggccattttggttatcaccacgtcaagttttggttgtgccagttggtgtcaagtaccaagggtatgctgaagacgtccgtaacaaattgcacgatgctggcttctatgccgatgtcgatttgaccggtaacactctgcaaaagaaggtcagaaacgggcaaatgctaaaatataacttcatttttattgttggtgaacaagaaatgaatgaaaaatctgttaacattagaaacagagacgttatggaacaacagggtaaaaatgctactgtttctgttgaagaagttttgaaacagttgcgtaacttgaaagatgaaaagagaggtgacaacgtcttagcttaa

SEQ ID NO: 5476 - DNA, 2205 bp, Artificial Sequence
  Description of Artificial Sequence: Synthetic polynucleotide
atgagtgctagtgaagcaggtgtcactgagcaagtcaaaaagttatctgtcaaggatagtagtaatgatgccgtaaaaccaaataagaaagaaaacaaaaaatccaagcaacagtccttgtacttggatcctgaaccaactttcatcgaggaaagaattgaaatgtttgacagattacaaaaggaatacaatgataaagttgcttctatgccacgtgttccattgaagattgtcttgaaggatggagccgttaaggaagccacttcttgggaaaccactccgatggatattgccaaaggaatttctaaatctttagcagacaggttatgtatttctaaggttaatggtcaattatgggacttagatagaccatttgaaggcgaagccaacgaagaaatcaaattagaattattagatttcgaatctgacgaaggtaagaaggtcttttggcattcttctgcccacgtcttgggtgaatcttgtgagtgccacttgggtgcccatatttgtttaggtcctccaactgatgatgggttcttttatgaaatggctgttagagatagtatgaaagatatatctgaatctccagaaagaaccgtctcccaagctgatttcccaggattggaaggcgttgccaagaatgttatcaagcaaaagcaaaaatttgaaagattggtcatgtccaaagaagatcttttgaaaatgtttcattattccaagtataagacttacttggtacagacaaaggttccagatggaggtgctactaccgtctaccgttgcggtaaattgattgatttatgtgtcggccctcatatcccacatactgggcgtatcaaagctttcaaattattaaagaactcttcttgttatttcttaggtgatgcgacaaacgactctttacaaagagtttacggtatctcttttccagacaaaaaattaatggatgctcatttgaagttcttggcggaagcctctatgagagatcacagaaagattggtaaagaacaagaattattcttattcaatgaaatgtccccaggttcttgcttttggttacctcatggtactagaatttacaacactttggttgacttgttgagaaccgaataccgtaagagaggttacgaagaagtcatcactccaaacatgtacaactccaaattgtgggaaacctctggtcactgggccaattacaaggaaaacatgtttactttcgaagtagagaaggaaactttcggtttgaaaccaatgaactgtccaggtcattgtttgatgttcaagtctagagaacgttcttatagagaattgccatggagagttgcagacttcggtgttatccacagaaatgaattttctggtgccttgtctggtttgactcgtgtcagaagattccaacaagatgatgctcatatcttctgtacccatgaccaaattgagtctgaaattgaaaatattttcaactttttgcaatacatttacggcgtttttggatttgaatttaagatggaattgtccactagaccagaaaagtacgttggaaagatcgaaacctgggatgccgctgaaagtaaattagaatctgccttaaagaaatggggtggtaactgggagatcaatgctggtgatggtgctttctacggtccaaagattgacattatgatttctgacgctttaagaagatggcatcaatgtgccaccatccaattagatttccaattgccaaacaggttcgaattggaatttaaatctaaagatcaagatagcgagagttacgaaagaccggtcatgatccatcgtgccattttagggtctgttgaaagaatgactgccattttgaccgagcattttgctggtaaatggccattttggttatctccacgtcaagttttggttgtgccagttggtgtcaagtaccaagggtatgctgaagacgtccgtaacaaattgcacgatgctggcttctatgccgatgtcgatttgaccggtaacactttacaaaagaaggtcagaaacgggcaaatgttgaaatataacttcatttttattgttggtgaacaagaaatgaatgaaaaatctgttaacattagaaacagagacgttatggaacaacagggtaaaaatgctactgtttctgttgaagaagttttgaaacagttgcgtaacttgaaagatgaaaagagaggtgacaacgtcttagcttga

SEQ ID NO: 5477 - DNA, 963 bp, Saccharomyces cerevisiae
atgttgggaaaagaagaagaacagcaatatggccagaatggtaagggaatggaaaatgaactaccctttatgaagaggccttggtttaaaaaggcttatgaaaatgctattgaatttcatgaaaaagacgaattgctggatgcaagagacaggctggagttatcgaaggcctatagatccattgctaaagctgagatgtggggtggttggcttgggttttcagctgtatttttaactccatttgcctatcgttactacaagaccaaggctattaaaggtgttaaggtgccgaggaattttgtcttgggtgtaatggctttattttttgctacaaattttgctggtaggtccatgtatacacgacagttgaacgaacgtgaccccacaggtgttttgaaggataactattccaacaaatatggtgacaacgactttggagcctttcaacatgatcaaacaaaagaaattccgagaaatcaaaggcagtacaatatgatgcgcttattagattcaggctccccctcaaggtggtcgatgtacttttacataacgtaccaaaatccggagagaagattgccagacccgaaagtcaaactgcagcaaatgaaaaaaggcggagtttttaacggctcgccctttatgaaccaaagggatcctataggattgtatcgtaataagggtagaaaatctcctgacccaattgaaggagagcaaaacgacagtcctgttctgtcttcctgggaaaaaatcaggaacggcgacaacagttcgtcttcatcatgggaaaatataaggaacaccagtagagatcagtcgcaggaatcagatgcttcagtggatcatgaatccgatatatttatctcaggattttctgacgatggtaatgctaccgataattcctcttctgatgacaaatatcagcgtttactgcagagcgggagatatggtgggaaccgctcctag

SEQ ID NO: 5478 - DNA, 963 bp, Artificial Sequence
  Description of Artificial Sequence: Synthetic polynucleotide
atgttgggaaaagaagaagaacagcaatatggccagaatggtaagggaatggaaaatgaattgccctttatgaagaggccttggtttaaaaaggcttatgaaaatgctattgaatttcatgaaaaagacgaattgttggatgcaagagacaggttagagttatccaaggcctatagatccattgctaaagctgagatgtggggtggttggcttgggttttctgctgtatttttaactccatttgcctatcgttactacaagaccaaggctattaaaggtgttaaggtgccgaggaattttgtcttgggtgtaatggctttattttttgctacaaattttgctggtaggtccatgtatacaagacagttgaacgaacgtgaccccacaggtgttttgaaggataactattccaacaaatatggtgacaacgactttggagcctttcaacatgatcaaacaaaagaaattccgagaaatcaaaggcagtacaatatgatgcgcttattagattctggctccccctctaggtggtctatgtacttttacataacgtaccaaaatccggagagaagattgccagacccgaaagtcaaattacagcaaatgaaaaaaggcggagtttttaacggctccccctttatgaaccaaagggatcctataggattgtatcgtaataagggtagaaaatctcctgacccaattgaaggagagcaaaacgacagtcctgttttatcttcctgggaaaaaatcaggaacggcgacaacagttcttcttcttcttgggaaaatataaggaacaccagtagagatcagtctcaggaaagtgatgcttctgtggatcatgaatccgatatatttatcagtggattttctgacgatggtaatgctaccgataattcctcttctgatgacaaatatcagcgtttattgcagagcgggagatatggtgggaaccgctcctga

SEQ ID NO: 5479 - DNA, 891 bp, Saccharomyces cerevisiae
atggattactttaatatcaagcagaattactacacggggaacttcgtgcaatgtttgcaggaaatagagaagtttagcaaggtcacagataacaccttattattctacaaggcgaaaacccttttagctctaggccaatatcaatcacaagatcctacctctaagcttggcaaggtactagacttgtacgtccagttcttagatacaaaaaacattgaagaattagaaaatttgttaaaggataaacagaattcaccatatgaattatatctgttagccacggctcaagctatcttgggtgacttagataaaagtttggagacatgtgtagaagggattgacaatgacgaagcagaagggactacagaattattgctgcttgccatcgaagtcgctttgttaaacaacaacgtttcgaccgcgtccaccatctttgataactacactaatgctattgaggatactgtttccggtgacaacgaaatgattttaaacctggctgaatcgtacattaaatttgccacaaacaaagaaacggcaacatccaacttttactactatgaagagctatctcaaacctttcctacttggaaaactcaattgggattgctcaatttgcatttacagcaaagaaacatagctgaagctcagggtattgtcgagctattactatctgactactatagcgtcgaacaaaaagaaaacgccgtattgtacaaacctactttcttagcaaaccaaattacgcttgctcttatgcaaggtcttgatactgaagatttaacaaatcaattggttaaattggatcacgaacatgcattcatcaagcatcaccaagaaattgacgcaaaattcgatgaattagtgaggaaatatgatacgtccaactga

SEQ ID NO: 5480 - DNA, 891 bp, Artificial Sequence
  Description of Artificial Sequence: Synthetic polynucleotide
atggattactttaatatcaagcagaattactacacggggaacttcgtgcaatgtttgcaggaaatagagaagtttagcaaggtcacagataacaccttattattctacaaggcgaaaacccttttagctttgggccaatatcaatctcaagatcctacctctaagcttggcaaggtattggacttgtacgtccagttcttagatacaaaaaacattgaagaattagaaaatttgttaaaggataaacagaattctccatatgaattatatcttttagccacggctcaagctatcttgggtgacttagataaaagtttggagacatgtgtagaagggattgacaatgacgaagcagaagggactacagaattattgttacttgccatcgaagtcgctttgttaaacaacaacgtttctaccgcgtccaccatctttgataactacactaatgctattgaggatactgtttccggtgacaacgaaatgattttaaacttggctgaatcttacattaaatttgccacaaacaaagaaacggcaacatccaacttttactactatgaagagctttctcaaacctttcctacttggaaaactcaattgggattgctcaatttgcatttacagcaaagaaacatagctgaagctcagggtattgtcgagttattattatctgactactatagcgtcgaacaaaaagaaaacgccgtattgtacaaacctactttcttagcaaaccaaattacgcttgctcttatgcaaggtcttgatactgaagatttaacaaatcaattggttaaattggatcacgaacatgcattcatcaagcatcaccaagaaattgacgcaaaattcgatgaattagtgaggaaatatgatacgtccaactga

SEQ ID NO: 5481 - DNA, 2838 bp, Saccharomyces cerevisiae
atgtctttgacgactgctgctcctcttttagcattgttgagagagaatcaagattctgttaaaacatatgccctagaatctataaataatgttgtggaccaattatggtctgagatctcgaatgaactgccggatattgaggcattgtatgatgacgataccttttcagaccgtgaaatggctgctttgattgcatccaaagtttattacaatcttggtgaatacgaatcggctgtgaagtatgcacttgccgcaaaggatcgttttgatatagacgaaaagtcacaatttgttgaaactatagtctcaaagagtattgagatgtacgtccaagaggcttccaagcaatacactaaggacgaacaattttacaccaaggatattattgacccaaaattaacctctatttttgagcgaatgatagaaaaatgtttgaaagcttcagaattaaaattagctttaggaattgccttagaaggttacagattggatatcattgaaagtgctttaaagagcaaattggatcaggattccacttctgaaaacgttaaaattattaactacttattgaccttagctataactactgtgacaaattccaagttcagatcctcgatattgagaaaatcatttgatttcctaatgaatatgcctaactgcgattacttaacgctcaataaagtagttgtaaatttgaatgacgccggattggcacttcagctatttaaaaaattaaaggaagagaacgatgaaggattatctgctcaaattgcatttgatttggtttcgtctgcgtctcagcagttgcttgagattttagtaaccgaactaactgcccagggttacgatcctgccttattgaatattctatctgggctaccgacttgtgattattacaataccttccttttgaataataaaaacattgacatcggtcttttaaacaagtctaaatcatctttggatgggaaattttctttgttccacaccgcagtcagcgttgccaacggttttatgcacgctggtactaccgacaattcatttatcaaggcgaacttgccatggttaggtaaggctcaaaattgggctaaatttacagctacagcctctttaggtgtaattcataaaggcaatttattggagggtaaaaaagtcatggccccttacttgccaggcagtcgagcttcttctaggtttatcaaaggtggttcattgtatggtttgggtttaatttatgctggctttggtcgtgatacaactgactatctgaaaaacataatagttgagaatagcggaacttcaggcgatgaagacgtagatgtattgttacatggtgcttcactgggtatcggtcttgctgctatgggttctgctaatattgaagtttatgaagccttaaaggaagttctgtacaacgattctgccacatctggagaagcagctgcattaggtatgggtctctgtatgctcggaacaggtaagcctgaagcgattcacgatatgtttacatattcccaagaaacgcagcatggcaatattactcgtggtctagccgttggtttagcactgataaattacggccgtcaagagttagctgatgatttaattactaagatgttagcaagtgatgagtccttgttacgctatggaggtgcattcacaatcgcgttagcgtatgcgggtacgggaaataattcagctgtcaagagattactgcatgtggcagtctcggattctaacgatgatgtcagaagggcagcagtcatcgcattagggtttgttctcttgcgtgattataccactgtaccaaggattgtccaacttctatctaaatcgcataacgctcatgtcagatgtggtaccgcatttgctcttgggattgcttgtgccggcaagggtttacaatcagctattgacgttttagatccgctaacaaaggacccagtagattttgttcgtcaggctgccatgatagctttatccatgattttgattcaacaaacagaaaaactaaaccctcaagttgctgatattaacaaaaattttttgagcgtgattacaaacaaacaccaagaaggtttagccaaattcggtgcatgtgtggcccaaggtataatgaatgccggtgggcgtaatgttacaattcagctggaaaatgcggatacaggcacattggataccaagtccgtagttggtttggtcatgttctcacaattctggtactggttcccactggctcactttttatccctttcttttacaccaacaactgtcattggtattcgtggtagcgatcaagctatacccaaatttcaaatgaattgttacgctaaagaagatgcattcagttatccgaggatgtatgaggaagcaagtggtaaggaggtagagaaggtagcaacagctgttctttccacgacagcaagagcaaaagcaagggcaaagaagacaaagaaggaaaagggtccaaatgaggaagaaaagaaaaaagagcatgaggaaaaagaaaaggaaagagagacgaataaaaaaggcataaaagaaacaaaagaaaacgacgaagaattttacaaaaataagtactcttctaaaccttataaagtcgacaatatgacccgtatactaccacaacaatcgagatatatttcctttattaaggacgacagatttgttcctgtacgtaaattcaaaggaaataacggtgtggtggttttaagagatagggaacccaaggaacctgtagcactaattgaaactgttaggcaaatgaaagatgttaacgctccacttccaaccccatttaaggtcgatgataatgtcgacttccctagtgcttag

SEQ ID NO: 5482 - DNA, 2838 bp, Artificial Sequence
  Description of Artificial Sequence: Synthetic polynucleotide
atgtctttgacgactgctgctcctcttttagcattgttgagagagaatcaagattctgttaaaacatatgccttggaatctataaataatgttgtggaccaattatggtctgagatctctaatgaattaccggatattgaggcattgtatgatgacgataccttttctgaccgtgaaatggctgctttgattgcatccaaagtttattacaatcttggtgaatacgaatctgctgtgaagtatgcacttgccgcaaaggatcgttttgatatagacgaaaagtctcaatttgttgaaactatagtctccaagagtattgagatgtacgtccaagaggcttccaagcaatacactaaggacgaacaattttacaccaaggatattattgacccaaaattaacctctatttttgagagaatgatagaaaaatgtttgaaagcttctgaattaaaattagctttaggaattgccttagaaggttacagattggatatcattgaaagtgctttaaagagcaaattggatcaggattccacttctgaaaacgttaaaattattaactacttattgaccttagctataactactgtgacaaattccaagttcagatcctccatattgagaaaaagttttgatttcttaatgaatatgcctaactgcgattacttaacgctcaataaagtagttgtaaatttgaatgacgccggattggcacttcagttatttaaaaaattaaaggaagagaacgatgaaggattatctgctcaaattgcatttgatttggtttcttctgcgtctcagcagttgcttgagattttagtaaccgaattgactgcccagggttacgatcctgccttattgaatattttatctgggttgccgacttgtgattattacaataccttccttttgaataataaaaacattgacatcggtcttttaaacaagtctaaatcttctttggatgggaaattttctttgttccacaccgcagtcagcgttgccaacggttttatgcacgctggtactaccgacaattcttttatcaaggcgaacttgccatggttaggtaaggctcaaaattgggctaaatttacagctacagcctctttaggtgtaattcataaaggcaatttattggagggtaaaaaagtcatggccccttacttgccaggcagtagagcttcttctaggtttatcaaaggtggttctttgtatggtttgggtttaatttatgctggctttggtcgtgatacaactgactatttgaaaaacataatagttgagaatagcggaacttctggcgatgaagacgtagatgtattgttacatggtgcttctttgggtatcggtcttgctgctatgggttctgctaatattgaagtttatgaagccttaaaggaagttctttacaacgattctgccacatctggagaagcagctgcattaggtatgggtctctgtatgctcggaacaggtaagcctgaagcgattcacgatatgtttacatattcccaagaaacgcagcatggcaatattactcgtggtttagccgttggtttagcattaataaattacggccgtcaagagttagctgatgatttaattactaagatgttagcaagtgatgagtccttgttacgctatggaggtgcattcacaatcgcgttagcgtatgcgggtacgggaaataattctgctgtcaagagattattacatgtggcagtctctgattctaacgatgatgtcagaagggcagcagtcatcgcattagggtttgttctcttgcgtgattataccactgtaccaaggattgtccaacttttatctaaatctcataacgctcatgtcagatgtggtaccgcatttgctcttgggattgcttgtgccggcaagggtttacaatctgctattgacgttttagatccgttaacaaaggacccagtagattttgttcgtcaggctgccatgatagctttatccatgattttgattcaacaaacagaaaaattgaaccctcaagttgctgatattaacaaaaattttttgagcgtgattacaaacaaacaccaagaaggtttagccaaattcggtgcatgtgtggcccaaggtataatgaatgccggtgggcgtaatgttacaattcagttagaaaatgcggatacaggcacattggataccaagtccgtagttggtttggtcatgttctctcaattctggtactggttcccattggctcactttttatccctttcttttacaccaacaactgtcattggtattcgtggtagcgatcaagctatacccaaatttcaaatgaattgttacgctaaagaagatgcattcagttatccgaggatgtatgaggaagcaagtggtaaggaggtagagaaggtagcaacagctgttctttccacgacagcaagagcaaaagcaagggcaaagaagacaaagaaggaaaagggtccaaatgaggaagaaaagaaaaaagagcatgaggaaaaagaaaaggaaagagagacgaataaaaaaggcataaaagaaacaaaagaaaacgacgaagaattttacaaaaataagtactcttctaaaccttataaagtcgacaatatgacccgtatattgccacaacaatctagatatatttcctttattaaggacgacagatttgttcctgtacgtaaattcaaaggaaataacggtgtggtggttttaagagatagggaacccaaggaacctgtagcattgattgaaactgttaggcaaatgaaagatgttaacgctccacttccaaccccatttaaggtcgatgataatgtcgacttccctagtgcttga

SEQ ID NO: 5483 - DNA, 1410 bp, Saccharomyces cerevisiae
atgtcttattcagctgccgataatttacaagattcattccaacgtgccatgaacttttctggctctcctggtgcagtctcaacctcaccaactcagtcatttatgaacacactacctcgtcgtgtaagcattacaaagcaaccaaaggctttaaaacctttttctactggtgacatgaatattctactgttggaaaatgtcaatgcaactgcaatcaaaatcttcaaggatcagggttaccaagtagagttccacaagtcttctctacctgaggatgaattgattgaaaaaatcaaagacgtacacgctatcggtataagatccaaaactagattgactgaaaaaatactacagcatgccaggaatctagtttgtattggttgtttttgcataggtaccaatcaagtagacctaaaatatgccgctagtaaaggtattgctgttttcaattcgccattctccaattcaagatccgtagcagaattggtaattggtgagatcattagtttagcaagacaattaggtgatagatccattgaactgcatacaggtacatggaataaagtcgctgctaggtgttgggaagtaagaggaaaaactctcggtattattgggtatggtcacattggttcgcaattatcagttcttgcagaagctatgggcctgcatgtgctatactatgatatcgtgacaattatggccttaggtactgccagacaagtttctacattagatgaattgttgaataaatctgattttgtaacactacatgtaccagctactccagaaactgaaaaaatgttatctgctccacaattcgctgctatgaaggacggggcttatgttattaatgcctcaagaggtactgtcgtggacattccatctctgatccaagccgtcaaggccaacaaaattgcaggtgctgctttagatgtttatccacatgaaccagctaagaacggtgaaggttcatttaacgatgaacttaacagctggacttctgagttggtttcattaccaaatataatcctgacaccacatattggtggctctacagaagaagctcaaagttcaatcggtattgaggtggctactgcattgtccaaatacatcaatgaaggtaactctgtcggttctgtgaacttcccagaagtcagtttgaagtctttggactacgatcaagagaacacagtacgtgtcttgtatattcatcgtaacgttcctggtgttttgaagaccgttaatgatatcttatccgatcataatatcgagaaacagttttctgattctcacggcgagatcgcttatctaatggcagacatctcttctgttaatcaaagtgaaatcaaggatatatatgaaaagttgaaccaaacttctgccaaagtttccatcaggttattatactaa

SEQ ID NO: 5484 - DNA, 1410 bp, Artificial Sequence
  Description of Artificial Sequence: Synthetic polynucleotide
atgtcttattctgctgccgataatttacaagattctttccaacgtgccatgaacttttctggctctcctggtgcagtctccacctctccaactcagtcttttatgaacacattgcctcgtcgtgtaagcattacaaagcaaccaaaggctttaaaacctttttctactggtgacatgaatattttattattggaaaatgtcaatgcaactgcaatcaaaatcttcaaggatcagggttaccaagtagagttccacaagtcttctttgcctgaggatgaattgattgaaaaaatcaaagacgtacacgctatcggtataagatccaaaactagattgactgaaaaaatattacagcatgccaggaatttggtttgtattggttgtttttgcataggtaccaatcaagtagacttgaaatatgccgctagtaaaggtattgctgttttcaattctccattctccaattctagatccgtagcagaattggtaattggtgagatcattagtttagcaagacaattaggtgatagatccattgaattacatacaggtacatggaataaagtcgctgctaggtgttgggaagtaagaggaaaaactctcggtattattgggtatggtcacattggttctcaattaagtgttcttgcagaagctatgggcttgcatgtgttatactatgatatcgtgacaattatggccttaggtactgccagacaagtttctacattagatgaattgttgaataaatctgattttgtaacattgcatgtaccagctactccagaaactgaaaaaatgttatctgctccacaattcgctgctatgaaggacggggcttatgttattaatgcctctagaggtactgtcgtggacattccatctttgatccaagccgtcaaggccaacaaaattgcaggtgctgctttagatgtttatccacatgaaccagctaagaacggtgaaggttcttttaacgatgaacttaacagctggacttctgagttggtttctttaccaaatataatcttaacaccacatattggtggctctacagaagaagctcaaagttctatcggtattgaggtggctactgcattgtccaaatacatcaatgaaggtaactctgtcggttctgtgaacttcccagaagtcagtttgaagtctttggactacgatcaagagaacacagtacgtgtcttgtatattcatcgtaacgttcctggtgttttgaagaccgttaatgatatcttatccgatcataatatcgagaaacagttttctgattctcacggcgagatcgcttatttaatggcagacatctcttctgttaatcaaagtgaaatcaaggatatatatgaaaagttgaaccaaacttctgccaaagtttccatcaggttattatactga

SEQ ID NO: 5485 - DNA, 2928 bp, Saccharomyces cerevisiae
atgtcagaccacaacgttaactccacttttagaaaaactttggtcgagttatgcgaaactgcaacttggataacatcgcaagtttatgcggctaagaatttagagaaaaacgatttgattacagtagataataaaataagcgcattgtatcccattgcagaaaaatatgatagatcattcagaaccactacagttatattagacgaagaacttatcctgaaattggaaaatgcagcatcaagtctatggaattcgttgactattgctatgaaagctgaaaaagcttcagacaaatattttaatgaagtcttttgcaaatgtaagattttcgcaaccaagcttctctccatccatgaggctttgtttcggacaaacaccaacctcctacggaacttcaaatgttatatcagttctttcaaaagcgctagtgagtatcgttttgacgatttaataactaatacacagcagcattcagagaaatacttacagataatcaatgagaatgtggaaagtttctccaatgaagagaaaactgagtttaaaaaactgacgttcgagttttacttggtaaattttcaattatatctttcggaaaatgacctggatacagcaaatatttacactgcaaaagtaaacatcactgataattccaaatatatggacgcagatttgctcatcgaattatgcagaatgatctataattccacagttatgttgaaagaaattaataatcctgaaactcagttagtagacgtaaatataatttcttttttgaaggatgtggaaaaatatttggagttacctgtggaaaatttaaaatctcatactgattatagtaatttaaagtattcagttttgatttttatggcaaattgtttggttgaaggacacccacaagcttctgaacttgaacaatgtgatcactatttaagtcttttgcaaaatgaatatccaaacaaagtggacccttttatattggctatcaatttaactaaacggagaaatatcgtaaatccggcagaaaccatagaggaaattctcatgcgaatgattatgtcagtagatgtaatatccaattttcaagctgtcatagcttctatcaatgacttatcaaaaatgaacaccaaattctctatagtgtgtctcgattatttgttaatcaataaactgaattctaagaatgatagtaaattcttaggaaaagccatttgctccaggtttttaattacaacacaatcaaaaacaatgaatgattccgagatagcggaaagcttagagaattttagcacacagatggaaagaatagtttcagaacccctcaccaaacatgctatctcttgcataataactttattatggaatactggaaaaaagttagaaaagatggaaaaatacgttgttagtattagattttacaaattagcactcaaagatattatcagtcaaaattattccgaccgggggaaaattcaaagggctctacaagtcgtatataacaaaattgaagactattccaacacagttagagtatatcaggatatggacgaagtagatagacaatctcctctgtgtcaacttttgatgttgcagtcttttctagcggatgataaaacagaggaagcgcttacgtgcctccagaagataaagtcgtctgaagatgaaaaaagtacagacgctcttatattagcagtagcagaatgcaaacgaaagacagatttgtctgttcaagggctcttaatgatatttgacaaattacaatctaaaagcaattcgcaaactatatcatctacgtcgagttctcagacactgagcattctcaggtataccctacagatgattgtcaaagtatcggaagaggagcctttagaaaccttcataaattatttaccaacagtacagaaacttttacagaaggctgtcgagtttctcaaaactgtaaagttactaaatcaattaccaccagacgttgagaaggaagcaatatatcagcaatcagtggctgtaaacgaaatcgagtggtttgcctctttttcctataatgtggctgtaaaatgcttagttgatcagtcctgtgaatccatctccgagtttccccagtattgcattcaatttattgaccttattccggtccaagacttcactttcccgaaaatgtatcatttcacatattggaggttcaaagccacaatcttgcagttgataatagccaaagaaaaagcaaagcaagaccaacaccaaaaggattgggatatttatgagaagtcagaagagttggttaatagcataaatgttatgaagaaaagctcggaatttaaggatgggtcatcattggaagatagaaatacattacatgaatgtttcctggaggcgttgactatacatctggaaagtgccttaatgatgcctgatcaaactaggattctggacatattgaagaaaacggaattgtatcaagatagccgcgtggatgcgctacttattgatatctcgtcgaatatggaagatttacctaaaggagttctcatagagatacttgaaacagtattaaaaagaaacatgggccctgaagtgaaagaacgggaactctgtagctggctgcgaattttactggaaaatgcaattaatcttaaccatgaggtcgaactacgcatattggatagggttcttaagatcctaaatataaatcaatcaagtcttcaagacacagatggtgtccttcaaacagagttagaaactatagccacttactgttggaatatcggcgtcaattacataatcaaagacaacaaaagcaatggaattgtttggtgtaaacattcaatggggttcgcaaacatggttaatgaaggcttgcaggagcaattgtactctttatgggagtctttagcaagttcggcaaatatcgatatcaatagtattgctaaataa

SEQ ID NO: 5486 - DNA, 2928 bp, Artificial Sequence
  Description of Artificial Sequence: Synthetic polynucleotide
atgtctgaccacaacgttaactccacttttagaaaaactttggtcgagttatgcgaaactgcaacttggataacatctcaagtttatgcggctaagaatttagagaaaaacgatttgattacagtagataataaaataagcgcattgtatcccattgcagaaaaatatgatagatctttcagaaccactacagttatattagacgaagaacttatcttgaaattggaaaatgcagcaagtagtttatggaattctttgactattgctatgaaagctgaaaaagcttctgacaaatattttaatgaagtcttttgcaaatgtaagattttcgcaaccaagcttctctccatccatgaggctttgtttagaacaaacaccaacctcttgagaaacttcaaatgttatatcagttctttcaaaagcgctagtgagtatcgttttgacgatttaataactaatacacagcagcattctgagaaatacttacagataatcaatgagaatgtggaaagtttctccaatgaagagaaaactgagtttaaaaaattaacgttcgagttttacttggtaaattttcaattatatctttctgaaaatgacttggatacagcaaatatttacactgcaaaagtaaacatcactgataattccaaatatatggacgcagatttgctcatcgaattatgcagaatgatctataattccacagttatgttgaaagaaattaataatcctgaaactcagttagtagacgtaaatataatttcttttttgaaggatgtggaaaaatatttggagttacctgtggaaaatttaaaatctcatactgattatagtaatttaaagtattctgttttgatttttatggcaaattgtttggttgaaggacacccacaagcttctgaacttgaacaatgtgatcactatttaagtcttttgcaaaatgaatatccaaacaaagtggacccttttatattggctatcaatttaactaaaagaagaaatatcgtaaatccggcagaaaccatagaggaaattctcatgagaatgattatgtctgtagatgtaatatccaattttcaagctgtcatagcttctatcaatgacttatccaaaatgaacaccaaattctctatagtgtgtctcgattatttgttaatcaataaattgaattctaagaatgatagtaaattcttaggaaaagccatttgctccaggtttttaattacaacacaaagtaaaacaatgaatgattccgagatagcggaaagcttagagaattttagcacacagatggaaagaatagtttctgaacccctcaccaaacatgctatctcttgcataataactttattatggaatactggaaaaaagttagaaaagatggaaaaatacgttgttagtattagattttacaaattagcactcaaagatattatcagtcaaaattattccgacagagggaaaattcaaagggctttacaagtcgtatataacaaaattgaagactattccaacacagttagagtatatcaggatatggacgaagtagatagacaatctcctctttgtcaacttttgatgttgcagtcttttttggcggatgataaaacagaggaagcgcttacgtgcctccagaagataaagtcttctgaagatgaaaaaagtacagacgctcttatattagcagtagcagaatgcaaaagaaagacagatttgtctgttcaagggctcttaatgatatttgacaaattacaatctaaaagcaattctcaaactatatcttctacgtccagttctcagacattgagcattctcaggtataccttgcagatgattgtcaaagtatctgaagaggagcctttagaaaccttcataaattatttaccaacagtacagaaacttttacagaaggctgtcgagtttctcaaaactgtaaagttattgaatcaattaccaccagacgttgagaaggaagcaatatatcagcaatctgtggctgtaaacgaaatcgagtggtttgcctctttttcctataatgtggctgtaaaatgcttagttgatcagtcctgtgaatccatctccgagtttccccagtattgcattcaatttattgaccttattccggtccaagacttcactttcccgaaaatgtatcatttcacatattggaggttcaaagccacaatcttgcagttgataatagccaaagaaaaagcaaagcaagaccaacaccaaaaggattgggatatttatgagaagtctgaagagttggttaatagcataaatgttatgaagaaaagctctgaatttaaggatgggtcttctttggaagatagaaatacattacatgaatgtttcttggaggcgttgactatacatttggaaagtgccttaatgatgcctgatcaaactaggattttggacatattgaagaaaacggaattgtatcaagatagccgcgtggatgcgttacttattgatatctcttccaatatggaagatttacctaaaggagttctcatagagatacttgaaacagtattaaaaagaaacatgggccctgaagtgaaagaaagagaactctgtagctggttaagaattttattggaaaatgcaattaatcttaaccatgaggtcgaattacgcatattggatagggttcttaagatcttgaatataaatcaaagtagtcttcaagacacagatggtgtccttcaaacagagttagaaactatagccacttactgttggaatatcggcgtcaattacataatcaaagacaacaaaagcaatggaattgtttggtgtaaacattctatggggttcgcaaacatggttaatgaaggcttgcaggagcaattgtactctttatgggagtctttagcaagttctgcaaatatcgatatcaatagtattgctaaatga

SEQ ID NO: 5487 - DNA, 1818 bp, Saccharomyces cerevisiae
atgtctaataaacaactagtaaagccaaaaacagagacaaagacagaaataactactgaacagtctcaaaaactgctccaaacaatgctcacaatgtcttttggttgtttagcctttctcagggggttgttccctgatgatatatttgttgaccaacggtttgtaccggagaaagttgaaaaaaactacaataagcaaaacacgtctcaaaataactctatcaaaatcaagacattaattaggggcaaatcggctcaagcagatttattactggattggttggagaagggagttttcaaatccattcgtttaaagtgtttaaaagccctatcattaggtatatttctagaggatcccaccgatctcctagaaaattacatttttagttttgattatgacgaagagaataatgtcaatattaatgtaaacttgagtggcaataaaaaagggagcaaaaatgccgacccagagaacgagacaatttctttactagattcgagaaggatggttcaacagttaatgagacgatttatcataattacccaatccctggaacctttaccccaaaaaaagttcctcactatgaggttgatgtttaatgataacgtcgatgaagattatcagccggagttgttcaaagacgcgacttttgacaaaagagcaactttaaaggtccccacaaatttagacaacgatgctattgacgtcggtactctgaacacgaagcatcataaagttgctctttctgttttgtcggcggcaacatccagtatggaaaaagctgggaacacgaactttattagagtagacccctttgatttaattttgcaacaacaagaagaaaataaacttgaagaatctgttcctacaaaaccccagaattttgtcacaagccaaacaaccaatgtgcttggaaatcttttaaattcttcgcaagcaagtatacaaccaactcaatttgtttcaaataacccagtcacgggcatttgtagttgcgaatgtggattggaagttcccaaagcagccaccgtgttaaagacttgtaaaagttgccgtaaaacactacacggcatctgttatggcaattttctacattcgtcaattgagaaatgctttacttgcatttttggaccttccttggatactaaatggtctaaatttcaggatcttatgatgattagaaaggtttttaggttcttggtgagaaaaaagaagggatttccggcctctataacagaactcattgatagttttatcaacgtcgaagatcagaataacgaagtaaaagagagagttgcattcgccttatttgtatttttcttagatgaaacactatgcctcgataatgggggaaaacctagccaaactattaggtacgttacgagctctgtactcgttgatgtaaagggaattgtcataccaaatactagaaagcaactgaacgtaaatcacgaatataaatggcactttaccaccagttcccctaaagccgagagcttctatcaagaggttctgcctaactcaagaaaacaagtcgagtcgtggttacaggatatcactaacttaagaaaagtctattctgaagctctttctccgtcgtcaaccctacaggagcttgatcttaactcaagcttgcctacgcaagatccaataatttctggccaaaaaaggagacgttacgatcttgatgagtacttagaggaagataaaagctcagttgttaatgatacgataaaagcaaaagattttgatgaaagtgtaccagcaaagattcgcaaaatcagcgtctctaaaaagactttgaaaagtaactggtag

SEQ ID NO: 5488 - DNA, 1818 bp, Artificial Sequence
  Description of Artificial Sequence: Synthetic polynucleotide
atgtctaataaacaattggtaaagccaaaaacagagacaaagacagaaataactactgaacagtctcaaaaattactccaaacaatgctcacaatgtcttttggttgtttagcctttctcagggggttgttccctgatgatatatttgttgaccaaagatttgtaccggagaaagttgaaaaaaactacaataagcaaaacacgtctcaaaataactctatcaaaatcaagacattaattaggggcaaatctgctcaagcagatttattattagattggttggagaagggagttttcaaatccattcgtttaaagtgtttaaaagccttgtctttaggtatatttttggaggatcccaccgatctcttggaaaattacatttttagttttgattatgacgaagagaataatgtcaatattaatgtaaacttgagtggcaataaaaaagggagcaaaaatgccgacccagagaacgagacaatttctttattagattccagaaggatggttcaacagttaatgagaagatttatcataattacccaatccttagaacctttaccccaaaaaaagttcctcactatgaggttgatgtttaatgataacgtcgatgaagattatcagccggagttgttcaaagacgcgacttttgacaaaagagcaactttaaaggtccccacaaatttagacaacgatgctattgacgtcggtactttgaacacgaagcatcataaagttgctctttctgttttgagtgcggcaacatccagtatggaaaaagctgggaacacgaactttattagagtagacccctttgatttaattttgcaacaacaagaagaaaataaacttgaagaatctgttcctacaaaaccccagaattttgtcacaagccaaacaaccaatgtgcttggaaatcttttaaattcttctcaagcaagtatacaaccaactcaatttgtttctaataacccagtcacgggcatttgtagttgcgaatgtggattggaagttcccaaagcagccaccgtgttaaagacttgtaaaagttgccgtaaaacattacacggcatctgttatggcaattttttacattcttccattgagaaatgctttacttgcatttttggaccttccttggatactaaatggtctaaatttcaggatcttatgatgattagaaaggtttttaggttcttggtgagaaaaaagaagggatttccggcctctataacagaactcattgatagttttatcaacgtcgaagatcagaataacgaagtaaaagagagagttgcattcgccttatttgtatttttcttagatgaaacattgtgcctcgataatgggggaaaacctagccaaactattaggtacgttacgagctctgtactcgttgatgtaaagggaattgtcataccaaatactagaaagcaattgaacgtaaatcacgaatataaatggcactttaccaccagttcccctaaagccgagagcttctatcaagaggttttacctaactctagaaaacaagtcgagagttggttacaggatatcactaacttaagaaaagtctattctgaagctctttctccgtcttccaccttgcaggagcttgatcttaactccagcttgcctacgcaagatccaataatttctggccaaaaaaggagacgttacgatcttgatgagtacttagaggaagataaaagctctgttgttaatgatacgataaaagcaaaagattttgatgaaagtgtaccagcaaagattcgcaaaatcagcgtctctaaaaagactttgaaaagtaactggtga

SEQ ID NO: 5489 - DNA, 1335 bp, Saccharomyces cerevisiae
atgtttcatggcgctaaaggacctttattgatagaacgcattggtcatttactttctatcaattatggcgagaaagaggaacgaaaacgatgggccatgcaaggcattagttatttacaggaagtccagtgtacaagcactccctatttggaaattttggtagaagagagcggattaagacctgtgagcctactaaacagccaactagtaggaaaacctcatttttcattgcttggaggattcgatgaaaacatcgcacgagatataatttcacataattttcagaacgcaatatttcaaatggagtcagaagaggttccattgactaaacgatatcagcatttagaaaaaattacccaaatatccctactatgcaagaatttcaaaggcattgaagaaatagaatataatgtgaaaaatatcattcaaggccgtaaaaattttgatatgttaaattccatggaaaaagatcggataagtcatgaagttgttcaagatgattccttctcacttctcaggatacaaatgttgctttgcgtctcatatttccttcaggaaaggtattttgactgttgcacaaaattttttacaatgatgacttcggaacctttaacattgaaagttctgtcagaacacttagactgcatgaattttatatcgaaagaggagtttataatgatggtgaatatatccgtacttatttcaatacctttggataattatgatgattttatctatttgagtgatttaaagcaattttttcagatgacacccttattggttaattgtctcgaactgttgataaacactaatttcaacaaatttttcaaaatttggcatggtgaaataaataaaatatgcatggaaagcctttttttggaacctagctggtcgtcgtcggctgctgttatcatgaggtgcaaaatatatttcttttacttaaggatatcaaaaaagctacagttttcttatttatcatctacactaggtattgatttggaggatattaaggaagaattgacaaagttaataatatcagggcagttaaatttcgaaattgacggggacgtgatacactttgaggatagttctattttacaaagtattgttaacgaaattagcagaaatggcaccatgataaacgaggttatagataaactaaaaaatgaaaacacggatttgaaagacattatccaaggtaatccactaatgtatagcggtggaaacaatacagcgactattatcaataatgaaagcagtgacgatatggacatagatgaagttaacgatagaagtgatattagtgattcagagggaggtttgtttgaatgctga

SEQ ID NO: 5490 - DNA, 1335 bp, Artificial Sequence
  Description of Artificial Sequence: Synthetic polynucleotide
atgtttcatggcgctaaaggacctttattgatagaacgcattggtcatttactttctatcaattatggcgagaaagaggaaagaaaaagatgggccatgcaaggcattagttatttacaggaagtccagtgtacaagcactccctatttggaaattttggtagaagagagcggattaagacctgtgagcttgttgaacagccaattggtaggaaaacctcatttttctttgcttggaggattcgatgaaaacatcgcaagagatataatttctcataattttcagaacgcaatatttcaaatggagagtgaagaggttccattgactaaaagatatcagcatttagaaaaaattacccaaatatccttattatgcaagaatttcaaaggcattgaagaaatagaatataatgtgaaaaatatcattcaaggccgtaaaaattttgatatgttaaattccatggaaaaagatagaataagtcatgaagttgttcaagatgattccttctctcttctcaggatacaaatgttgctttgcgtctcttatttccttcaggaaaggtattttgactgttgcacaaaattttttacaatgatgacttctgaacctttaacattgaaagttttatctgaacacttagactgcatgaattttatatccaaagaggagtttataatgatggtgaatatatccgtacttatttctatacctttggataattatgatgattttatctatttgagtgatttaaagcaattttttcagatgacacccttattggttaattgtctcgaattattgataaacactaatttcaacaaatttttcaaaatttggcatggtgaaataaataaaatatgcatggaaagcctttttttggaacctagctggtcctcttctgctgctgttatcatgaggtgcaaaatatatttcttttacttaaggatatccaaaaagttacagttttcttatttatcttctacattaggtattgatttggaggatattaaggaagaattgacaaagttaataataagcgggcagttaaatttcgaaattgacggggacgtgatacactttgaggatagttctattttacaaagtattgttaacgaaattagcagaaatggcaccatgataaacgaggttatagataaattgaaaaatgaaaacacggatttgaaagacattatccaaggtaatccattaatgtatagcggtggaaacaatacagcgactattatcaataatgaaagcagtgacgatatggacatagatgaagttaacgatagaagtgatattagtgattctgagggaggtttgtttgaatgctga

SEQ ID NO: 5491 - DNA, 801 bp, Saccharomyces cerevisiae
atgttcttaagaagcgttaaccgtgccgtcactagaagcattttgactacgcccaagccagccgtagtaaaatcatcgtggagagtttttactgttgctaactctaagagatgtttcacacccgctgcaatcatgaggaaccaagagacccaaagagtaggtgatattttgcaatctgaattgaaaattgagaaggaaacgttaccagagtcaacgtcgttagactcatttaatgactttttgaacaaatataagttctcattagtagagacacccggtaagaatgaagctgaaatagttagaagaaccgaatcaggcgaaacagttcatgttttttttgacgtagctcagattgctaatctgccttacaacaacgcaatggatgaaaataccgagcaaaatgaagacggcattaatgaggatgattttgatgctttatcagacaactttgccaacgttaatgttgttatttctaaagaaagcgcaagcgaacctgcagtctcatttgaattactaatgaatttacaggaaggttcattttatgttgatagtgctactccatacccctcagttgatgctgctttgaatcagtctgctgaggccgaaataacaagagaattggtataccatggcccacctttttcaaacttggacgaagaactacaagaatctctggaagcttatttggaaagtagaggtgtcaatgaagagctagcctctttcattagtgcatattccgagttcaaagagaataacgagtatatttcttggttggaaaagatgaagaagtttttccactaa

SEQ ID NO: 5492 - DNA, 801 bp, Artificial Sequence
  Description of Artificial Sequence: Synthetic polynucleotide
atgttcttaagaagcgttaaccgtgccgtcactagaagcattttgactacgcccaagccagccgtagtaaaaagctcctggagagtttttactgttgctaactctaagagatgtttcacacccgctgcaatcatgaggaaccaagagacccaaagagtaggtgatattttgcaatctgaattgaaaattgagaaggaaacgttaccagagtctacgtctttagactcttttaatgactttttgaacaaatataagttctctttagtagagacacccggtaagaatgaagctgaaatagttagaagaaccgaaagtggcgaaacagttcatgttttttttgacgtagctcagattgctaatttaccttacaacaacgcaatggatgaaaataccgagcaaaatgaagacggcattaatgaggatgattttgatgctttaagtgacaactttgccaacgttaatgttgttatttctaaagaaagcgcaagcgaacctgcagtcagttttgaattattgatgaatttacaggaaggttctttttatgttgatagtgctactccatacccctctgttgatgctgctttgaatcagtctgctgaggccgaaataacaagagaattggtataccatggcccacctttttccaacttggacgaagaattacaagaatctttggaagcttatttggaaagtagaggtgtcaatgaagagttggcctctttcattagtgcatattccgagttcaaagagaataacgagtatatttcttggttggaaaagatgaagaagtttttccactga

SEQ ID NO: 5493 - DNA, 408 bp, Saccharomyces cerevisiae
atgtctgacgctgtcactattcgtaccagaaaggttatctccaacccattgttggccagaaagcaattcgttgttgacgtcttgcacccaaacagagctaatgtctccaaggatgaattacgtgaaaaattagctgaagtctacaaggctgaaaaggacgctgtctccgttttcggtttcagaacccaatttggtggtggtaaatctgttggtttcggtttggtctacaactctgttgccgaagctaagaagttcgaaccaacttacagattagtcagatacggtttggctgaaaaggttgaaaaggcttccagacaacaaagaaagcaaaagaagaacagagacaagaagatctttggtactggtaaaagattggccaaaaaggttgctcgtcgtaacgctgattaa

SEQ ID NO: 5494 - DNA, 408 bp, Artificial Sequence
  Description of Artificial Sequence: Synthetic polynucleotide
atgtctgacgctgtcactattcgtaccagaaaggttatctccaacccattgttggccagaaagcaattcgttgttgacgtcttgcacccaaacagagctaatgtctccaaggatgaattacgtgaaaaattagctgaagtctacaaggctgaaaaggacgctgtctccgttttcggtttcagaacccaatttggtggtggtaaatctgttggtttcggtttggtctacaactctgttgccgaagctaagaagttcgaaccaacttacagattagtcagatacggtttggctgaaaaggttgaaaaggcttccagacaacaaagaaagcaaaagaagaacagagacaagaagatctttggtactggtaaaagattggccaaaaaggttgctcgtcgtaacgctgattga

SEQ ID NO: 5495 - DNA, 2418 bp, Saccharomyces cerevisiae
atgtcttcagatcccttgcagcaagtttgtgatttaataaagggagatctatcacttgaaagggtacgagatattaaggaacagttgctaaaagaaaaatccgttgtagaataccaattgaataaagaatcagacaaatactatggcgaagtcgaagaatccctcaaactactgaatctgtccaaaaattcggtcacttcaatcaaacaacaaatcaatgaagttaataaattgggtaatgataatcgatttgcaattaatcgttatgatatacttttccgagccacaaaactttatgaaacggtcaatacgacatcatcgatttatgatcgaatatataactttgttgcactaatggagcatatagaaagactattagtggcggaattagcggaagatgccctggaaactggttgtccccatcttttggaaattcatttcctattaacttcagcacgcgactttcaagagcaggttgttgttatggctaaagaagcaactgaagatgcacaacgtacagtcatgaaattgttttcaagattatccggaataatatcaaaatttgataaattgctggacggcttaacttacgatattgtagaaatggccagagctgagcaaatatctttagcaattcgactttttaaaatttatgacctagaagaaagggaagatttgagaattgaagctatcagaaatataatcaagaagaaagaaattgaaatagaaaaatcctcaattaaaaaacttccaaatagcaaaaacaccgcaaggttacaagatgagacacccaaagttatagaatatccgacaaacaagggattataccaagaaataatgagcggtaccatctcaacaagaacagcacctcgaggttacaagcattttctaataaatggtataaataattccatttctgaaatgtttggtgaaatgagagaaaaatacgttggtgatcaaaaatttgatgttcttgataacatggattggattttcaacgaattgattattgtaaaggaacatattgccaactgctgtccaccacattggaacatatttgaagtatactttgaccaatactataaggaattgcattcattaattacggatctcgtggagtccgaacccgagaccattattattcttgatattcttgcattcgataagacgtttcaagatacacttaagcaagattttggatttaccaaaagcgaagtcaaatctgtcatcggcgataaagaaaaggaaacactatttaaagactatttgaatttgatagtggttaaaatgaccgagtggataggtaatttagaaaaagcagaatttgatgtattcttggaaagaagtaccccgccacattctgattcagatggattgctttttcttgatggtactaagacttgttttcaaatgtttacacagcaagtggaagtggctgcaggtactaatcaggccaaaatacttgtgggtgtggttgaaaggttcagtgatctactaacaaagaggcaaaaaaactggatttctaaaataagtgaagaaatcaaaaagcaaatcaattacaatcacaagtatgatatagatccagagagtataactcctgaagatgagtgtccaggaggtttggtggaatacttaattgctgtatcaaacgaccaaatgaaagctgcggactatgccgttgccatttcatccaagtatggtaaactggtttctaaagtttatgagaagcaaattacaaatcacttggagggcactttagatggttttgctgaagttgctcagtgcagttctttaggcctaatcacattgatgttcgatgatctgagaaaaccctaccaagagatttttagcaagacatggtatatggggagccaagcgcagcaaattgcggacacactagatgaatatcttttggatatcaaacctcagatgaattctgtgctgttcgtgaacttcatagacaatgttattggtgagacaattataaaatttttgactgctttatcgttcgagcattcattcaaaaacaaaaacaataagtttttagaggcgatgaagagggattttgaaattttttatcagctctttgtcaaggtgctggatggtaatgaaagcaaggatacgctaattacacaaaattttactgtaatggagttcttcatggacctaagctgtgagccgatagatagcatattagatatttggcaaaagtatcttgaagtatactgggactcgcgcatagatttactggtaggaatattgaagtgtaggaaagatgtgagtagctcagaaagaaagaagatcgtacaacaggctacggaaatgttacatgaataccgccgtaacatggaggccaacggtgtggatcgcgaacctactttgatgaggcggtttgtattagaattcgaaaagcaataa

SEQ ID NO: 5496 - DNA, 2418 bp, Artificial Sequence
  Description of Artificial Sequence: Synthetic polynucleotide
atgtcttctgatcccttgcagcaagtttgtgatttaataaagggagatttatctcttgaaagggtaagagatattaaggaacagttgttgaaagaaaaatccgttgtagaataccaattgaataaagaaagtgacaaatactatggcgaagtcgaagaatccctcaaattattgaatttatccaaaaattctgtcacttctatcaaacaacaaatcaatgaagttaataaattgggtaatgataatagatttgcaattaatcgttatgatatacttttcagagccacaaaactttatgaaacggtcaatacgacatcttccatttatgatagaatatataactttgttgcattaatggagcatatagaaagattattagtggcggaattagcggaagatgccttggaaactggttgtccccatcttttggaaattcatttcttattaacttctgcacgcgactttcaagagcaggttgttgttatggctaaagaagcaactgaagatgcacaacgtacagtcatgaaattgttttccagattatccggaataatatccaaatttgataaattgttggacggcttaacttacgatattgtagaaatggccagagctgagcaaatatctttagcaattagactttttaaaatttatgacttggaagaaagggaagatttgagaattgaagctatcagaaatataatcaagaagaaagaaattgaaatagaaaaatccagtattaaaaaacttccaaatagcaaaaacaccgcaaggttacaagatgagacacccaaagttatagaatatccgacaaacaagggattataccaagaaataatgagcggtaccatcagtacaagaacagcacctcgtggttacaagcattttttaataaatggtataaataattccatttctgaaatgtttggtgaaatgagagaaaaatacgttggtgatcaaaaatttgatgttcttgataacatggattggattttcaacgaattgattattgtaaaggaacatattgccaactgctgtccaccacattggaacatatttgaagtatactttgaccaatactataaggaattgcattctttaattacggatctcgtggagtccgaacccgagaccattattattcttgatattcttgcattcgataagacgtttcaagatacacttaagcaagattttggatttaccaaaagcgaagtcaaatctgtcatcggcgataaagaaaaggaaacattatttaaagactatttgaatttgatagtggttaaaatgaccgagtggataggtaatttagaaaaagcagaatttgatgtattcttggaaagaagtaccccgccacattctgattctgatggattgctttttcttgatggtactaagacttgttttcaaatgtttacacagcaagtggaagtggctgcaggtactaatcaggccaaaatacttgtgggtgtggttgaaaggttcagtgatttattaacaaagaggcaaaaaaactggatttctaaaataagtgaagaaatcaaaaagcaaatcaattacaatcacaagtatgatatagatccagagagtataactcctgaagatgagtgtccaggaggtttggtggaatacttaattgctgtatccaacgaccaaatgaaagctgcggactatgccgttgccatttcttccaagtatggtaaattggtttctaaagtttatgagaagcaaattacaaatcacttggagggcactttagatggttttgctgaagttgctcagtgcagttctttaggcttaatcacattgatgttcgatgatttgagaaaaccctaccaagagatttttagcaagacatggtatatggggagccaagcgcagcaaattgcggacacattagatgaatatcttttggatatcaaacctcagatgaattctgtgcttttcgtgaacttcatagacaatgttattggtgagacaattataaaatttttgactgctttatctttcgagcattctttcaaaaacaaaaacaataagtttttagaggcgatgaagagggattttgaaattttttatcagctctttgtcaaggtgttggatggtaatgaaagcaaggatacgttgattacacaaaattttactgtaatggagttcttcatggacttgagctgtgagccgatagatagcatattagatatttggcaaaagtatcttgaagtatactgggacagccgcatagatttattggtaggaatattgaagtgtaggaaagatgtgagtagctctgaaagaaagaagatcgtacaacaggctacggaaatgttacatgaataccgccgtaacatggaggccaacggtgtggatcgcgaacctactttgatgaggaggtttgtattagaattcgaaaagcaatga

SEQ ID NO: 5497 - DNA, 2037 bp, Saccharomyces cerevisiae
atgggtgtgcattttgatgataatgctaacacaacgtgggaagccacagaccctggcgtttcaagtgattgcgatggacagcaccgtgtgactgagtctatacaactgcagaacttttccaatacagacatggaaagtatgcttgatgaagaagggagagaaaacagtaagtcaaaatggttactattaaaaaggaaacatcctatacaaaagtttattgaaagagtttggaatggccctgttgagccaagtgacgaaccgcctagctttcctaaacgttggggatggctgaagaagatagatgattttccgcagactacattcaaaactaaaataccaagtaagttgatacgactgttgctactgattgtgtactgctgcttttggatgcgcattttttattctctcatatacccctatcttatcaagccgccatacttccatccaaatgatggctcagaaaagattcctatattgtctttaagttgcaattcctacttgaactgggagggtaccaataacgaatgtggtttaaatgctaaaaactgcggtccacttgataataaagaatacatgatcagatgtccagcactgtgtgatagaggtggatggacatactccgccattgccgtagggaataggagagtcaaatatacagggtatgaaattggcggaggtgccctgtttagcgaagaagacccgatggtcgtgtcctacccttatagaagtgactcgtttccatgcgcctctgcagtacatgcaggtgttatctcaccattttacggtggctgtaccaaagtttctatgcaaggggcccaaaattcttttccatcaaaaaaaggaatgtataacactgggttttcagtagcattcaattcattttttcccggttcatattcattcagagatatacaaggcggtatcctgtcgggctgttatgatcctcgagcagctgtggtcgcattgaatatgctttttggactgccaatattttatttgtatgacagtatttacgggtactggataaacacgatagtgggctattggactcttgtattatctctagaccctccattactaacggatgcacatgacccagctagcgtgtatgagcttttcagtgtgggatttcaaagacttttacctttatgctttgttttatacgtcgtttggaagagtgcggtgaaaagaacactagaaaatggatcgcccatagcaaaagtaatactttggtaccccacattttggttgggaatctcaaataatgtcacatttgaccgattacctgttgatagacttacgacgacggatttgaaagagcaggctggagcactgactgctgtgggatctattgcagccactattcttacatgcgcagttatacaggcttattcactctggaaatcaggaagattcaaaaagtattttaaaatatacatttgtttcattggcggattaatagctttgggatctttgccgggactgaacttgaggatacatcactacatcttaggttctatactggttccaggctgtgccacgagaggatcatctgcatatctgttccaaggaattttagtcgggttaattctgtctggtgtagcaagatgggattttgcaagcatagttgagacagatacggccttgttaagaggagaagcaggtgcttctttgaagccacctatactggattttaacgacgatcaaaaccattctctgtcgtggcatctaaatgcaactgatccagtaattgatcaaataggaaacatcgacggtttttcattacttttgaacgatgtggaagtgtacgtaggcaagaatgagactgtgagtatcgatgttcttcggatggagaatccagcacttgctcaaatgatggacgatgctcttgatgcctctaacgggacaatagacttgtatttaagagtggctcgtgcctctgtacggtctccaacgaatagaggtgactatacgaatgcaggagttttacagtggccgaacggaatgtggcaaaagcctgaaccaggcgtatcataa

SEQ ID NO: 5498 - DNA, 2037 bp, Artificial Sequence
  Description of Artificial Sequence: Synthetic polynucleotide
atgggtgtgcattttgatgataatgctaacacaacgtgggaagccacagaccctggcgtttctagtgattgcgatggacagcaccgtgtgactgagtctatacaattgcagaacttttccaatacagacatggaaagtatgcttgatgaagaagggagagaaaacagtaagagtaaatggttattattaaaaaggaaacatcctatacaaaagtttattgaaagagtttggaatggccctgttgagccaagtgacgaaccgcctagctttcctaaacgttggggatggttaaagaagatagatgattttccgcagactacattcaaaactaaaataccaagtaagttgataaggttattgttgttaattgtgtactgctgcttttggatgcgcattttttattctctcatatacccctatcttatcaagccgccatacttccatccaaatgatggctctgaaaagattcctatattgtctttaagttgcaattcctacttgaactgggagggtaccaataacgaatgtggtttaaatgctaaaaactgcggtccacttgataataaagaatacatgatcagatgtccagcattatgtgatagaggtggatggacatactccgccattgccgtagggaataggagagtcaaatatacagggtatgaaattggcggaggtgccttatttagcgaagaagacccgatggtcgtgtcctacccttatagaagtgactcttttccatgcgcctctgcagtacatgcaggtgttatctctccattttacggtggctgtaccaaagtttctatgcaaggggcccaaaattcttttccatctaaaaaaggaatgtataacactgggtttagcgtagcattcaattctttttttcccggttcttattctttcagagatatacaaggcggtatcttaagtggctgttatgatcctagagcagctgtggtcgcattgaatatgctttttggattaccaatattttatttgtatgacagtatttacgggtactggataaacacgatagtgggctattggactcttgtattatctttggaccctccattattgacggatgcacatgacccagctagcgtgtatgagcttttcagtgtgggatttcaaagacttttacctttatgctttgttttatacgtcgtttggaagagtgcggtgaaaagaacattagaaaatggaagtcccatagcaaaagtaatactttggtaccccacattttggttgggaatctctaataatgtcacatttgacagattacctgttgatagacttacgacgacggatttgaaagagcaggctggagcattgactgctgtgggatctattgcagccactattcttacatgcgcagttatacaggcttattccctctggaaaagtggaagattcaaaaagtattttaaaatatacatttgtttcattggcggattaatagctttgggatctttgccgggattgaacttgaggatacatcactacatcttaggttctatattagttccaggctgtgccacgagaggatcttctgcatatcttttccaaggaattttagtcgggttaattttatctggtgtagcaagatgggattttgcaagcatagttgagacagatacggccttgttaagaggagaagcaggtgcttctttgaagccacctatattggattttaacgacgatcaaaaccattctttatcttggcatttgaatgcaactgatccagtaattgatcaaataggaaacatcgacggtttttctttacttttgaacgatgtggaagtgtacgtaggcaagaatgagactgtgagtatcgatgttcttcgtatggagaatccagcacttgctcaaatgatggacgatgctcttgatgcctctaacgggacaatagacttgtatttaagagtggctcgtgcctctgtaagatctccaacgaatagaggtgactatacgaatgcaggagttttacagtggccgaacggaatgtggcaaaagcctgaaccaggcgtatcttga

SEQ ID NO: 5499 - DNA, 2610 bp, Saccharomyces cerevisiae
atgtacgttattaaaagagacggccgcaaagagcccgttcaattcgataaaattacctcccgtatcacccgtttgtcatacggtttagacccaaaccgtattgatgctgttaaggtaacccaacgtattatttctggtgtgtactccggtgttactaccgttgagctggacaatcttgcagctgaaacatgtgcatacatgaccactgtgcaccctgattatgccactctagccgctagaatcgccatctctaacttacataagcaaaccacaaagcaattctccaaagttattgaggatttacacgactggattaacccagctactggaaagcatgctcctatgatttcggacgaaatttacaacattgtcatggaaaacaaagatactttgaactcggccatcgtgtacgatagggatttccagtatacgtatttcggattcaagacactggagcgttcgtacttgctaagactgaacggtgaagtggcagaacgtcctcagcatttggtaatgcgtgtggcgctaggtatccatggtagcgatatcgaatctgtgctgaagacttataatttgatgtcgttaagatacttcactcacgcttccccaactttattcaacgctggtacgccacatcctcaaatgtcttcatgtttcttaattgccatgaaggatgactctatcgaaggtatttatgatactttgaaagaatgtgctatgatttccaaaactgcaggtggtgttggtcttcatatcaacaacatccgttccacaggttcttatatcgctggtaccaacggtacttcaaacgggttgattcctatgattcgtgttttcaataatactgcccgttatgtggaccagggtggtaacaagagacctggtgctttcgcccttttcttggagccatggcatgcagatatcttcgactttgtcgatatcagaaaaacacatggtaaggaagaaattcgtgcaagagatttgttccctgctctatggatccctgatcttttcatgaaacgtgttcaagaggatgggccttggactttgttttcgcccagtgctgccccaggtttagatgatgtgtggggtgatgaatttgaagaactatatactcgttacgaaagagaaggtcgtggtaaaacaattaaagcccaaaagttgtggtatgccattttgcaagcacagacagaaacaggtacacctttcatggtttataaggacgcatgtaacaggaagacaaaccaacagaacttaggtactatcaaatcatctaatttatgttgtgaaatcgtcgaatattcctccccggatgaaactgcagtttgtaatttagcttctattgccctaccagcattcgttgaggtttcagaagatggtaaaactgcaagctataatttcgagagattacacgagattgctaaagtcattactcacaacttgaacagagttatcgaccgtaattactatccagttcccgaggctagaaattcaaatatgaagcatagacctattgctcttggtgtccagggtttggccgatacttatatgatgttgcgtctaccctttgaatcggaagaagctcaaactctaaacaaacaaatcttcgaaactatttaccatgctactcttgaagcctcctgtgaattggcccaaaaagaaggtaaatattctacttttgaaggttctccagcttctaagggtattttacaattcgatatgtggaacgctaaaccatttggcatgtgggattgggaaaccttaagaaaggacattgttaaacatgggttaagaaactctttgactatggcaccaatgccaaccgcctcaacttcccaaattcttggttataatgaatgcttcgaaccagtgacctcaaacatgtactctcgtcgtgtcctgtctggtgaattccaagttgttaatccatatttactacgtgatttagtcgacctgggtatttgggatgatagtatgaaacaatatctaattacacaaaatggttctattcaaggcttaccaaatgtgccacaagaattgaaggaattatacaaaaccgtctgggaaatctctcaaaagaccattatcaatatggctgctgatcgtgccatctacatcgatcagtctcattccttgaatcttttcttgcaagcaccatcaatgggtaagattactagtatgcatttctacggttggaagaagggtttaaaaactggtatgtactacttaagaacgcaagccgcctccgctgctattcaatttaccattgatcaagaggttgccgatcaagccgctacacatattgcttccgtctcagaattggatcgtccagtttatgttccaaagggtacaaaattctctgaacaaaaggcggcatctgcgcttaccgaaagctcagataatgagaaggatgcatctccagttccatccgaacaatcatcggtgtcgagtgccatgtcaaatgtgaaattggaagatagtgttgccccagcagttccaacggaaacaataaaagaagattccgacgagaagaaatgtgacatttacaatgaaaaggtgattgcttgtactgctcctactccagaagcttgtgagtcatgttccggttga

SEQ ID NO: 5500 - DNA, 2610 bp, Artificial Sequence
  Description of Artificial Sequence: Synthetic polynucleotide
atgtacgttattaaaagagacggccgcaaagagcccgttcaattcgataaaattacctcccgtatcacccgtttgagttacggtttagacccaaaccgtattgatgctgttaaggtaacccaacgtattatttctggtgtgtactccggtgttactaccgttgagttggacaatcttgcagctgaaacatgtgcatacatgaccactgtgcaccctgattatgccactttggccgctagaatcgccatctctaacttacataagcaaaccacaaagcaattctccaaagttattgaggatttacacgactggattaacccagctactggaaagcatgctcctatgatttctgacgaaatttacaacattgtcatggaaaacaaagatactttgaactctgccatcgtgtacgatagggatttccagtatacgtatttcggattcaagacattagagcgttcttacttgttaagattgaacggtgaagtggcagaacgtcctcagcatttggtaatgcgtgtggcgcttggtatccatggtagcgatatcgaatctgtgttgaagacttataatttgatgtctttaagatacttcactcacgcttccccaactttattcaacgctggtacgccacatcctcaaatgtcttcttgtttcttaattgccatgaaggatgactctatcgaaggtatttatgatactttgaaagaatgtgctatgatttccaaaactgcaggtggtgttggtcttcatatcaacaacatccgttccacaggttcttatatcgctggtaccaacggtacttctaacgggttgattcctatgattcgtgttttcaataatactgcccgttatgtggaccagggtggtaacaagagacctggtgctttcgcccttttcttggagccatggcatgcagatatcttcgactttgtcgatatcagaaaaacacatggtaaggaagaaattcgtgcaagagatttgttccctgctttatggatccctgatcttttcatgaaacgtgttcaagaggatgggccttggactttgttttctcccagtgctgccccaggtttagatgatgtgtggggtgatgaatttgaagaattgtatactcgttacgaaagagaaggtcgtggtaaaacaattaaagcccaaaagttgtggtatgccattttgcaagcacagacagaaacaggtacacctttcatggtttataaggacgcatgtaacaggaagacaaaccaacagaacttaggtactatcaaatcttctaatttatgttgtgaaatcgtcgaatattcctccccggatgaaactgcagtttgtaatttagcttctattgccttaccagcattcgttgaggtttctgaagatggtaaaactgcaagctataatttcgagagattacacgagattgctaaagtcattactcacaacttgaacagagttatcgaccgtaattactatccagttcccgaggctagaaatagtaatatgaagcatagacctattgctcttggtgtccagggtttggccgatacttatatgatgttgcgtttaccctttgaaagtgaagaagctcaaactttgaacaaacaaatcttcgaaactatttaccatgctactcttgaagcctcctgtgaattggcccaaaaagaaggtaaatattctacttttgaaggttctccagcttctaagggtattttacaattcgatatgtggaacgctaaaccatttggcatgtgggattgggaaaccttaagaaaggacattgttaaacatgggttaagaaactctttgactatggcaccaatgccaaccgcctctacttcccaaattcttggttataatgaatgcttcgaaccagtgaccagtaacatgtactctcgtcgtgtcttgtctggtgaattccaagttgttaatccatatttattacgtgatttagtcgacttgggtatttgggatgatagtatgaaacaatatttgattacacaaaatggttctattcaaggcttaccaaatgtgccacaagaattgaaggaattatacaaaaccgtctgggaaatctctcaaaagaccattatcaatatggctgctgatcgtgccatctacatcgatcagtctcattccttgaatcttttcttgcaagcaccaagcatgggtaagattactagtatgcatttctacggttggaagaagggtttaaaaactggtatgtactacttaagaacgcaagccgcctccgctgctattcaatttaccattgatcaagaggttgccgatcaagccgctacacatattgcttccgtcagtgaattggatcgtccagtttatgttccaaagggtacaaaattctctgaacaaaaggcggcatctgcgcttaccgaaagcagtgataatgagaaggatgcatctccagttccatccgaacaatcttctgtgtccagtgccatgagtaatgtgaaattggaagatagtgttgccccagcagttccaacggaaacaataaaagaagattccgacgagaagaaatgtgacatttacaatgaaaaggtgattgcttgtactgctcctactccagaagcttgtgagagttgttccggttga

SEQ ID NO: 5501 - DNA, 468 bp, Saccharomyces cerevisiae
atgaccaaagtagatttttggccaactcttaaggacgcatacgaaccactctatccgcagcagctggagattctgcgccagcaagtcgtctccgagggggggcccaccgctaccatacagtcaaggtttaactacgcatgggggctgatcaaatccactgacgtgaatgacgaaaggcttggtgtgaaaatcctcacagacatttacaaagaggccgagtcccgtagacgagaatgcctatattatctgaccataggttgctacaaactcggtgaatactctatggcgaagagatatgtagacactttatttgagcatgagcgtaataacaagcaggtgggcgctttgaagagtatggtagaggataagatccagaaggaaacactcaagggtgttgtcgtcgctggaggcgtactagccggcgctgtggccgtggctagtttcttcttaagaaacaagagaaggtaa

SEQ ID NO: 5502 - DNA, 468 bp, Artificial Sequence
  Description of Artificial Sequence: Synthetic polynucleotide
atgaccaaagtagatttttggccaactcttaaggacgcatacgaaccactctatccgcagcagttggagattttgcgccagcaagtcgtctccgagggggggcccaccgctaccatacagtctaggtttaactacgcatgggggttgatcaaatccactgacgtgaatgacgaaaggcttggtgtgaaaatcctcacagacatttacaaagaggccgagtcccgtagaagagaatgcttatattatttgaccataggttgctacaaactcggtgaatactctatggcgaagagatatgtagacactttatttgagcatgagcgtaataacaagcaggtgggcgctttgaagagtatggtagaggataagatccagaaggaaacactcaagggtgttgtcgtcgctggaggcgtattggccggcgctgtggccgtggctagtttcttcttaagaaacaagagaaggtga

SEQ ID NO: 5503 - DNA, 774 bp, Saccharomyces cerevisiae
atgaaaagaagtgaaaaaaaatcgatgagctcagctcttaagaacggtattatggaacgaactcaacccgaaaaggtagtacagatgcagggcacggcagatttgagcacttcgaaacttggtacgaaaaaatactgggatgaactgtatgccctggagctggagaatttcaggcggaatccgcaggataccggggactgttggtttagcgatagcgatgctgaacaaaagatgattgattttctggtagataacattggtgcgtacagaatttctgagaatgcttctgttgtagacctcggtacaggtaatggacacatgttatttgaactgcatcaaacggaattccaagggaaactggtcgggatagactattctgaggaaagcgtcaaactcgctagtaatatagccgaggccaccggtgttgacaatttcatcagtttccagcaagcagacatctttagtggtgactggaagccgggaaagtatgacattgtgttggataaagggaccctagatgccatttcattgagtggcatgaagatcaacggtaaacttgatgtagtcgatgtatacgccggagtagtggaaaggattttgaaaaaagacggtattttcttgatcacttcttgtaatttcacacaagatgaactagtaaagatcatagagactgataatttgaaaatgtggaaaacaataaaataccctgttttccaatttggcggggtccagggtgcgaccatatgtagtgtagcatttgttaaacaaaactga

SEQ ID NO: 5504 - DNA, 774 bp, Artificial Sequence
  Description of Artificial Sequence: Synthetic polynucleotide
atgaaaagaagtgaaaaaaaatctatgagcagtgctcttaagaacggtattatggaaagaactcaacccgaaaaggtagtacagatgcagggcacggcagatttgagcacttctaaacttggtacgaaaaaatactgggatgaattgtatgccttagagttagagaatttcaggagaaatccgcaggataccggggactgttggtttagcgatagcgatgctgaacaaaagatgattgattttttggtagataacattggtgcgtacagaatttctgagaatgcttctgttgtagacctcggtacaggtaatggacacatgttatttgaattacatcaaacggaattccaagggaaattggtcgggatagactattctgaggaaagcgtcaaactcgctagtaatatagccgaggccaccggtgttgacaatttcatcagtttccagcaagcagacatctttagtggtgactggaagccgggaaagtatgacattgtgttggataaagggaccttggatgccatttctttgagtggcatgaagatcaacggtaaacttgatgtagtcgatgtatacgccggagtagtggaaaggattttgaaaaaagacggtattttcttgatcacttcttgtaatttcacacaagatgaattggtaaagatcatagagactgataatttgaaaatgtggaaaacaataaaataccctgttttccaatttggcggggtccagggtgcgaccatatgtagtgtagcatttgttaaacaaaactga

SEQ ID NO: 5505 - DNA, 984 bp, Saccharomyces cerevisiae
atgagtgagaccaatggtggcaatgcagccagggaaaattctgaggtgaaacaaactgcagttgaaaatcctatcgataaactagatggaactcctaagagaccgagggaaaaagatcaggatgaacaagcggaagaaacgagtgacaaatcagaagcacccaataaaaatgatgaggagaaaaaggaggaaggtaaaaaagaccaagaaccatcgcataagaagatcaaggttgacgacggaaagaccgtagaatctggtattgtggaagatgacaaaaaggaggataaattcgtgtttggtgccgcatctaaatttggaactgggtttggtgttgccaaaaaggacacgaaagatggagatgcaactaccagtactgaaagtttaccagcctctgacagcaaaacaaagaagccatttgcatttggttcaggtttatcatttggcagcggcttcaacatactgaaaaacaaaacagaaaataactctgaaagtgaaaagaaagctactgatgttgacaaagataaagtccatagtggatctgaacaactagcgaatgcctcagaagatacaaaagacaaaccaaaacccctcaaattgcagaaacaggaagtcaagtctggtgaagagtctgaggagtgcatatatcaagtcaatgcgaagctgtaccaactttccaacataaaagaaggctggaaggaaagaggtgttggtatcatcaaaatcaataaaagtaaggacgacgtcgagaagacgcgtattgttatgaggtctcgtggtatcttaaaagtcattttaaacatccaactggtcaaggggttcactgtgcaaaaaggatttacaggttctttgcaaagcgaaaaattcataagattactagcagtagatgataacggtgatcctgcacagtacgccataaagactggtaagaaggaaaccacggatgaattgtataacattatagttaaatccgttcctaaataa

SEQ ID NO: 5506 - DNA, 984 bp, Artificial Sequence
  Description of Artificial Sequence: Synthetic polynucleotide
atgagtgagaccaatggtggcaatgcagccagggaaaattctgaggtgaaacaaactgcagttgaaaatcctatcgataaattggatggaactcctaagagaccgagggaaaaagatcaggatgaacaagcggaagaaacgagtgacaaaagtgaagcacccaataaaaatgatgaggagaaaaaggaggaaggtaaaaaagaccaagaaccatctcataagaagatcaaggttgacgacggaaagaccgtagaatctggtattgtggaagatgacaaaaaggaggataaattcgtgtttggtgccgcatctaaatttggaactgggtttggtgttgccaaaaaggacacgaaagatggagatgcaactaccagtactgaaagtttaccagcctctgacagcaaaacaaagaagccatttgcatttggttctggtttatcttttggcagcggcttcaacatattgaaaaacaaaacagaaaataactctgaaagtgaaaagaaagctactgatgttgacaaagataaagtccatagtggatctgaacaattggcgaatgccagtgaagatacaaaagacaaaccaaaacccctcaaattgcagaaacaggaagtcaagtctggtgaagagtctgaggagtgcatatatcaagtcaatgcgaagttgtaccaactttccaacataaaagaaggctggaaggaaagaggtgttggtatcatcaaaatcaataaaagtaaggacgacgtcgagaagacgcgtattgttatgaggtctcgtggtatcttaaaagtcattttaaacatccaattggtcaaggggttcactgtgcaaaaaggatttacaggttctttgcaaagcgaaaaattcataagattattggcagtagatgataacggtgatcctgcacagtacgccataaagactggtaagaaggaaaccacggatgaattgtataacattatagttaaatccgttcctaaatga

SEQ ID NO: 5507 - DNA, 465 bp, Saccharomyces cerevisiae
atggaagccgattggaggagaattgacatcgatgcatttgatccagagagtggcagactaaccgctgccgatctggtaccaccatacgaaactactgtcacattacaagaattacaacctcgaatgaatcaattgcgctcgcttgccacaagtggtgactctttgggagccgttcaattactcacaaccgatcctccatacagtgcagatgctccaacaaaggagcaatattttaagagcgtccttgaagcattgacacaagtcaggcaagccgatattggtaatgtaatcaaaaatttgagtgattctcagagggacgtgctggtaaagtatctctacaaaggaatgtccgtacctcagggccagaaacaagggggtgtcttgcttgcgtggctggaaagaattactcaagtcagtggtgtcacacctatcgttcattatatatcggatagaagaactgtatga

SEQ ID NO: 5508 - DNA, 465 bp, Artificial Sequence
  Description of Artificial Sequence: Synthetic polynucleotide
atggaagccgattggaggagaattgacatcgatgcatttgatccagagagtggcagattgaccgctgccgatttagtaccaccatacgaaactactgtcacattacaagaattacaacctagaatgaatcaattgcgctctcttgccacaagtggtgactctttgggagccgttcaattactcacaaccgatcctccatacagtgcagatgctccaacaaaggagcaatattttaagagcgtccttgaagcattgacacaagtcaggcaagccgatattggtaatgtaatcaaaaatttgagtgattctcagagggacgtgttagtaaagtatctctacaaaggaatgtccgtacctcagggccagaaacaagggggtgtcttgcttgcgtggttagaaagaattactcaagtcagtggtgtcacacctatcgttcattatatatctgatagaagaactgtatga

SEQ ID NO: 5509 - DNA, 903 bp, Saccharomyces cerevisiae
atgaattataatctatccaagtatccagacgacgtgtcgagacttttcaagccaaggccacctttatcttacaaaagaccaaccgattacccatatgcgaagagacaaacaaatccaaatatcactggcgttgcaaacttactatcaacctctttgaagcactatatggaggagtttcctgaaggatctccaaacaaccatctccaaagatacgaagacatcaaactttccaagatcaaaaatgctcaattgttagaccggagactacaaaattggaatcctaacgttgaccctcatatcaaggacacagatccctacagaacgatatttattgggaggctaccatacgatcttgacgaaattgaactgcaaaagtattttgttaagtttggcgagatcgaaaaaattaggatagtcaaggacaagataacccagaagagtaaaggctacgccttcatagttttcaaagacccaataagtagtaaaatggcattcaaggagattggagtacacagaggtatccaaatcaaagacagaatctgcatagtcgacatagaaagaggcagaaccgttaaatatttcaagccaagaagattgggcggcggcctaggaggcagaggctattccaacagagacagcaggcttccaggaaggtttgcaagcgcaagtacatcaaatcccgccgaaagaaattatgctcccaggctgccacgcagggaaacttcttcctccgcatatagcgctgatagatacggcagttccacattggacgcgaggtaccgtggaaacaggccattgctctccgccgccactcctactgctgctgttacttctgtatataaatctagaaactcacggactcgagagtctcaaccagctcccaaagaagcgcccgactattga

SEQ ID NO: 5510 - DNA, 903 bp, Artificial Sequence
  Description of Artificial Sequence: Synthetic polynucleotide
atgaattataatttatccaagtatccagacgacgtgtccagacttttcaagccaaggccacctttatcttacaaaagaccaaccgattacccatatgcgaagagacaaacaaatccaaatatcactggcgttgcaaacttattatctacctctttgaagcactatatggaggagtttcctgaaggatctccaaacaaccatctccaaagatacgaagacatcaaactttccaagatcaaaaatgctcaattgttagacagaagattacaaaattggaatcctaacgttgaccctcatatcaaggacacagatccctacagaacgatatttattgggaggttaccatacgatcttgacgaaattgaattacaaaagtattttgttaagtttggcgagatcgaaaaaattaggatagtcaaggacaagataacccagaagagtaaaggctacgccttcatagttttcaaagacccaataagtagtaaaatggcattcaaggagattggagtacacagaggtatccaaatcaaagacagaatctgcatagtcgacatagaaagaggcagaaccgttaaatatttcaagccaagaagattgggcggcggcttgggaggcagaggctattccaacagagacagcaggcttccaggaaggtttgcaagcgcaagtacaagtaatcccgccgaaagaaattatgctcccaggttaccacgcagggaaacttcttcctccgcatatagcgctgatagatacggcagttccacattggacgcgaggtaccgtggaaacaggccattgctctccgccgccactcctactgctgctgttacttctgtatataaatctagaaactctagaactagggagtctcaaccagctcccaaagaagcgcccgactattga

SEQ ID NO: 5511 - DNA, 435 bp, Saccharomyces cerevisiae
atgatgataataatatttatagaattgtgtagaattgcagattcccttttatggattcctaaatcctcgaggagaacttctagtacattctacatacctaatattattgccttattaaaaatggaatcccaacaattatctcaaaattcaccaactcttcacatacatacctgcggtagcaagataggtacactttttctacgtttcacgaaggtagcgataggtacctcactcattgtaggtgcgggggtagcgatggaggtttctgtaccattaccaccacagccactatactcacgtagtgaagtccctagcgtggaattgtgtggtatcgttgctatctgtcgttcgccaccctcggtatatccaacgtgcaggccaatatcactctctaagaaaatcgtatcaggattggtacggacaaactcttcatag

SEQ ID NO: 5512 - DNA, 435 bp, Artificial Sequence
  Description of Artificial Sequence: Synthetic polynucleotide
atgatgataataatatttatagaattgtgtagaattgcagattcccttttatggattcctaaatccagcaggagaacttctagtacattctacatacctaatattattgccttattaaaaatggaatcccaacaattatctcaaaattctccaactcttcacatacatacctgcggtagcaagataggtacactttttttacgtttcacgaaggtagcgataggtacctctctcattgtaggtgcgggggtagcgatggaggtttctgtaccattaccaccacagccattgtactctcgtagtgaagtccctagcgtggaattgtgtggtatcgttgctatctgtcgttctccaccctctgtatatccaacgtgcaggccaatatctctctctaagaaaatcgtatctggattggtaagaacaaactcttcttga

SEQ ID NO: 5513 - DNA, 495 bp, Saccharomyces cerevisiae
atgacgaaaaaggataagaaagcaaagggtcctaagatgtccaccatcactacaaaaagtggtgagtccttaaaggtttttgaggatttgcatgattttgaaacatatttaaagggtgagacggaagatcaagagttcgaccatgtccattgccaactgaagtactatccaccctttgtcctgcatgatgcgcatgatgatccggaaaagatcaaagagactgccaattcgcactctaagaagtttgttcgccatttacaccagcatgttgagaagcacctgctaaaggacatcaaaaccgctatcaacaagccagaattgaaattccacgataagaaaaagcaggaatcctttgaccggattgtttggaattatggcgaagaaacggagttgaacgccaagaaattcaaggtgtctgtcgaagttgtatgtaaacacgatggcgcaatggtagatgttgattacaagacagaacccttgcagccactcatctaa

SEQ ID NO: 5514 - DNA, 495 bp, Artificial Sequence
  Description of Artificial Sequence: Synthetic polynucleotide
atgacgaaaaaggataagaaagcaaagggtcctaagatgtccaccatcactacaaaaagtggtgagtccttaaaggtttttgaggatttgcatgattttgaaacatatttaaagggtgagacggaagatcaagagttcgaccatgtccattgccaattgaagtactatccaccctttgtcttgcatgatgcgcatgatgatccggaaaagatcaaagagactgccaattctcactctaagaagtttgttcgccatttacaccagcatgttgagaagcacttattgaaggacatcaaaaccgctatcaacaagccagaattgaaattccacgataagaaaaagcaggaatcctttgacagaattgtttggaattatggcgaagaaacggagttgaacgccaagaaattcaaggtgtctgtcgaagttgtatgtaaacacgatggcgcaatggtagatgttgattacaagacagaacccttgcagccactcatctga

SEQ ID NO: 5515 - DNA, 1923 bp, Saccharomyces cerevisiae
atgaacggtcctccaacattcactcaatatagaataaataagttttctgggaatggagcaactcataagattagagaattactcaattttaatgatgaaaagaaatggaaacagttttcgagcagaaggctggagctgatagacaaattccaactaagtcaatataaggcaagcgaacaagatcaaaacataaagcagattgctacaatattaagaacggagtttggataccctgtaagctgctctaaggaattcgaaaagttagtcactgctgctgtgcaatcagtgagaaggaatagaaaacgatcaaaaaaacgctacgctctcagcatagccaatggcagtggcggcaatgtcaacaacagcatctcgtcaaattctacttctgacgacgagatctctccgtcgatctaccagcgctccaattcggacttcctgcctagttctaattatgctgcagatttccagttttcaaacaagttccagcctctcatgagtcaccagagtcataacggaaccatttttccaaccgtgggcacccaaaatgactcatctccatcggttacttcgacccaacaaaagtataacgatatagtcaccatgctagtgcacgatcttgttacgaatgtcgtacccctatcagaacaagctctcaaggacccatatactgggccaaacctgtcacattttgctacgtcttcactcagccagcaacctaacattaccacaaacatcccgatagattctaccgtgccatttttcctgagggaaaagttactcctacaaatccaaagatcaagaacttgtcaggacatttcgcaggctgcaggatccattgatatatacgcaaatctggagattttgggtgaaatgtcaatccgaatgtctattgcattcgttatcgaacgatttttctccaacttggtctcttcttcaatgaagtatatcactgccaagacgtgctctcctgaaaatctggctttgttgtctcaaagactgttcggtgccgctacaagacataacttatctcatttccccgcggctcaggtacaactaaggctactgtatttggtcataggtggtattgtcaaggattttggcttcgaccccacgctttaccctttaagtgaaatcatacatcatattgtgatggttcagtatcctttggctagttcctgtgcgtcagaaccaccatcatcttcacctaacaagagggttaagagaagccctcctgtcgtttcaagtgacgttatgttgaataataataacactctatcgaatagagctacacttttaactacgctaccaatgaagcctcaatcggccaataaagatgttaatcgcagagtgatcattagatttaatgatcgcgagcaagcctttactttccaccagttgagcaatggaccacccacggtgtctgaagttttggaaaactgtaaaaatttatttaatattatcaacaagaacaagaattttggtattttccataacgataacctcttgaacgatgaaagtttggcaaagttatttgattccttttccacgagcgagattcatctcgtaattaaggacatttccaccattccactacaagatgcaaaaataccagtgcccattacgttgcccaaaatgtcatgcataggtgaaaacccctctatgccttctattccattggtaccacaagaaaaagatgatccaaaaaaatcaagcttaactgcctttgataacatccttaataggatctctaaatcgccaatgaatgaagaaaatagcaacactactttaaacactggcacctccacctccaacacaaataataatgaccacaacgagtctgtgccagcgccatacgttacaaagaacaaaaattcttttcaaaatggcaatttaccacagccggttttccagcctttactttga

SEQ ID NO: 5516 - DNA, 1923 bp, Artificial Sequence
  Description of Artificial Sequence: Synthetic polynucleotide
atgaacggtcctccaacattcactcaatatagaataaataagttttctgggaatggagcaactcataagattagagaattactcaattttaatgatgaaaagaaatggaaacagttttctagcagaaggttagagttgatagacaaattccaattgagtcaatataaggcaagcgaacaagatcaaaacataaagcagattgctacaatattaagaacggagtttggataccctgtaagctgctctaaggaattcgaaaagttagtcactgctgctgtgcaatctgtgagaaggaatagaaaaagaagtaaaaaacgctacgctctcagcatagccaatggcagtggcggcaatgtcaacaacagcatctcttccaattctacttctgacgacgagatctctccgtctatctaccagcgctccaatagtgacttcttacctagttctaattatgctgcagatttccagttttccaacaagttccagcctctcatgagtcaccagagtcataacggaaccatttttccaaccgtgggcacccaaaatgactcttctccatctgttacttctacccaacaaaagtataacgatatagtcaccatgttggtgcacgatcttgttacgaatgtcgtacccttatctgaacaagctctcaaggacccatatactgggccaaacttatctcattttgctacgtcttctctcagccagcaacctaacattaccacaaacatcccgatagattctaccgtgccatttttcttgagggaaaagttactcttacaaatccaaagatctagaacttgtcaggacatttctcaggctgcaggatccattgatatatacgcaaatttggagattttgggtgaaatgtccatcagaatgtctattgcattcgttatcgaaagatttttctccaacttggtctcttcttctatgaagtatatcactgccaagacgtgctctcctgaaaatttggctttgttgtctcaaagattattcggtgccgctacaagacataacttatctcatttccccgcggctcaggtacaattaaggttattatatttggtcataggtggtattgtcaaggattttggcttcgaccccacgctttaccctttaagtgaaatcatacatcatattgtgatggttcagtatcctttggctagttcctgtgcgtctgaaccaccatcttcttctcctaacaagagggttaagagaagccctcctgtcgtttctagtgacgttatgttgaataataataacactttatccaatagagctacacttttaactacgttaccaatgaagcctcaatctgccaataaagatgttaatcgcagagtgatcattagatttaatgatcgcgagcaagcctttactttccaccagttgagcaatggaccacccacggtgtctgaagttttggaaaactgtaaaaatttatttaatattatcaacaagaacaagaattttggtattttccataacgataacctcttgaacgatgaaagtttggcaaagttatttgattccttttccacgagcgagattcatctcgtaattaaggacatttccaccattccattgcaagatgcaaaaataccagtgcccattacgttgcccaaaatgagttgcataggtgaaaacccctctatgccttctattccattggtaccacaagaaaaagatgatccaaaaaaaagtagcttaactgcctttgataacatccttaataggatctctaaatctccaatgaatgaagaaaatagcaacactactttaaacactggcacctccacctccaacacaaataataatgaccacaacgagtctgtgccagcgccatacgttacaaagaacaaaaattcttttcaaaatggcaatttaccacagccggttttccagcctttactttga

SEQ ID NO: 5517 - DNA, 1884 bp, Saccharomyces cerevisiae
atgactctagaaccacactatagtgccaagtcggctgcttcagccagtgcctttgttgcccgttctgcgaccgaaagctcaacagcaagcacaaaagctgctcctaggaaaaagacgtactcgcagtcaaatggtattcccataaggattgataatctccctccgggcaagacttgggcccaggtaaaatatttgataggcggaatcatataccataccaatattttacaggtgaaaatgctgcctccaatgacttccatggttcctccttttattacttttcagagttgcattgtcattctgaagaactcgatagataacgagtccctggaaaacttactacttactttgaacacctaccaatgggattatcatgatctgttcgtttacctgttgccgtacactaatgattctccttcactgcgatatccagaaatcagtgatagcaacaatgacgtccggagtgctcccgatgaaactaaaagatctatttctcctcgatatgcaagccatgtttcatctgtgacaccgcagccaccatccgcttctaccccaccttctcaatttttcagtttttctcctgaagtgagccttcgaaagaatgagaacataacgccattgcccacgcctgttcccgtacctgttggtgtgccacctcttgctcccccgcctcatggtccattttcgacttcgatgctacctatgttgggtgctcctccgggaacggtacctaatatgcagatgccctatcaaactactctaccttcaccaacagctgctgctactgctggtggtccacttgcttcccctacacactatccccgtcgtcggcatttctatcaccagaaccaaagccagtttcaaaaatacatgcataatagccccaggaatccagatactggcacaggccctcgtctttctcagcagcatcacctctccttaaggaacaataagataaatccctcttataacgaaatatctgccctttacaacttgaacatggcctcaaattccaataataatggtaatattcccactacaagtacgaatggtgatgaccgtgccctccaagcaaagaatggtggaacaattacaccttcacaaactcaaataaatcacaaaagattaaagcatatctttaacgagaaaagctttagaaaacaaatgacgaatagaggtatgtggcagctgaagatcataaatttcccaccctatatacctatagaattcttggagaaattatcagagtctgatttcaatgagttaatgaaccaagagaagttcacagttattgaaattaaagagaaaggacaattggaaaaatttggaaggctaagatggacagttctaaaagattttataaaactgaaatgccccaagctattaagactacaggaaagacagtttctacagcaacaaaacgaagcatctttactcaatgaatctatggacgctctaaagatatcagaaaatgagaacaccaacgggagtgcaaataatagcacatacacaaatggcggacctcgaacatctatcaataatacaagggaattctatgtaggggtttatgaagatcatgaagaagcaactctactgaggtttgaattaccggaagatgaattagaggagtttaatagaaatttgccaactacttttgcacaaagtggaaacgtctctgactccgaaggtgatagcaaggcgaaatactttaaagttagcacaattgtgtataatgccattgttgggttccacgataaagagctgtctgatttgacgttcgaatccttacaagaccaggaatattcactggggtacaaaattcatgtaatggaactgccaccatttgacgaggatgaatttgaaaatcaacggcagcagttctaa

SEQ ID NO: 5518 - DNA, 1884 bp, Artificial Sequence
  Description of Artificial Sequence: Synthetic polynucleotide
atgactttggaaccacactatagtgccaagtctgctgcttctgccagtgcctttgttgcccgttctgcgaccgaaagctctacagcaagcacaaaagctgctcctaggaaaaagacgtactctcagtctaatggtattcccataaggattgataatctccctccgggcaagacttgggcccaggtaaaatatttgataggcggaatcatataccataccaatattttacaggtgaaaatgttgcctccaatgacttccatggttcctccttttattacttttcagagttgcattgtcattttgaagaacagcatagataacgagtccttagaaaacttattacttactttgaacacctaccaatgggattatcatgatcttttcgtttacttgttgccgtacactaatgattctccttctttaagatatccagaaatcagtgatagcaacaatgacgtcagaagtgctcccgatgaaactaaaagatctatttctcctagatatgcaagccatgtttcttctgtgacaccgcagccaccatccgcttctaccccaccttctcaatttttcagtttttctcctgaagtgagccttagaaagaatgagaacataacgccattgcccacgcctgttcccgtacctgttggtgtgccacctcttgctcccccgcctcatggtccattttccacttctatgttgcctatgttgggtgctcctccgggaacggtacctaatatgcagatgccctatcaaactactttaccttctccaacagctgctgctactgctggtggtccacttgcttcccctacacactatccccgtcgtcgtcatttctatcaccagaaccaaagccagtttcaaaaatacatgcataatagccccaggaatccagatactggcacaggccctcgtctttctcagcagcatcacctctccttaaggaacaataagataaatccctcttataacgaaatatctgccctttacaacttgaacatggcctctaattccaataataatggtaatattcccactacaagtacgaatggtgatgaccgtgccctccaagcaaagaatggtggaacaattacaccttctcaaactcaaataaatcacaaaagattaaagcatatctttaacgagaaaagctttagaaaacaaatgacgaatagaggtatgtggcagttgaagatcataaatttcccaccctatatacctatagaattcttggagaaattatctgagtctgatttcaatgagttaatgaaccaagagaagttcacagttattgaaattaaagagaaaggacaattggaaaaatttggaaggttaagatggacagttttgaaagattttataaaattgaaatgccccaagcttttaagattacaggaaagacagtttttgcagcaacaaaacgaagcatctttactcaatgaatctatggacgctttgaagatatctgaaaatgagaacaccaacgggagtgcaaataatagcacatacacaaatggcggacctagaacatctatcaataatacaagggaattctatgtaggggtttatgaagatcatgaagaagcaactttattgaggtttgaattaccggaagatgaattagaggagtttaatagaaatttgccaactacttttgcacaaagtggaaacgtctctgactccgaaggtgatagcaaggcgaaatactttaaagttagcacaattgtgtataatgccattgttgggttccacgataaagagctttctgatttgacgttcgaatccttacaagaccaggaatattctttagggtacaaaattcatgtaatggaattaccaccatttgacgaggatgaatttgaaaatcaaagacagcagttctga

SEQ ID NO: 5519 - DNA, 318 bp, Saccharomyces cerevisiae
atggccccgaaggctttttttgtctgtcttccttgggtcttaccccgccacgcgttaatagtgagacaagcaggaaatccgtatcattttctcgcatacacgaacccgcgtgcgcctggtaaattgcaggattctcattgtccggttttctttatgggaataatcatcatcaccattatcactgttactcttgcgatcatcatcattaacataatttttttaacgctgtttgatgatggtatgtgcttttattgttccttactcaccttttcctttgtgtcttttaattttgaccattttgaccattttgacctttga

SEQ ID NO: 5520 - DNA, 318 bp, Artificial Sequence
  Description of Artificial Sequence: Synthetic polynucleotide
atggccccgaaggctttttttgtctgtcttccttgggtcttaccccgccacgcgttaatagtgagacaagcaggaaatccgtatcattttctcgcatacacgaacccgcgtgcgcctggtaaattgcaggattctcattgtccggttttctttatgggaataatcatcatcaccattatcactgttactcttgcgatcatcatcattaacataatttttttaacgttgtttgatgatggtatgtgcttttattgttccttactcaccttttcctttgtgtcttttaattttgaccattttgaccattttgacctttga

SEQ ID NO: 5521 - DNA, 753 bp, Saccharomyces cerevisiae
atgcctttgaccacaaaacctttatctttgaaaatcaacgccgctctattcgatgttgacggtaccatcatcatctctcaaccagccattgctgctttctggagagatttcggtaaagacaagccttacttcgatgccgaacacgttattcacatctctcacggttggagaacttacgatgccattgccaagttcgctccagactttgctgatgaagaatacgttaacaagctagaaggtgaaatcccagaaaagtacggtgaacactccatcgaagttccaggtgctgtcaagttgtgtaatgctttgaacgccttgccaaaggaaaaatgggctgtcgccacctctggtacccgtgacatggccaagaaatggttcgacattttgaagatcaagagaccagaatacttcatcaccgccaatgatgtcaagcaaggtaagcctcacccagaaccatacttaaagggtagaaacggtttgggtttcccaattaatgaacaagacccatccaaatctaaggttgttgtctttgaagacgcaccagctggtattgctgctggtaaggctgctggctgtaaaatcgttggtattgctaccactttcgatttggacttcttgaaggaaaagggttgtgacatcattgtcaagaaccacgaatctatcagagtcggtgaatacaacgctgaaaccgatgaagtcgaattgatctttgatgactacttatacgctaaggatgacttgttgaaatggtaa

SEQ ID NO: 5522 - DNA, 753 bp, Artificial Sequence
  Description of Artificial Sequence: Synthetic polynucleotide
atgcctttgaccacaaaacctttatctttgaaaatcaacgccgctttattcgatgttgacggtaccatcatcatctctcaaccagccattgctgctttctggagagatttcggtaaagacaagccttacttcgatgccgaacacgttattcacatctctcacggttggagaacttacgatgccattgccaagttcgctccagactttgctgatgaagaatacgttaacaagttggaaggtgaaatcccagaaaagtacggtgaacactccatcgaagttccaggtgctgtcaagttgtgtaatgctttgaacgccttgccaaaggaaaaatgggctgtcgccacctctggtacccgtgacatggccaagaaatggttcgacattttgaagatcaagagaccagaatacttcatcaccgccaatgatgtcaagcaaggtaagcctcacccagaaccatacttaaagggtagaaacggtttgggtttcccaattaatgaacaagacccatccaaatctaaggttgttgtctttgaagacgcaccagctggtattgctgctggtaaggctgctggctgtaaaatcgttggtattgctaccactttcgatttggacttcttgaaggaaaagggttgtgacatcattgtcaagaaccacgaatctatcagagtcggtgaatacaacgctgaaaccgatgaagtcgaattgatctttgatgactacttatacgctaaggatgacttgttgaaatggtga

SEQ ID NO: 5523 - DNA, 366 bp, Saccharomyces cerevisiae
atggctcaacgtgttactttcagaagaagaaatccatacaacacccgttctaacaaaatcaaggttgttaagaccccaggtggtatcttgcgtgcccaacacgttaagaagttggctactagaccaaagtgtggtgactgtggtagtgctctacaaggtatttccactttgagaccaagacaatacgctactgtctccaagacccacaagactgtttccagagcttacggtggttccagatgtgccaactgtgtcaaggaaagaatcgtcagagctttcttgattgaagaacaaaagattgttaagaaggtcgttaaggaacaaactgaggctgctaagaagtctgaaaagaagtctaagaaataa

SEQ ID NO: 5524 - DNA, 366 bp, Artificial Sequence
  Description of Artificial Sequence: Synthetic polynucleotide
atggctcaacgtgttactttcagaagaagaaatccatacaacacccgttctaacaaaatcaaggttgttaagaccccaggtggtatcttgcgtgcccaacacgttaagaagttggctactagaccaaagtgtggtgactgtggtagtgctttacaaggtatttccactttgagaccaagacaatacgctactgtctccaagacccacaagactgtttccagagcttacggtggttccagatgtgccaactgtgtcaaggaaagaatcgtcagagctttcttgattgaagaacaaaagattgttaagaaggtcgttaaggaacaaactgaggctgctaagaagtctgaaaagaagtctaagaaatga

SEQ ID NO: 5525 - DNA, 438 bp, Saccharomyces cerevisiae
atgtttttaagaaattccgttttgagaacagctccagtcttgaggaggggtataacaacattgaccccggtcagcaccaagttggccccacccgctgccgcctcttactcccaagctatgaaggccaacaattttgtgtacgtgtctggtcaaatcccttatactccagataacaagcctgttcaaggttctatctctgagaaggccgaacaagtttttcaaaacgttaagaatatcttagcagaaagtaattcttctttagacaatatagtcaaagtcaacgtattcttggctgacatgaaaaactttgccgaattcaactctgtatacgccaaacacttccacacccataagcctgcaagatcctgtgttggtgttgcttccttacctttgaatgttgatttagaaatggaagttatcgctgttgaaaagaattga

SEQ ID NO: 5526 - DNA, 438 bp, Artificial Sequence; identical to SEQ ID NO: 5525
  Description of Artificial Sequence: Synthetic polynucleotide

SEQ ID NO: 5527 - DNA, 858 bp, Saccharomyces cerevisiae
atggagctaagttcaccatcaaaaaaaaccacaacatcgccaataaatataccaggggggaatagagataacctaataatcggaccacattctcacagcttcaagaccgatccattttcaagtaacaatagtagtttgctgtccaaaatatctactaaccccagtttggaaagccctttctcttcgaaatctttactagattgttctcctgtacaagctgtaaagaagtctttagagtcggaagcaaaaacgcatagcctggacgaggagacaaatgaacagactgatgtaaagatcttaaacatagcagactttcccacagatgaactcatactaatgataagtgcgctactcaacagaattataacagcaaacgatgaaactacagatgtctcacaacaagtgtcggatgagaccgaagacgaactcttaactccaatccttgctttctatggaaagaatgttccagagatagctgttgttcagtacttagagagaattcaaaagtactgtcccaccacaaatgatatttttctttctctccttgtatatttcgatagaatctccaaaaattatgggcattcttctgagcgtaatggttgcgcaaagcaattattcgtcatggactccgggaacattcatagattgctcataacaggtgtcacaatttgcacgaagttcttgagtgattttttttacagtaactctcgatacgccaaggttggaggtatttctttgcaagagttaaaccatttagaattacaattcctgatactatgtgatttcaagttattggtttcagtcgaagaaatgcagaaatatgcaaacttgttatataaattctggaacgaccagtag

SEQ ID NO: 5528 - DNA, 858 bp, Artificial Sequence
  Description of Artificial Sequence: Synthetic polynucleotide
atggagttgagttctccatctaaaaaaaccacaacatctccaataaatataccaggggggaatagagataacttgataatcggaccacattctcacagcttcaagaccgatccattttctagtaacaatagtagtttgttatccaaaatatctactaaccccagtttggaaagccctttctcttctaaatctttattagattgttctcctgtacaagctgtaaagaagtctttagagagtgaagcaaaaacgcatagcttggacgaggagacaaatgaacagactgatgtaaagatcttaaacatagcagactttcccacagatgaactcatattaatgataagtgcgttgctcaacagaattataacagcaaacgatgaaactacagatgtctctcaacaagtgtctgatgagaccgaagacgaactcttaactccaatccttgctttctatggaaagaatgttccagagatagctgttgttcagtacttagagagaattcaaaagtactgtcccaccacaaatgatatttttctttctctccttgtatatttcgatagaatctccaaaaattatgggcattcttctgagcgtaatggttgcgcaaagcaattattcgtcatggactccgggaacattcatagattgctcataacaggtgtcacaatttgcacgaagttcttgagtgattttttttacagtaactctcgttacgccaaggttggaggtatttctttgcaagagttaaaccatttagaattacaattcttgatattatgtgatttcaagttattggtttctgtcgaagaaatgcagaaatatgcaaacttgttatataaattctggaacgaccagtga

SEQ ID NO: 5529 - DNA, 762 bp, Saccharomyces cerevisiae
atgtactttgatgaagaacaattgctaaaatatactatatatgcctatagattatccttttttgtaggcatttgctcacttttcatagcaaaaagttgtctaccagaatttcttcaatatggtaaaacctaccggcccaaagagaattcaaagtactcaagcattttagaacgaatcaagaagttcacagttccaaaggcgtatttttcccatttttactatttggctacctttctatccttagtcaccttatatttctatcctaaattccccatcgtttggatcatatttggacactcattgcgccgactttatgaaacgctttatgtactacattatacaagcaattctaggatgaattggtcccattatctagtcggtatatggttctattccgtactcttgttaattcttaatatatcactgtacaagaactccattccaaatacgttaaacatgaatgctttcatcatattctgcatagcatcttgggatcagtacaaaaatcatgttattctggccaatctggttaaatattcgctgccaacaggaaggcttttcaggttggtatgctgtcctcattatctcgatgaaataatcatttattctactctgttgccctatgaacaagaattttacctaacactagtttgggtaatcacaagtttgactatatccgcattggaaacaaaaaattattacaggcacaaatttaaagacaatcacgtagccccctacgccataataccttttataatctag

SEQ ID NO: 5530 - DNA, 762 bp, Artificial Sequence
  Description of Artificial Sequence: Synthetic polynucleotide
atgtactttgatgaagaacaattgttgaaatatactatatatgcctatagattatccttttttgtaggcatttgcagccttttcatagcaaaaagttgtttgccagaatttcttcaatatggtaaaacctacagacccaaagagaattctaagtactccagcattttagaaagaatcaagaagttcacagttccaaaggcgtatttttcccatttttactatttggctacctttctttccttagtcaccttatatttctatcctaaattccccatcgtttggatcatatttggacactctttgcgcagactttatgaaacgctttatgtattacattatacaagcaattctaggatgaattggtcccattatttagtcggtatatggttctattccgtactcttgttaattcttaatatatctttgtacaagaactccattccaaatacgttaaacatgaatgctttcatcatattctgcatagcatcttgggatcagtacaaaaatcatgttattttagccaatttggttaaatattctttaccaacaggaaggcttttcaggttggtatgctgtcctcattatctcgatgaaataatcatttattctactttattgccctatgaacaagaattttacttgacattagtttgggtaatcacaagtttgactatatccgcattggaaacaaaaaattattacaggcacaaatttaaagacaatcacgtagccccctacgccataataccttttataatctga

SEQ ID NO: 5531 - DNA, 3456 bp, Saccharomyces cerevisiae
atgcctaaccctccttcatttaagtcacataagcagaatttattcaactccaacaataatcaacacgcaaacagtgtagattcttttgacttacatctcgacgattcatttgacgctgctttagacagtttacaaattaataataacccagaaccacttagtaagcataacactgttggagatagggaaagttttgaaatgagaacagtagatgatttagacaatttttctaaccattcttcggattcgcatcgtaagtcttcaaacacagatacccatcctttgatgtatgataatcgcctctcgcaggatgataatttcaaatttactaatattgcttcgtcaccaccgtcgtcttcaaacaatattttttcaaaagccctctcatatttaaaagtatctaacacaaaaaactggtccaagtttggttcacccatagaactcagtgatcaacacatcgaaagagaaatacatccagacacgactcctgtgtacgataggaatagatacgtttcgaatgaactatctaatgccaaatataatgccgttacttttgtgccaaccctattatatgaacagttcaaattcttttacaatttatactttttagtagttgcattatcgcaggccgttcctgcactaagaatagggtatttatcatcgtatattgtacctttagcatttgtgctgacagtaaccatggcaaaggaagctatagatgatattcagagaaggagacgtgatagagagtcaaacaatgaactgtatcatgtaataacgagaaatcgttccataccaagcaaagacttaaaagttggagatctcataaaagtccataaaggtgatcgtattcccgctgatttggttcttttacaatcaagtgaaccatcaggcgagtcatttatcaaaactgaccaactagatggggagactgactggaaactacgtgttgcctgtcccttgacccaaaatctatctgaaaatgacttaattaacagaattagtataacagcctctgctcctgagaaatctattcataaatttttaggtaaagttacctataaggattccacttcaaaccctttgtctgtagataatactctatgggcgaatactgttctagcttccagtggattttgtattgcttgtgtcgtctacactggcagagatactaggcaagctatgaatacaactacagctaaggttaaaactggcttattagagctagaaattaacagtatttccaagattctttgtgcatgtgtttttgccctgtcaattcttttagttgcatttgccggtttccacaatgacgactggtacattgacattttgaggtatctgatattgttttctaccatcatccctgtctctttaagagttaatttagatttagccaaaagtgtttatgcacatcagatcgaacacgataaaaccattcctgaaacaattgttagaacgagtacaattccagaggatttaggccgtattgaataccttctaagcgacaaaacagggacgcttactcagaatgatatgcaattgaagaaaatacacttgggtactgtatcatacacgtcggaaacattagacattgtatccgactatgtacaatctctggtgagctctaaaaatgactctttgaacaattctaaagttgccttatcaacaacaagaaaggatatgtcttttcgtgtacgtgatatgattttaactctagcaatttgccataacgttactcccacttttgaggatgacgaacttacatatcaagcggcatcacctgatgaaattgctattgttaaatttaccgagtcggttggcttatctcttttcaaaagagatcgccattcaatttctttattacacgaacattctggtaagactttaaattacgaaattttacaagtattcccatttaattctgattctaagcgtatgggtatcattgttcgtgatgagcaattggatgaatattggtttatgcaaaaaggggccgatactgtcatgtcaaaaattgtggaaagcaatgattggctagaggaagaaacaggtaatatggctcgtgaaggtctacgtactttggttatcggtcgtaaaaaattaaacaagaaaatttacgagcaatttcaaaaagaatacaacgatgcctctttgtcaatgctaaatcgtgatcaacagatgagtcaagttatcaccaagtatttagagcatgatcttgaattattgggtctaactggtgtagaagataagttacagaaggatgtgaagtcctctatcgagttattaagaaacgcaggtatcaagatttggatgctgacaggtgataaagttgaaactgctcgttgtgtttccataagtgcaaaattaatatctcgtggccaatatgttcatacgataacaaaagtcacaagaccggaaggtgcattcaatcagctggagtatctaaaaatcaatagaaatgcttgtcttttaatagatggtgaatccctgggaatgtttttgaaacattacgaacaggaattttttgatgtcgtggttcatttacccactgttattgcttgccgttgtacacctcaacagaaggcagacgttgctttggtaattcgtaaaatgacgggcaaaagggtatgctgtattggtgatggaggtaacgatgttagtatgattcaatgtgcagatgttggcgtagggattgtgggtaaagaaggtaaacaagcttctttagctgctgatttttctataacgcaattttgtcacctcaccgaattactattatggcatggtaggaactcttacaaaagatctgctaaattggctcaatttgtcatgcatagaggtttaatcattgcaatttgccaagcggtatattccatctgttcgttgttcgaacctattgctctttatcaaggttggttaatggtcggttatgctacctgctatacaatggctccagtcttttcattaactcttgatcacgatatcgaagagtcattgactaaaatatacccagaattgtacaaagaattgactgaaggtaagagcttatcatataagacgttctttgtttgggttctattatcgctattccaaggttctgtaattcaattattttctcaggcctttacgagtttattagatactgatttcacaaggatggttgctatcagcttcactgctttggttgtaaatgaattaataatggttgccttagaaatctacacatggaataaaacaatgctcgtcactgaaattgctactttactattttacattgtatcggttccatttcttggcgattattttgatttaggttatatgactaccgtaaattactatgctggacttttagttatattactcatctcgatctttcctgtctggacggcaaaggcaatttatagaaggctacatcctccaagttatgcaaaagtgcaagagtttgccactccataa

SEQ ID NO: 5532 - DNA, 3456 bp, Artificial Sequence
  Description of Artificial Sequence: Synthetic polynucleotide
atgcctaaccctccttcttttaagagtcataagcagaatttattcaactccaacaataatcaacacgcaaacagtgtagattcttttgacttacatctcgacgattcttttgacgctgctttagacagtttacaaattaataataacccagaaccacttagtaagcataacactgttggagatagggaaagttttgaaatgagaacagtagatgatttagacaatttttctaaccattcttctgattctcatcgtaagtcttccaacacagatacccatcctttgatgtatgataatcgcctctctcaggatgataatttcaaatttactaatattgcttcttctccaccgtcttcttccaacaatattttttccaaagccctctcttatttaaaagtatctaacacaaaaaactggtccaagtttggttctcccatagaactcagtgatcaacacatcgaaagagaaatacatccagacacgactcctgtgtacgataggaatagatacgtttctaatgaattatctaatgccaaatataatgccgttacttttgtgccaaccttattatatgaacagttcaaattcttttacaatttatactttttagtagttgcattatctcaggccgttcctgcattgagaatagggtatttatcttcttatattgtacctttagcatttgtgttaacagtaaccatggcaaaggaagctatagatgatattcagagaaggagacgtgatagagagagcaacaatgaattgtatcatgtaataacgagaaatcgttccataccaagcaaagacttaaaagttggagatctcataaaagtccataaaggtgatcgtattcccgctgatttggttcttttacaaagtagtgaaccaagtggcgagtcttttatcaaaactgaccaattggatggggagactgactggaaattacgtgttgcctgtcccttgacccaaaatttatctgaaaatgacttaattaacagaattagtataacagcctctgctcctgagaaatctattcataaatttttaggtaaagttacctataaggattccacttctaaccctttgtctgtagataatactttatgggcgaatactgttttggcttccagtggattttgtattgcttgtgtcgtctacactggcagagatactaggcaagctatgaatacaactacagctaaggttaaaactggcttattagagttagaaattaacagtatttccaagattctttgtgcatgtgtttttgccttgtctattcttttagttgcatttgccggtttccacaatgacgactggtacattgacattttgaggtatttgatattgttttctaccatcatccctgtctctttaagagttaatttagatttagccaaaagtgtttatgcacatcagatcgaacacgataaaaccattcctgaaacaattgttagaacgagtacaattccagaggatttaggccgtattgaataccttttgagcgacaaaacagggacgcttactcagaatgatatgcaattgaagaaaatacacttgggtactgtatcttacacgagtgaaacattagacattgtatccgactatgtacaatctttggtgagctctaaaaatgactctttgaacaattctaaagttgccttatctacaacaagaaaggatatgtcttttcgtgtacgtgatatgattttaactttggcaatttgccataacgttactcccacttttgaggatgacgaacttacatatcaagcggcatctcctgatgaaattgctattgttaaatttaccgagtctgttggcttatctcttttcaaaagagatcgccattctatttctttattacacgaacattctggtaagactttaaattacgaaattttacaagtattcccatttaattctgattctaagcgtatgggtatcattgttcgtgatgagcaattggatgaatattggtttatgcaaaaaggggccgatactgtcatgtccaaaattgtggaaagcaatgattggttggaggaagaaacaggtaatatggctcgtgaaggtttacgtactttggttatcggtcgtaaaaaattaaacaagaaaatttacgagcaatttcaaaaagaatacaacgatgcctctttgtccatgttgaatcgtgatcaacagatgagtcaagttatcaccaagtatttagagcatgatcttgaattattgggtttgactggtgtagaagataagttacagaaggatgtgaagtcctctatcgagttattaagaaacgcaggtatcaagatttggatgttaacaggtgataaagttgaaactgctcgttgtgtttccataagtgcaaaattaatatctcgtggccaatatgttcatacgataacaaaagtcacaagaccggaaggtgcattcaatcagttggagtatttgaaaatcaatagaaatgcttgtcttttaatagatggtgaatccttgggaatgtttttgaaacattacgaacaggaattttttgatgtcgtggttcatttacccactgttattgcttgccgttgtacacctcaacagaaggcagacgttgctttggtaattcgtaaaatgacgggcaaaagggtatgctgtattggtgatggaggtaacgatgttagtatgattcaatgtgcagatgttggcgtagggattgtgggtaaagaaggtaaacaagcttctttagctgctgatttttctataacgcaattttgtcacctcaccgaattattattatggcatggtaggaactcttacaaaagatctgctaaattggctcaatttgtcatgcatagaggtttaatcattgcaatttgccaagcggtatattccatctgttctttgttcgaacctattgctctttatcaaggttggttaatggtcggttatgctacctgctatacaatggctccagtcttttctttaactcttgatcacgatatcgaagagtctttgactaaaatatacccagaattgtacaaagaattgactgaaggtaagagcttatcttataagacgttctttgtttgggttttattaagtttattccaaggttctgtaattcaattattttctcaggcctttacgagtttattagatactgatttcacaaggatggttgctatcagcttcactgctttggttgtaaatgaattaataatggttgccttagaaatctacacatggaataaaacaatgctcgtcactgaaattgctactttacttttttacattgtatctgttccatttcttggcgattattttgatttaggttatatgactaccgtaaattactatgctggacttttagttatattactcatctccatctttcctgtctggacggcaaaggcaatttatagaaggttacatcctccaagttatgcaaaagtgcaagagtttgccactccatga

SEQ ID NO: 5533 - DNA, 2709 bp, Saccharomyces cerevisiae
atgaagtttgctgaccatctaaccgagtctgccatcccggaatggagggacaaatatattgattataaggtcggcaagaagaagcttcgccgctacaaggagaagctggatgccgaagaagagcaatccagctcctaccggagctggatgccctctgtgtcggtataccagactgcatttcagcagagagagcccggcaaaagtcgcagcgacggagactatcgctccggacctgcgttcaagaaggactattctgctttgcagagggagttcgttgctgacttcattgaagactggttgatctcgttccagttgagtaagtgtaacgagttttacctttggttgctaaaggagtgcgacaagaagtttgaggttttacagtcgcaactgcactattactcgctgcagaagaattatgagcgcgacaacttgaaccggtctagttcgaatgttgacatgtccacgagtctatatgcggcagggcttgctggtcgttctgactccagggtcaatagcatcgacagcgatagccggtctgttatgtatgggtcaatgccctgcaccaaagaggccaagaagccgcgtttgtcgctgctagcgtactgtcagaaagttcttaaggacaataggctgctgccatcgtggcccaaacgtggattttctctgctacaggacttgagacaggatgcgtcctcaagaggccgcgagacgtttgcttttggcgcttcttttctggagactatgacgacaacccaggctagaaacttgttaagcaacgctataatcgagtactatctgtacttgcaattggtcaaatcgttccgggatatcaacgtcaccgggttccgtaaaatggtcaagaaattcgacaaaacgtgtcacacaagagagctgaccacgttcatgtcgtacgccaggacccactacacccttttcaagcacgcggatgccaacgtgcagttggtggcacagaagatgcaacaaataaccagttcgcaaccaacacccacttcggagctctcttccgcccaaagagacaaagagcccatcacttggttggaaacgcagatcaccgagtggttcaccactgcgttgaccaattcgcctaaggacaggaagcacaatacccataagttgaagaaattgaccattcagtactctatctccgaacaaatggttcatagaaacaacagatcgattgtgcagatgctggttgtcgggctgggcataggtgtgtcaatgactttgatcacttacactttgtatttgggcattagctctgaagaaacgtcatttacgcacaagattctgttcccactgtggggtggttggtacatggttttgttgatcgcgtttctctttcttgttaattgttttatctggcatagaaccgggattaattatagatttattatgctgggtgagattcaatccaagaatggtacgcaatttttcaacaatgattttgccacgagtaaaattccgctcaagttgtatttcttgacattcttcatagtaccttgtgcggtctgttccatgttaagtttcgctttggagaagctcacacccttaggctttttatatattggtattgtgtctttcttatttttatgtccctctggtctaattccatattgggacaaagttgtacacactagaaaatggctggtggttactcttattagactgatgatgtctggttttttccctgttgagtttggtgatttctttttgggagatattatttgttcgttgacgtattctattgccgatattgccatgttcttctgtgtttactctcatacgcccaacaatctatgtggctcttcacattccagagcaatgggtgttttatcatgtttaccaagttattggagattcatgcaatgtttacgaagatttgctgattccggtgattggttccctcatcttttgaacgcggcgaaatacactttgggtatagcgtataatgccacactttgtgcttacagattgtcagaccgttctgaacaaaggagaaccccttttatcgtgtgcgctacgttgaattcgatccttacttccgcctgggatttagttatggattggtcctttgctcacaatactacttcttacaattggttgctaagagacgacttgtatttagctggtaaaaaaaattgggaaaacggcagttattcattcagtaggaagttagtttattactttgctatgatttgggatatcctcattagatttgagtggattgtatacgcaattgctcctcaaacaattcagcagagtgctgtgacgtcgtttatattggcccttttggaggttttaagaagattcgtttggatcatcttcagagtcgaaaatgaacatgttgccaatgttcacctattcagggttaccggtgacgctcctctgccttatccaattgcgcaggtcggtgatgattctatggatagtagtgatttgggttcaaaagccttttcatcacttaacgacatacctatcacgccttcacatgacaataatcctcacagttttgccgaacctatgcccgcttaccgtgggactttcagaagaaggtcctccgtgtttgagaacatttcgagatccattccttgggcacatgcaactgatttccaaagaccaactgtcaataccgtggatgataggtctcccgaaacagatagtgaaagtgaagtggaaagtattatgtga

SEQ ID NO: 5534 - DNA, 2709 bp, Artificial Sequence
  Description of Artificial Sequence: Synthetic polynucleotide
atgaagtttgctgaccatttgaccgagtctgccatcccggaatggagggacaaatatattgattataaggtcggcaagaagaagcttcgccgctacaaggagaagttggatgccgaagaagagcaatccagctcctacagaagctggatgccctctgtgtctgtataccagactgcatttcagcagagagagcccggcaaaagtcgcagcgacggagactatcgctccggacctgcgttcaagaaggactattctgctttgcagagggagttcgttgctgacttcattgaagactggttgatctctttccagttgagtaagtgtaacgagttttacctttggttgttgaaggagtgcgacaagaagtttgaggttttacagtctcaattacactattactctttgcagaagaattatgagcgcgacaacttgaacagatctagtagtaatgttgacatgtccacgagtctttatgcggcagggcttgctggtcgttctgactccagggtcaatagcatcgacagcgatagcagatctgttatgtatgggtccatgccctgcaccaaagaggccaagaagccgcgtttgtctttattggcgtactgtcagaaagttcttaaggacaataggttattaccatcttggcccaaacgtggattttctttattgcaggacttgagacaggatgcgtccagcagaggccgcgagacgtttgcttttggcgcttcttttttggagactatgacgacaacccaggctagaaacttgttaagcaacgctataatcgagtactatttgtacttgcaattggtcaaatctttcagagatatcaacgtcaccgggttccgtaaaatggtcaagaaattcgacaaaacgtgtcacacaagagagttgaccacgttcatgagttacgccaggacccactacacccttttcaagcacgcggatgccaacgtgcagttggtggcacagaagatgcaacaaataaccagttctcaaccaacacccacttccgagctctcttccgcccaaagagacaaagagcccatcacttggttggaaacgcagatcaccgagtggttcaccactgcgttgaccaattctcctaaggacaggaagcacaatacccataagttgaagaaattgaccattcagtactctatctccgaacaaatggttcatagaaacaacagatctattgtgcagatgcttgttgtcgggttgggcataggtgtgtccatgactttgatcacttacactttgtatttgggcattagctctgaagaaacgtcttttacgcacaagattcttttcccattatggggtggttggtacatggttttgttgatcgcgtttctctttcttgttaattgttttatctggcatagaaccgggattaattatagatttattatgttgggtgagattcaatccaagaatggtacgcaatttttcaacaatgattttgccacgagtaaaattccgctcaagttgtatttcttgacattcttcatagtaccttgtgcggtctgttccatgttaagtttcgctttggagaagctcacacccttaggctttttatatattggtattgtgtctttcttatttttatgtccctctggtttgattccatattgggacaaagttgtacacactagaaaatggttggtggttactcttattagattaatgatgtctggttttttccctgttgagtttggtgatttctttttgggagatattatttgttctttgacgtattctattgccgatattgccatgttcttctgtgtttactctcatacgcccaacaatttatgtggctcttctcattccagagcaatgggtgttttaagttgtttaccaagttattggagattcatgcaatgtttaagaagatttgctgattccggtgattggttccctcatcttttgaacgcggcgaaatacactttgggtatagcgtataatgccacactttgtgcttacagattgagtgaccgttctgaacaaaggagaaccccttttatcgtgtgcgctacgttgaattccatccttacttccgcctgggatttagttatggattggtcctttgctcacaatactacttcttacaattggttgttaagagacgacttgtatttagctggtaaaaaaaattgggaaaacggcagttattctttcagtaggaagttagtttattactttgctatgatttgggatatcctcattagatttgagtggattgtatacgcaattgctcctcaaacaattcagcagagtgctgtgacgtcttttatattggcccttttggaggttttaagaagattcgtttggatcatcttcagagtcgaaaatgaacatgttgccaatgttcaccttttcagggttaccggtgacgctcctttgccttatccaattgcgcaggtcggtgatgattctatggatagtagtgatttgggttccaaagccttttcttctcttaacgacatacctatcacgccttctcatgacaataatcctcacagttttgccgaacctatgcccgcttaccgtgggactttcagaagaaggtcctccgtgtttgagaacatttctagatccattccttgggcacatgcaactgatttccaaagaccaactgtcaataccgtggatgataggtctcccgaaacagatagtgaaagtgaagtggaaagtattatgtga

SEQ ID NO: 5535 - DNA, 165 bp, Saccharomyces cerevisiae
atgatgtgcgtctgtatcccaaaaaaaaaactaatggattggcgcgtgtactatatatattcatatgtcgtgtgtttgtatatgtgtgggagtgattgtgcgtgtatatgtgtgttggcgtgtgtggtacaatgtgtgtgttttaatgtagaaatgaggttgtag

SEQ ID NO: 5536 - DNA, 165 bp, Artificial Sequence
  Description of Artificial Sequence: Synthetic polynucleotide
atgatgtgcgtctgtatcccaaaaaaaaaattaatggattggcgcgtgtactatatatattcttatgtcgtgtgtttgtatatgtgtgggagtgattgtgcgtgtatatgtgtgttggcgtgtgtggtacaatgtgtgtgttttaatgtagaaatgaggttgtga

SEQ ID NO: 5537 - DNA, 1923 bp, Saccharomyces cerevisiae
atgaggagagagaggcaaaggatgatgagtttcgaggacaaggacaaggacgaccttgacaatagtaatagtaataacagcagtgaaatgacagatacggcgatgatgccaccattaaagagattgcttattacgggcagtagcgatgatttggcacaaggatcatcgggtaagaagaagatgacgatggcgacgaggtcgccatcgtcatcacccgatttggcgacaaacgacagcggcactagggtacagccattgccagaatataacttcaccaagttctgctatcggcataacccggacattcagttctcaccaactcatacagcgtgctacaagcaggatttgaaacgaacgcaagagattaatgctaatatcgcgaagctacccctgcaggagcaatccgacatccaccacattatctcgaagtacagcaattccaatgacaagatacggaagctgattctggatgggatcctatcgacgagttgcttcccacagctttcctacatttcgtcactcgttacacacatgatcaagatcgacttcatcagcattctgccgcaggagctgtcgctgaagatcttgagttatctggattgccaatctctttgcaacgccacgagagtgtgccgcaagtggcagaagctcgcggatgacgacagggtatggtaccacatgtgcgagcagcacatagacaggaaatgtcccaactgtggctgggggctgcctcttttgcacatgaaacgtgcgcggatacaacagaatagtacaggatctagcagcaacgcagatatccagacgcaaactacgcgaccttggaaagtcatctacagagaacggttcaaagtggagtcaaactggagaaagggccactgcaggattcaggaattcaagggccacatggatggtgtgttaacgctccagtttaactacaggcttttgttcacaggctcgtacgactccaccataggtatatgggacttattcacggggaagctaatacgaaggctcagcggccattcggacggcgtcaagacattatattttgacgatagaaagctgattacgggctcgctcgacaagacgatccgtgtttggaactacataaccggtgaatgcatttccacgtatcgaggccactcggatagcgttctgagcgtagattcataccagaaggttatcgtttccggcagtgctgacaagacggtcaaggtatggcacgtggagtccaggacatgctacaccttgagaggccacacggaatgggttaattgcgtcaaattgcatccgaaaagcttttcatgttttagttgcagtgacgataccacaatccgaatgtgggatatcaggaccaattcatgcctaaaagtgttcaggggtcatgtagggcaggtgcaaaagatcataccgcttaccattaaggatgtagagaatctagccaccgacaacacttctgatggcagctctccgcaggatgacccaacaatgactgatggtgcagacgaatcagacacaccgtcgaacgagcaagaaactgtcttagatgaaaacataccttatccaacacatctactatcttgcggactggataacacaatcaaactatgggacgtcaaaaccggtaaatgcataagaacacagtttgggcacgtggaaggtgtttgggacatcgccgctgacaacttcagaattataagtggttctcacgacggaagcattaaggtctgggacttgcaaagcgggaagtgtatgcacacgttcaacggtcgaagactacaaagagaaactcagcacacacaaacacaatccttgggtgataaagtcgcccctatcgcttgtgtttgtattggagattcagaatgctttagtggtgatgaatttgggtgcgtaaaaatgtacaaattcgatctcaatgattag

SEQ ID NO: 5538 - DNA, 1923 bp, Artificial Sequence
  Description of Artificial Sequence: Synthetic polynucleotide
atgaggagagagaggcaaaggatgatgagtttcgaggacaaggacaaggacgaccttgacaatagtaatagtaataacagcagtgaaatgacagatacggcgatgatgccaccattaaagagattgcttattacgggcagtagcgatgatttggcacaaggatcttctggtaagaagaagatgacgatggcgacgaggtctccatcttcttctcccgatttggcgacaaacgacagcggcactagggtacagccattgccagaatataacttcaccaagttctgctatagacataacccggacattcagttctctccaactcatacagcgtgctacaagcaggatttgaaaagaacgcaagagattaatgctaatatcgcgaagttgcccttgcaggagcaatccgacatccaccacattatctccaagtacagcaattccaatgacaagataagaaagttgattttagatgggatcttatctacgagttgcttcccacagctttcctacatttcttctctcgttacacacatgatcaagatcgacttcatcagcattttaccgcaggagttatctttgaagatcttgagttatttggattgccaatctctttgcaacgccacgagagtgtgccgcaagtggcagaagctcgcggatgacgacagggtatggtaccacatgtgcgagcagcacatagacaggaaatgtcccaactgtggctgggggttgcctcttttgcacatgaaacgtgcgagaatacaacagaatagtacaggatctagcagcaacgcagatatccagacgcaaactacgagaccttggaaagtcatctacagagaaagattcaaagtggagagcaactggagaaagggccactgcaggattcaggaattcaagggccacatggatggtgtgttaacgctccagtttaactacaggcttttgttcacaggctcttacgactccaccataggtatatgggacttattcacggggaagttaataagaaggctcagcggccattctgacggcgtcaagacattatattttgacgatagaaagttgattacgggcagtctcgacaagacgatccgtgtttggaactacataaccggtgaatgcatttccacgtatagaggccacagtgatagcgttttaagcgtagattcttaccagaaggttatcgtttccggcagtgctgacaagacggtcaaggtatggcacgtggagtccaggacatgctacaccttgagaggccacacggaatgggttaattgcgtcaaattgcatccgaaaagcttttcttgttttagttgcagtgacgataccacaatcagaatgtgggatatcaggaccaattcttgcttgaaagtgttcaggggtcatgtagggcaggtgcaaaagatcataccgcttaccattaaggatgtagagaatttggccaccgacaacacttctgatggcagctctccgcaggatgacccaacaatgactgatggtgcagacgaaagtgacacaccgtctaacgagcaagaaactgtcttagatgaaaacataccttatccaacacatttattatcttgcggattagataacacaatcaaattatgggacgtcaaaaccggtaaatgcataagaacacagtttgggcacgtggaaggtgtttgggacatcgccgctgacaacttcagaattataagtggttctcacgacggaagcattaaggtctgggacttgcaaagcgggaagtgtatgcacacgttcaacggtagaagattacaaagagaaactcagcacacacaaacacaatccttgggtgataaagtcgcccctatcgcttgtgtttgtattggagattctgaatgctttagtggtgatgaatttgggtgcgtaaaaatgtacaaattcgatctcaatgattga

SEQ ID NO: 5539 - DNA, 1617 bp, Saccharomyces cerevisiae
atggccaccaccacgcaaccacaaaatatactgatggatgaacctttaaatcttcctaataacagtgcccacaacaataactatggaaacataaatgcgaatataagaacttttgctggtatgagcatgcacatgcaccctgccaggctgaactctctggagtttttgcacaagcccaggagactatctaatgtaaaactgcacagattacctcaggacgagcttcaaagaaatacggacatgaataagggaatgtattttaatgggaaacaagttcatgcccatcacccgtttataaattctggagcgaactttaacgcacatcatcaagacgtcagtaaattaggcgaggaggaagacgaaatctctcctctatcacatgataatttccagtatgaatccgaggaaaatggtaatccttcacctcccatttacaagaaatctggagaactggttaagagttcattaaaaagaagatccaagtccctacccattactcccaaatctatattcaacaaaactggctctaagagtaaacatgtcaatttagatcatgtagatactaggctattgcaaagaagtaaaagtgtccatttcgatcgtgttttaccaataaagctgttcaatgaaaatgagaaacccatagatgttggcaaacaaatggttcaacaagatgttctgaatttcaagcataagcctttgacgagactaagtgcccttaatggcggtagtgatagcgtacctatagaagatttactatctgaaaacaaccaaaacgaatatggagatacatggctacaaaacccgaagggtgtattcctatttggtacaaattctaataatcgtagaaataaaaaaaagaagtttaaactaagtgacgatgacagtgatattgaaaatgacaatgatagtgacgacgctataaaccgtttagtaaggcaacaagacaaagaccaagctcatcttgcgcacgggttgaagaatttgttaataaacgatgacgacgattatttagaaacaagaacaaattctgctaaatcaggagccaacttgtttattggaaactctaaaagaattgttggtctttacaacaagaactttccaatattaagtgacaggaaccgtaagagtttaaaacttaacatatttctgaatctttcccgtggaaggcccgtttttttgcaagaaattacgctactaactggcttccacaacatggttataattggcaaagtctttgtgaaaaacatatactttgataagaagattatcgtaagatatacatgggatgcatggagaacttttcatgaatcagaatgcgtgtatttttctaatgccaatggcatcttaccaggaagcaatatggatatttttaagttctccattgatgatatacacaatccaaatgataaagatagcaatatatcacaattggagttttgtattcaatacttaacttggggcgttgatcgttctaggaaggaatattgggacaataatgattcggcaaactataaaattgacgtggtaacgaatgaaacgaggacagggcccacaacagacgtcaatgataactacgagatgaaacatagtcttttcagaaacccattccattaa

SEQ ID NO: 5540 - DNA, 1617 bp, Artificial Sequence
  Description of Artificial Sequence: Synthetic polynucleotide
atggccaccaccacgcaaccacaaaatatattaatggatgaacctttaaatcttcctaataacagtgcccacaacaataactatggaaacataaatgcgaatataagaacttttgctggtatgagcatgcacatgcaccctgccaggttaaactctttggagtttttgcacaagcccaggagattatctaatgtaaaattacacagattacctcaggacgagcttcaaagaaatacggacatgaataagggaatgtattttaatgggaaacaagttcatgcccatcacccgtttataaattctggagcgaactttaacgcacatcatcaagacgtcagtaaattaggcgaggaggaagacgaaatctctcctttatctcatgataatttccagtatgaatccgaggaaaatggtaatccttctcctcccatttacaagaaatctggagaattggttaagagttctttaaaaagaagatccaagtccttgcccattactcccaaatctatattcaacaaaactggctctaagagtaaacatgtcaatttagatcatgtagatactaggttattgcaaagaagtaaaagtgtccatttcgatcgtgttttaccaataaagcttttcaatgaaaatgagaaacccatagatgttggcaaacaaatggttcaacaagatgttttgaatttcaagcataagcctttgacgagattaagtgcccttaatggcggtagtgatagcgtacctatagaagatttattatctgaaaacaaccaaaacgaatatggagatacatggttacaaaacccgaagggtgtattcttatttggtacaaattctaataatcgtagaaataaaaaaaagaagtttaaattaagtgacgatgacagtgatattgaaaatgacaatgatagtgacgacgctataaaccgtttagtaaggcaacaagacaaagaccaagctcatcttgcgcacgggttgaagaatttgttaataaacgatgacgacgattatttagaaacaagaacaaattctgctaaaagtggagccaacttgtttattggaaactctaaaagaattgttggtctttacaacaagaactttccaatattaagtgacaggaaccgtaagagtttaaaacttaacatatttttgaatctttcccgtggaaggcccgtttttttgcaagaaattacgttattaactggcttccacaacatggttataattggcaaagtctttgtgaaaaacatatactttgataagaagattatcgtaagatatacatgggatgcatggagaacttttcatgaaagtgaatgcgtgtatttttctaatgccaatggcatcttaccaggaagcaatatggatatttttaagttctccattgatgatatacacaatccaaatgataaagatagcaatatatctcaattggagttttgtattcaatacttaacttggggcgttgatcgttctaggaaggaatattgggacaataatgattctgcaaactataaaattgacgtggtaacgaatgaaacgaggacagggcccacaacagacgtcaatgataactacgagatgaaacatagtcttttcagaaacccattccattga

SEQ ID NO: 5541 - DNA, 897 bp, Saccharomyces cerevisiae
atgtcgacgtcagtcccagtcaagaaggcattaagtgctcttttacgcgatccaggaaacagtcattgtgccgactgtaaggcgcaactacatccacgctgggcttcctggtcacttggtgttttcatttgcattaaatgtgctggtatacatagatcattgggaacgcacatttcgaaagtgaaatctgttgatctggatacatggaaggaagaacatttggtgaaactgatacagttcaaaaacaatttaagagctaactcatactacgaagctactttggctgatgaattgaaacagaggaaaatcactgatacgagcagtttacaaaatttcatcaagaataaatatgaatataagaagtggattggtgacctctccagtattgaagggttaaatgattctactgaaccagttctgcataagccgtctgcgaatcattcgttgcctgcttcgaatgcaagattggaccagagctcaaattcattacaaaagacgcaaacacaaccaccttcccacttattaagcacctcaaggagtaatacgagcttattaaacctacaggtttcatcgctttctaagactacatctaatacaagtgtaactagttctgcaacaagcataggtgctgctaataccaagactggcaacagagtcggtgaatttgggcaaaggaacgatttgaaaaaatccattttatctttatactcaaaaccttctgcccagactcaaagccagaactcatttttcacttccacgacacctcagccttgtaatactccgtcaccattcgtgaacactggaattaccgctacaaataataatagtatgaattcaaattccagttctaacatttcattggatgataacgagttatttaagaacgtctggagttga

SEQ ID NO: 5542 - DNA, 897 bp, Artificial Sequence
  Description of Artificial Sequence: Synthetic polynucleotide
atgtctacgagtgtcccagtcaagaaggcattaagtgctcttttacgcgatccaggaaacagtcattgtgccgactgtaaggcgcaattgcatccacgctgggcttcctggagtcttggtgttttcatttgcattaaatgtgctggtatacatagaagtttgggaacgcacatttccaaagtgaaatctgttgatttggatacatggaaggaagaacatttggtgaaattgatacagttcaaaaacaatttaagagctaactcttactacgaagctactttggctgatgaattgaaacagaggaaaatcactgatacgagcagtttacaaaatttcatcaagaataaatatgaatataagaagtggattggtgacctctccagtattgaagggttaaatgattctactgaaccagttttgcataagccgtctgcgaatcattctttgcctgcttctaatgcaagattggaccagagcagtaattctttacaaaagacgcaaacacaaccaccttcccacttattaagcacctctaggagtaatacgagcttattaaacttacaggtttcttctctttctaagactacatctaatacaagtgtaactagttctgcaacaagcataggtgctgctaataccaagactggcaacagagtcggtgaatttgggcaaaggaacgatttgaaaaaatccattttatctttatactctaaaccttctgcccagactcaaagccagaactcttttttcacttccacgacacctcagccttgtaatactccgtctccattcgtgaacactggaattaccgctacaaataataatagtatgaatagtaattccagttctaacatttctttggatgataacgagttatttaagaacgtctggagttga

SEQ ID NO: 5543 - DNA, 855 bp, Saccharomyces cerevisiae
atggctattgatgctcaaaagcttgtggtggtcatcgtgatcgtggtcgtgcctttgctcttcaagttcattatcggaccgaagaccaagcctgtgctggatcccaaaaggaatgacttccaatcatttccgctggttgaaaaaaccatcttaacgcataatacttcgatgtacaagttcgggctacctcatgctgacgacgtactcggtttaccaattggtcagcatatcgtaattaaggccaatatcaatggtaaggatattaccagatcgtatacgcccacatcgttggatggagatacaaagggaaactttgaattactagtgaagtcttaccccacaggtaacgtttctaagatgattggagagttgaagataggtgactcgatccagatcaagggccctcgtgggaactatcattatgagagaaactgccgttcccatctagggatgattgctggtggtactggtattgcgcccatgtatcagatcatgaaagctattgccatggaccctcacgacactaccaaggtctctctagtctttgggaacgtccatgaggaggatattctgttgaagaaggaactggaagcgttggtggccatgaagccttcccaatttaagatagtttactacttagactctcctgaccgtgaagactggactggtggtgtaggatacattaccaaggatgtcatcaaggaacacttgcccgctgctacaatggacaacgttcaaattttgatctgtggtcctccagccatggttgcctcagttagaagaagtaccgtggacttggggttcagacgttccaaaccgctttccaagatggaagaccaggtgtttgtgttttaa

SEQ ID NO: 5544 - DNA, 855 bp, Artificial Sequence
  Description of Artificial Sequence: Synthetic polynucleotide
atggctattgatgctcaaaagcttgtggtggtcatcgtgatcgtggtcgtgcctttgctcttcaagttcattatcggaccgaagaccaagcctgtgttggatcccaaaaggaatgacttccaaagttttccgttggttgaaaaaaccatcttaacgcataatacttctatgtacaagttcgggttgcctcatgctgacgacgtactcggtttaccaattggtcagcatatcgtaattaaggccaatatcaatggtaaggatattaccagatcttatacgcccacatctttggatggagatacaaagggaaactttgaattattggtgaagtcttaccccacaggtaacgtttctaagatgattggagagttgaagataggtgactctatccagatcaagggccctcgtgggaactatcattatgagagaaactgccgttcccatttggggatgattgctggtggtactggtattgcgcccatgtatcagatcatgaaagctattgccatggaccctcacgacactaccaaggtctctttggtctttgggaacgtccatgaggaggatattttattgaagaaggaattggaagcgttggtggccatgaagccttcccaatttaagatagtttactacttagactctcctgaccgtgaagactggactggtggtgtaggatacattaccaaggatgtcatcaaggaacacttgcccgctgctacaatggacaacgttcaaattttgatctgtggtcctccagccatggttgcctctgttagaagaagtaccgtggacttggggttcagacgttccaaaccgctttccaagatggaagaccaggtgtttgtgttttga

SEQ ID NO: 5545 - DNA, 1185 bp, Saccharomyces cerevisiae
atgtggaagattatgcgttcatggaaatgtgggggaatgcgctgggcacatcgccagcgaccctcacacgagctgctgtcgcaactgtcgttcgaccagcattacaagattaggtcgaacattgagctgctgatacaggactacgctagtaaaccaattgcgcccctaaactacgagtatttcctgcaatacaggccgccgctgaccaagaaggaggagtacatgctgacgatcaagacaatcaacctgttgctttcattgacgtgtaaacggcttaatgccattcagaggctaccgtataatgcggtaatcaaccctcatattgagagaaccaactctttgtatttgaaaagcttgcaaacgttgctatcaatcgcatacccgtacgagttgcacaatcctcccaagatacaggccaagttcacagaactgctggacgaccacgaggacgccattgtggtattggcaaaaggtcttcaggaaatccaatcgtgttacccaaagtttcaaatttcgcagttcttgaacttccacctgaaggagagaatcacgatgaagctgcttgtgacgcactatttgtcgttgatggcacagaacaaaggtgacacgaacaaaaggatgattggaatcttgcaccgggacctccccatagcacaattgatcaagcacgtttctgattatgtcaatgatatatgctttgtgaagttcaacactcagcggaccccggtcctaattcacccgccatcacaagacatcacattcacgtgcattccgcccattctggagtatattatgacagaggtattcaagaacgcttttgaagctcagatagctcttggaaaggaacatatgcccatagagatcaatcttttaaagccagacgatgacgagctgtacttacggatacgggaccatggtggtgggatcacgcccgaggtagaggccctcatgttcaactactcttactctacacatacccaacaatcagctgactctgagtctacagatctgcccggcgagcaaatcaacaacgtctccggcatgggctttggtctaccaatgtgcaagacgtacctagaactgtttgggggcaagattgacgttcaaagtttacttggctggggcacggacgtgtacatcaagctcaaaggcccttctaagactgcactactctccaaaaagtaa

SEQ ID NO: 5546 - DNA, 1185 bp, Artificial Sequence
  Description of Artificial Sequence: Synthetic polynucleotide
atgtggaagattatgcgttcttggaaatgtgggggaatgcgctgggcacatcgccagaggccctctcacgagttattatctcaattatctttcgaccagcattacaagattaggtctaacattgagttattgatacaggactacgctagtaaaccaattgcgcccttaaactacgagtatttcttacaatacaggccgccgttaaccaagaaggaggagtacatgcttacgatcaagacaatcaaccttttgctttctttgacgtgtaaaagacttaatgccattcagaggttaccgtataatgcggtaatcaaccctcatattgagagaaccaactctttgtatttgaaaagcttgcaaacgttgttatctatcgcatacccgtacgagttgcacaatcctcccaagatacaggccaagttcacagaattattagacgaccacgaggacgccattgtggtattggcaaaaggtcttcaggaaatccaaagctgttacccaaagtttcaaatttctcagttcttgaacttccacttgaaggagagaatcacgatgaagcttcttgtgacgcactatttgtctttgatggcacagaacaaaggtgacacgaacaaaaggatgattggaatcttgcacagagacctccccatagcacaattgatcaagcacgtttctgattatgtcaatgatatatgctttgtgaagttcaacactcagcgtaccccggtcttgattcacccgccatctcaagacatcacattcacgtgcattccgcccattttagagtatattatgacagaggtattcaagaacgcttttgaagctcagatagctcttggaaaggaacatatgcccatagagatcaatcttttaaagccagacgatgacgagttatacttaagaataagagaccatggtggtgggatcacgcccgaggtagaggccctcatgttcaactactcttactctacacatacccaacaatctgctgactctgagtctacagatttgcccggcgagcaaatcaacaacgtctccggcatgggctttggtttgccaatgtgcaagacgtacttggaattatttgggggcaagattgacgttcaaagtttacttggctggggcacggacgtgtacatcaagctcaaaggcccttctaagactgcattgctctccaaaaagtga

SEQ ID NO: 5547 - DNA, 981 bp, Saccharomyces cerevisiae
atgtcgtttaatgccttcgccagctctttgagcaagaaattacaggaaatatccacaagtgtttccgaaaaaacccaggaattgcccagtttggcgcaatccacccaaagaatggtccaggaacgtttgggccaggtgacggacatctcccaattgccaagagagtacacagagctggaagataaggttgacaccatcaaactgatttacaaccacttcttgggtgtaactgctatctacgaaaacggatcgtacgattaccctaaatacatcaacgaatccgtcaacgagttttcaagaagcgtggcttccaagttgacagagttgactcatgctacatctgcgtctgaggcacaaaacatcttagttgctccaggccccatcaaagaacccaagacgttgaactacgccctcagtaaagtggctttgaactccagtgaatgtttgaacaagatgttccccaccgaggaacaacccttggcttcggcactcttgcaattcagtgatgtgcaggctaagattgctcaagctagaattcaacaagataccttgattcaaaccaaattcaataaaaatttgagggaaaggctctcttttgagatcggtaaggccgataagtgccgcaaggatgtccattccatgagattaagatatgacgtggcaagaactaacttggcaaacaacaagaagccagaaaaggaagcttccttgagagtccaaatggagactttggaagaccagtttgctcaagtcactgaagacgctactgtgtgcttgcaggaggttatttctcacgctaacttcagtgaagatttgaaggaattggccaaggctcaagctgagtattttgaaacctcggctggcctaatgaaagagttcctatccaactcatttgcggaagagccggaagcaaagcctgaggttgcagaagaagaaaagccacagacagctatctctatgaatgacgaagacgacgcttaa

SEQ ID NO: 5548 - DNA, 981 bp, Artificial Sequence
  Description of Artificial Sequence: Synthetic polynucleotide
atgagttttaatgccttcgccagctctttgagcaagaaattacaggaaatatccacaagtgtttccgaaaaaacccaggaattgcccagtttggcgcaatccacccaaagaatggtccaggaacgtttgggccaggtgacggacatctcccaattgccaagagagtacacagagttagaagataaggttgacaccatcaaattgatttacaaccacttcttgggtgtaactgctatctacgaaaacggatcttacgattaccctaaatacatcaacgaatccgtcaacgagttttccagaagcgtggcttccaagttgacagagttgactcatgctacatctgcgtctgaggcacaaaacatcttagttgctccaggccccatcaaagaacccaagacgttgaactacgccctcagtaaagtggctttgaactccagtgaatgtttgaacaagatgttccccaccgaggaacaacccttggcttctgcactcttgcaattcagtgatgtgcaggctaagattgctcaagctagaattcaacaagataccttgattcaaaccaaattcaataaaaatttgagggaaaggctctcttttgagatcggtaaggccgataagtgccgcaaggatgtccattccatgagattaagatatgacgtggcaagaactaacttggcaaacaacaagaagccagaaaaggaagcttccttgagagtccaaatggagactttggaagaccagtttgctcaagtcactgaagacgctactgtgtgcttgcaggaggttatttctcacgctaacttcagtgaagatttgaaggaattggccaaggctcaagctgagtattttgaaaccagtgctggcttaatgaaagagttcttatccaactcttttgcggaagagccggaagcaaagcctgaggttgcagaagaagaaaagccacagacagctatctctatgaatgacgaagacgacgcttga

SEQ ID NO: 5549 - DNA, 417 bp, Saccharomyces cerevisiae
atggacgctactcaaccgcaatacgaactatccgtagtaacacaatgcctaaagtctgccattgacgtcatccaatggttgattcctactattactaagttcagccaatcacacccgttagttttccaactattgtttattttcttcacattttatgtcttttacaagttgttgatgaacttcattactctggtcaaaagattcctgtatttgacgttggtagtaacatgtatcggtatttatatgcgtggttcgcagcagtttttgactgtggacctgttgaatttctacaatttcgtcatgtcaaatagatactacgcatttaaaatttatactctgtttattaatgccctggaaagagaaatcaacactgtttatcatttggcgcagatgaaaatggaacagttgcttaaatag

SEQ ID NO: 5550 - DNA, 417 bp, Artificial Sequence
  Description of Artificial Sequence: Synthetic polynucleotide
atggacgctactcaaccgcaatacgaattatccgtagtaacacaatgcttgaagtctgccattgacgtcatccaatggttgattcctactattactaagttcagccaatctcacccgttagttttccaattattgtttattttcttcacattttatgtcttttacaagttgttgatgaacttcattactttggtcaaaagattcctctatttgacgttggtagtaacatgtatcggtatttatatgcgtggttctcagcagtttttgactgtggacttgttgaatttctacaatttcgtcatgagtaatagatactacgcatttaaaatttatactttatttattaatgccttggaaagagaaatcaacactgtttatcatttggcgcagatgaaaatggaacagttgcttaaatga

SEQ ID NO: 5551 - DNA, 1422 bp, Saccharomyces cerevisiae
atgctcaggtgtgcggtcaagaagtttgcatattttgccaccttcctcactatcgtcgctaatatttacatctatacttatccatctttccatccagaacagtgttcatggaactgctctaacaagaacgcaccactacagaaagatttgacttttgtggacaaagtgaagaattacttcagtgatgttcgagagcaatggcatggtagccatgcctctgcaggtaacgatgaggatattcatattttggccttcggtgatcctcagattaaaggcatctggccaaagacgccatatgtgtcccgattagatacatacggtaatgactactatcttggtcacatctatgatatgatgcagcagagactgaagcctcaggtggtgactgttatgggtgatcttttctccagtcaatggatcggtgattccgaattccataatagaacgaaaaggtatattagcagaattttcaaaagagacccaacttctattgaaaatatcaaacaacagaacctcgatgagaaaggtcaatataaggcgaattggcctgaatggggagaccgttttaatgagattttagacaatgtcaaggaaaacgaggctgataatcaagaactttcttttgggtttggttatgaaaatatccactcatggaatccagacttggaagactttttaatcatcaacatcacaggtaatcatgatgtaggttactcaggcgacgcgacttatcaacatatgacaaggttccacgaccttttcggtaaggacaactattggattgaatacgaaaccaacactacccatccttggagaattgtagtgttgaatgatcttttactagaaggtcccgctttacaaccagaatttgttgaagctacttggatctttttaaaccaactaaatgaacgtaaattcaatggtagtactgttttgttgacgcatgttccattttacaagcgtgaagggttatgcgttgatggcccagacactaggtattatccagatgcccatgccccagaatcatataaatctgggcttttgagatcccaaaatcatttgagtgaatccgtttcaaatcaagttttgaatatgatatttgaaaatgggaagccaggtatcatattaactggtcatgaccatgagggctgtgaaacagtttataataaaaaatctacatctacttgggaagcgactaaaaatatcgaaagtgacgttttcgttaaagaaatcacagttaagtctatgatgggtgaatttaatgggaatactggtttggttacaggacacttcaacacagattcaatgacttgggagtggactttcagtttatgcccattcgctattcaacatgtttggtggttcgctaaagtgtccctgctcgtcaccatattcacttggtcctcgctactatttgtctaa

SEQ ID NO: 5552 - DNA, 1422 bp, Artificial Sequence
  Description of Artificial Sequence: Synthetic polynucleotide
atgctcaggtgtgcggtcaagaagtttgcatattttgccaccttcctcactatcgtcgctaatatttacatctatacttatccatctttccatccagaacagtgttcttggaactgctctaacaagaacgcaccattacagaaagatttgacttttgtggacaaagtgaagaattacttcagtgatgttagagagcaatggcatggtagccatgcctctgcaggtaacgatgaggatattcatattttggccttcggtgatcctcagattaaaggcatctggccaaagacgccatatgtgtccagattagatacatacggtaatgactactatcttggtcacatctatgatatgatgcagcagagattaaagcctcaggtggtgactgttatgggtgatcttttctccagtcaatggatcggtgattccgaattccataatagaacgaaaaggtatattagcagaattttcaaaagagacccaacttctattgaaaatatcaaacaacagaacctcgatgagaaaggtcaatataaggcgaattggcctgaatggggagaccgttttaatgagattttagacaatgtcaaggaaaacgaggctgataatcaagaactttcttttgggtttggttatgaaaatatccactcttggaatccagacttggaagactttttaatcatcaacatcacaggtaatcatgatgtaggttactctggcgacgcgacttatcaacatatgacaaggttccacgaccttttcggtaaggacaactattggattgaatacgaaaccaacactacccatccttggagaattgtagtgttgaatgatcttttattggaaggtcccgctttacaaccagaatttgttgaagctacttggatctttttaaaccaattgaatgaacgtaaattcaatggtagtactgttttgttgacgcatgttccattttacaagcgtgaagggttatgcgttgatggcccagacactaggtattatccagatgcccatgccccagaaagttataaatctgggcttttgagatcccaaaatcatttgagtgaatccgtttctaatcaagttttgaatatgatatttgaaaatgggaagccaggtatcatattaactggtcatgaccatgagggctgtgaaacagtttataataaaaaatctacatctacttgggaagcgactaaaaatatcgaaagtgacgttttcgttaaagaaatcacagttaagtctatgatgggtgaatttaatgggaatactggtttggttacaggacacttcaacacagattctatgacttgggagtggactttcagtttatgcccattcgctattcaacatgtttggtggttcgctaaagtgtccttactcgtcaccatattcacttggtcctctttactttttgtctga

SEQ ID NO: 5553 - DNA, 2511 bp, Saccharomyces cerevisiae
atggctcatagaaaattacagcaggaggtcgatagggtctttaaaaaaattaacgaaggtttagaaatcttcaatagctattacgaaagacatgaatcatgcacaaacaatccttcccaaaaggacaagctagagtcggatttaaaaagagaagtcaaaaagctgcaaaggctaagggaacagataaaatcatggcaaagctcacccgatattaaagataaagattctcttctagattacagaaggtctgtagaaatagcgatggaaaagtataaggctgtagagaaggcgtccaaagaaaaagcatactctaatattagcctgaaaaaatcagagactttagacccgcaagaaagggaaaggagagatatatctgagtacctttcccaaatgatcgatgagctggaaaggcaatacgattccctacaagtggaaattgacaagcttttacttcttaataaaaagaagaaaacgtcatctacgacaaatgatgaaaaaaaggaacaatataagcgttttcaagcgaggtataggtggcatcaacagcagatggagttagccttgagattgttagccaatgaggaattggacccccaagatgttaaaaacgtgcaggacgatataaattacttcgtggagtcaaatcaggatccagatttcgtagaggatgaaactatttatgacggtttgaatttacagagtaacgaagccattgctcatgaggtggcccagtattttgcttcacaaaatgctgaagataacaatacatcggatgctaatgaatctctgcaggacatatcaaaactttctaaaaaggagcaaagaaaattggaaagagaagccaaaaaggctgctaaacttgcggcaaaaaatgcaacaggtgcagctatacccgttgctggtccctcttctacgccgtcacctgtcattcccgttgctgatgcttcaaaagaaacggaaagaagtccttcatcttcccctatccataatgcaacaaagcctgaagaggctgttaaaacttctataaagagtcccaggagcagtgctgataatttgcttccgtcattgcaaaaatcaccaagttcagctacaccagaaactccaacaaatgtacatacacatattcatcaaactccaaacggtattactggtgccactacattgaaacctgctactcttccagcaaaacctgctggtgaattaaaatgggccgttgctgcatcacaagcggtagaaaaggatagaaaagtcacttctgcatcgtccaccatatccaatacctcaacaaagactccaacaactgctgctgctactacaacatcatccaacgctaacagcaggattggtagtgcgttgaatacacctaagttatctacttcatctttgtctttacaacctgacaataccggcgcatcatcttcagcagcaacggccgctgctgttttggctgctggggcggctgctgtgcatcaaaacaatcaggccttctatagaaatatgagctcctcacatcatcctttagtttccttggcgacaaatccaaagtctgaacatgaagttgcaactacggtaaaccaaaatgggcctgagaacacaactaagaaggttatggagcagaaggaggaagagtcaccagaagaaagaaataaattgcaagtgccaacttttggagtattcgatgacgattttgaatcggatagggattcagagacggagccagaggaagaagaacaaccaagcacaccgaaatatttaagcttggaacaaagagaagctaagacaaatgaaatcaaaaaagaatttgtaagtgattttgaaactttacttctaccaagtggtgtgcaagaattcataatgagttctgaactctataatagtcaaattgaatcgaaaataacgtacaaaaggtctcgtgatatgtgtgaaatttccaggctggtcgaagtaccgcaaggagttaatccaccatctcccttggatgcattcagatctactcaacagtgggacgttatgcgttgttcgttgcgtgatattattataggctccgaaaggctgaaagaagattcatcgtcaatttatgccaaaattctagaaaatttcagaactttagaaatgttttcgttattttataactattattttgctattactcctttagaaagggagattgcatacaagattctaaatgagagggattggaaagtttcaaaggatggtacaatgtggtttttaagacaaggtgaggtcaagttttttaatgaaatttgcgaagttggtgattacaaaatttttaaactggacgattggacagtaattgataaaattaacttcagactggattattcatttttgcagccaccggtagatacagcgtctgaggtccgtgatgtgagtgttgacaataacaatgttaatgatcagagtaatgtaactttagaacaacaaaaacaagaaatttctcacggcaagcagctcttgaaacaattgaaacagggaaaaattagtgtatga

SEQ ID NO: 5554 - DNA, 2511 bp, Artificial Sequence
  Description of Artificial Sequence: Synthetic polynucleotide
atggctcatagaaaattacagcaggaggtcgatagggtctttaaaaaaattaacgaaggtttagaaatcttcaatagctattacgaaagacatgaaagttgcacaaacaatccttcccaaaaggacaagttggagtctgatttaaaaagagaagtcaaaaagttacaaaggttgagggaacagataaaaagttggcaaagctctcccgatattaaagataaagattctcttttagattacagaaggtctgtagaaatagcgatggaaaagtataaggctgtagagaaggcgtccaaagaaaaagcatactctaatattagcttgaaaaaaagtgagactttagacccgcaagaaagggaaaggagagatatatctgagtacctttcccaaatgatcgatgagttagaaaggcaatacgattccttacaagtggaaattgacaagcttttacttcttaataaaaagaagaaaacgtcttctacgacaaatgatgaaaaaaaggaacaatataagcgttttcaagcgaggtataggtggcatcaacagcagatggagttagccttgagattgttagccaatgaggaattggacccccaagatgttaaaaacgtgcaggacgatataaattacttcgtggagagcaatcaggatccagatttcgtagaggatgaaactatttatgacggtttgaatttacagagtaacgaagccattgctcatgaggtggcccagtattttgcttctcaaaatgctgaagataacaatacatctgatgctaatgaatctttgcaggacatatccaaactttctaaaaaggagcaaagaaaattggaaagagaagccaaaaaggctgctaaacttgcggcaaaaaatgcaacaggtgcagctatacccgttgctggtccctcttctacgccgtctcctgtcattcccgttgctgatgcttccaaagaaacggaaagaagtccttcttcttcccctatccataatgcaacaaagcctgaagaggctgttaaaacttctataaagagtcccaggagcagtgctgataatttgcttccgtctttgcaaaaatctccaagttctgctacaccagaaactccaacaaatgtacatacacatattcatcaaactccaaacggtattactggtgccactacattgaaacctgctactcttccagcaaaacctgctggtgaattaaaatgggccgttgctgcatctcaagcggtagaaaaggatagaaaagtcacttctgcatcttccaccatatccaatacctctacaaagactccaacaactgctgctgctactacaacatcttccaacgctaacagcaggattggtagtgcgttgaatacacctaagttatctacttcttctttgtctttacaacctgacaataccggcgcatcttcttctgcagcaacggccgctgctgttttggctgctggggcggctgctgtgcatcaaaacaatcaggccttctatagaaatatgagctcctctcatcatcctttagtttccttggcgacaaatccaaagtctgaacatgaagttgcaactacggtaaaccaaaatgggcctgagaacacaactaagaaggttatggagcagaaggaggaagagtctccagaagaaagaaataaattgcaagtgccaacttttggagtattcgatgacgattttgaaagtgatagggattctgagacggagccagaggaagaagaacaaccaagcacaccgaaatatttaagcttggaacaaagagaagctaagacaaatgaaatcaaaaaagaatttgtaagtgattttgaaactttacttttaccaagtggtgtgcaagaattcataatgagttctgaactctataatagtcaaattgaaagtaaaataacgtacaaaaggtctcgtgatatgtgtgaaatttccaggttggtcgaagtaccgcaaggagttaatccaccatctcccttggatgcattcagatctactcaacagtgggacgttatgcgttgttctttgcgtgatattattataggctccgaaaggttgaaagaagattcttcttccatttatgccaaaattttggaaaatttcagaactttagaaatgttttctttattttataactattattttgctattactcctttagaaagggagattgcatacaagattttgaatgagagggattggaaagtttccaaggatggtacaatgtggtttttaagacaaggtgaggtcaagttttttaatgaaatttgcgaagttggtgattacaaaatttttaaattagacgattggacagtaattgataaaattaacttcagattagattattcttttttgcagccaccggtagatacagcgtctgaggtccgtgatgtgagtgttgacaataacaatgttaatgatcagagtaatgtaactttagaacaacaaaaacaagaaatttctcacggcaagcagctcttgaaacaattgaaacagggaaaaattagtgtatga

SEQ ID NO: 5555 - DNA, 1971 bp, Saccharomyces cerevisiae
atgaacaatgtacacataattaaacctttatcacttccacagaggttttttagttgtattttccatcctctattactgatattctttacttctgttattttaactatttggggttccttttcagtcattgacattacaatggcaaaaatgtctcacgcacaggtcaaacgaaatgataccgtctcaacctttgcatctatttcaactgctacagcgacagccacaacaacggccacaacaacggccacaatgacagcagtcacaacacagcatgccatatattctgccaacagttactctttaaataaaacattcattgataatacaattgatcagtatttcgaaagcaaactacggagtattgaatctacggtaggtacggatatgcaagaaaaattcaagtcatacacagacgacatactggataataaacaaaaacttatcaacgaccaaataagtttggaaactgaattgattaaggaagttcttgaggtaaacaatacaatttttaacgaactactcactaaatcacagctgataaatgacacatggaatgaaatatcagaagacgcaatgaccattgataaggattccatttcacaaatggcatcaaacctactgttaaattactccatgtttgacagtatttttgggaactactcaaggaaattgaaatcattgcagaacttcaatggcactatcactgacttttctactcaattagatacctctagtaccttaagtttgaattttctacgaaattccactgactggcttcagttgaaaaggaactttactgcaaacttacagaatgaaatttccattttatctggggggagtaccgaggttacatcgtctacttcaataattaaacggtctctgaaaacaaatagcgaggaaaacagtgtactaagtgcagtaaaaaatcacgttttccgtaaatgtaagagaatgacaataattttcacagtcatgtactttgcatttgtgattttgctcatggcaatcgaaagaattctgtttcagctggaaaatcagcaagtaaacctggttatgtcccaaattaatggcctgacaggacaaaccaattttactaaatacaacaaagttttgaaaagcttaattactactctgaatctcagtacactttatccaattccctaccaattaacaaagcttatcaatcaaaaaatatttaaaagagaaccagaaaaaatcgatgacaaaaaagtcaaaaaatcaaaactattttactgtaactggtggataatctcaaatggggctcacctgtggctgtttggttttttgatgttattaattcattggcagatagtgacgcgattaacaaactttgaagtacccagtttgcctacattccacaaaagagcgggaccttcgctatacaaaagggaagtttggacagatggaaatataacaactacgatagagggtttcattaatgacagcgtatcattattgtgtgaaaatttccaaatggaagtgaatgaaaagttcattacagcaaatttaagccttcaaactgaccccaatttgaaagtgcaatcaacggacatcctaaatctttgggttaacgacacaaacactcagtttgaaaaatatcttaatgagagttctcaaaattggcaggggatagacctgcaggttgagcctctgttaggcagcgattcaattaatgagttcctgggtcagtatttcctaccgacatacgaagttacgaatacaaattcttcatttgcactggacattcaaaaatatggtataattaatcgaggaattaatataaccaacgcatcggtagcggcattgtcttcactgtcaaaacgccaaataaaggataaggagcaaaaacaaacgtactttttacacactgtttataagtggggacttttagcagtttgcctgactatattgttccaccacatgcttatatttataatattaaagttgtaa

SEQ ID NO: 5556 - DNA, 1971 bp, Artificial Sequence
  Description of Artificial Sequence: Synthetic polynucleotide
atgaacaatgtacacataattaaacctttatctcttccacagaggttttttagttgtattttccatcctttattattgatattctttacttctgttattttaactatttggggttccttttctgtcattgacattacaatggcaaaaatgtctcacgcacaggtcaaaagaaatgataccgtctccacctttgcatctatttctactgctacagcgacagccacaacaacggccacaacaacggccacaatgacagcagtcacaacacagcatgccatatattctgccaacagttactctttaaataaaacattcattgataatacaattgatcagtatttcgaaagcaaattaagaagtattgaatctacggtaggtacggatatgcaagaaaaattcaagtcctacacagacgacatattggataataaacaaaaacttatcaacgaccaaataagtttggaaactgaattgattaaggaagttcttgaggtaaacaatacaatttttaacgaattactcactaaatctcagttgataaatgacacatggaatgaaatatctgaagacgcaatgaccattgataaggattccatttctcaaatggcatctaacttattattaaattactccatgtttgacagtatttttgggaactactctaggaaattgaaatctttgcagaacttcaatggcactatcactgacttttctactcaattagatacctctagtaccttaagtttgaattttttaagaaattccactgactggcttcagttgaaaaggaactttactgcaaacttacagaatgaaatttccattttatctggggggagtaccgaggttacatcttctacttccataattaaaagatctttgaaaacaaatagcgaggaaaacagtgtattgagtgcagtaaaaaatcacgttttccgtaaatgtaagagaatgacaataattttcacagtcatgtactttgcatttgtgattttgctcatggcaatcgaaagaattttatttcagttagaaaatcagcaagtaaacttggttatgtcccaaattaatggcttaacaggacaaaccaattttactaaatacaacaaagttttgaaaagcttaattactactttgaatctcagtacactttatccaattccctaccaattaacaaagcttatcaatcaaaaaatatttaaaagagaaccagaaaaaatcgatgacaaaaaagtcaaaaaatctaaattattttactgtaactggtggataatctctaatggggctcacctttggttatttggttttttgatgttattaattcattggcagatagtgacgagattaacaaactttgaagtacccagtttgcctacattccacaaaagagcgggaccttctttgtacaaaagggaagtttggacagatggaaatataacaactacgatagagggtttcattaatgacagcgtatctttattgtgtgaaaatttccaaatggaagtgaatgaaaagttcattacagcaaatttaagccttcaaactgaccccaatttgaaagtgcaatctacggacatcttgaatctttgggttaacgacacaaacactcagtttgaaaaatatcttaatgagagttctcaaaattggcaggggatagacttacaggttgagcctttattaggcagcgattctattaatgagttcttgggtcagtatttcttgccgacatacgaagttacgaatacaaattcttcttttgcattggacattcaaaaatatggtataattaatagaggaattaatataaccaacgcatctgtagcggcattgtcttctttatccaaacgccaaataaaggataaggagcaaaaacaaacgtactttttacacactgtttataagtggggacttttagcagtttgcttgactatattgttccaccacatgcttatatttataatattaaagttgtga

SEQ ID NO: 5557 - DNA, 1764 bp, Saccharomyces cerevisiae
atgtttactggtcaggagtatcattccgtagactctaattccaacaagcaaaaagacaacaataaacgtggtattgatgacacatcaaagatcttgaataataagataccgcactctgttagtgatacttctgccgccgccaccaccacttctactatgaacaattctgctttaagtagatccttagatcctactgacataaactatagcacaaatatggctggtgtggttgaccaaatacatgattatactacttccaatagaaattctttaaccccacaatattctattgcagctggaaacgtcaattcgcatgatcgggttgttaaacccagcgccaattcaaactatcagcaggctgcataccttcgacaacagcaacagcaggatcagcgacaacagtcaccctctatgaaaactgaagaggaatcccaactctacggtgatattctgatgaattctggtgtcgtacaggatatgcatcagaatctggccactcatacaaatctgagccaactgtcgtctacccgtaagtccgctccgaatgattctactacagccccgactaatgcgtccaacatcgccaatacggcttctgtgaacaagcagatgtatttcatgaacatgaatatgaataacaacccacatgccttgaacgatccatccatcctggaaacattgtcgccattttttcaaccttttggtgttgatgtagcacatttacctatgacgaatccaccaattttccaaagttctttgcctggatgcgatgagccaattagaagaagaagaatatcaatctctaacggtcaaataagccagctaggcgaagatattgaaactttggaaaacctgcacaacacacagccgcccccgatgcccaattttcacaattataatggtctgagccaaactaggaatgtatcaaacaagccggtcttcaaccaagcagtgccggttagtagtattccacaatacaatgcaaaaaaagttattaatcccacgaaggactccgcattgggtgatcagagcgttatttactcgaaaagtcagcagcgaaattttgtaaacgcgccatcaaagaatactccagcggagagtataagtgatttggaaggcatgacgacgtttgcgccaactactggaggtgaaaataggggcaaatctgcacttagggaatctcactctaatcctagcttcactccaaaatctcaaggatctcatttaaatttagcggcgaacacacagggaaatccaatccctggtactacggcatggaagagagcaagattgttagaaagaaatcgaattgcagcttcgaaatgtagacaaaggaaaaaggttgcgcagctgcagctccaaaaggaatttaacgaaattaaagacgagaatagaattttactgaaaaagttaaattactatgaaaaactaatctctaaattcaagaaattctccaaaattcatttacgtgaacatgaaaaactaaataaagactcagataataatgttaatggcactaatagtagcaacaaaaatgaaagcatgactgtggattcattaaagatcattgaagaacttttaatgatcgattcagacgttacagaagtggataaagatactggtaagatcatagccatcaagcacgagccatactctcaacgtttcggaagcgatactgacgatgacgatatagatctcaagcccgtagaaggtggtaaggatccagacaaccaatcattacccaattctgaaaagataaaataa

SEQ ID NO: 5558 - DNA, 1764 bp, Artificial Sequence
  Description of Artificial Sequence: Synthetic polynucleotide
atgtttactggtcaggagtatcattccgtagactctaattccaacaagcaaaaagacaacaataaacgtggtattgatgacacatccaagatcttgaataataagataccgcactctgttagtgatacttctgccgccgccaccaccacttctactatgaacaattctgctttaagtagatccttagatcctactgacataaactatagcacaaatatggctggtgtggttgaccaaatacatgattatactacttccaatagaaattctttaaccccacaatattctattgcagctggaaacgtcaattctcatgatagagttgttaaacccagcgccaatagcaactatcagcaggctgcataccttagacaacagcaacagcaggatcagagacaacagtctccctctatgaaaactgaagaggaatcccaactctacggtgatattttgatgaattctggtgtcgtacaggatatgcatcagaatttggccactcatacaaatttgagccaattatcttctacccgtaagtccgctccgaatgattctactacagccccgactaatgcgtccaacatcgccaatacggcttctgtgaacaagcagatgtatttcatgaacatgaatatgaataacaacccacatgccttgaacgatccatccatcttggaaacattgtctccattttttcaaccttttggtgttgatgtagcacatttacctatgacgaatccaccaattttccaaagttctttgcctggatgcgatgagccaattagaagaagaagaatatccatctctaacggtcaaataagccagttaggcgaagatattgaaactttggaaaacttgcacaacacacagccgcccccgatgcccaattttcacaattataatggtttaagccaaactaggaatgtatccaacaagccggtcttcaaccaagcagtgccggttagtagtattccacaatacaatgcaaaaaaagttattaatcccacgaaggactccgcattgggtgatcagagcgttatttactctaaaagtcagcagagaaattttgtaaacgcgccatctaagaatactccagcggagagtataagtgatttggaaggcatgacgacgtttgcgccaactactggaggtgaaaataggggcaaatctgcacttagggaatctcactctaatcctagcttcactccaaaatctcaaggatctcatttaaatttagcggcgaacacacagggaaatccaatccctggtactacggcatggaagagagcaagattgttagaaagaaatagaattgcagcttccaaatgtagacaaaggaaaaaggttgcgcagttacagctccaaaaggaatttaacgaaattaaagacgagaatagaattttattgaaaaagttaaattactatgaaaaattaatctctaaattcaagaaattctccaaaattcatttacgtgaacatgaaaaattgaataaagacagtgataataatgttaatggcactaatagtagcaacaaaaatgaaagcatgactgtggattctttaaagatcattgaagaacttttaatgatcgattctgacgttacagaagtggataaagatactggtaagatcatagccatcaagcacgagccatactctcaacgtttcggaagcgatactgacgatgacgatatagatctcaagcccgtagaaggtggtaaggatccagacaaccaatctttacccaattctgaaaagataaaatga

SEQ ID NO: 5559 - DNA, 1119 bp, Saccharomyces cerevisiae
atgaaatgcagggtatggtcagaggctcgtgtttatacgaatatcaataaacaaagaaccgaggaatattgggattatgaaaatactgtaattgattggtccacaaatacaaaggactatgaaattgaaaataaagttgggcgaggaaaatactccgaggttttccaaggtgtcaaattagactctaaagttaaaattgttattaagatgttgaaaccagttaaaaagaagaagatcaagagagaaatcaaaatcttaacggatttgtctaacgaaaaagtgcctccaacgactttgccatttcaaaaagatcaatattacacaaatcaaaaggaggacgttttaaaattcatcaggccctatatctttgatcagccacacaatggtcatgcaaacataattcatctatttgatataataaaggatcccatctcaaaaactccggctttggtcttcgaatacgtagataatgtggacttccgtattctttaccctaaattaaccgatctcgaaattaggttttatatgtttgagttattaaaggccttagactattgtcattcaatgggaataatgcatagagatgttaaacctcataacgtaatgattgatcataagaataaaaaattgcgattgatagattgggggcttgctgaattttatcatgttaatatggaatacaatgttcgtgttgcgtcgaggttttttaagggtcctgaactactagttgactacagaatgtatgattattctttagacttgtggtcgtttgggacaatgttggcttctatgatctttaaaagagagccatttttccatggaacgagtaacacagaccagcttgtcaagatcgtcaaagtacttggtacaagcgattttgagaaatacctgttgaagtatgaaattaccttaccgagagaattttacgatatggaccaatacatcagaaagccttggcatagattcatcaatgatggtaataaacatttaagcggcaacgatgaaattattgaccttattgacaatcttttgagatatgatcatcaagaaagattaactgctaaggaagcgatgggacacccgtggtttgccccaataagggaacaaattgaaaaataa

SEQ ID NO: 5560 - DNA, 1119 bp, Artificial Sequence
  Description of Artificial Sequence: Synthetic polynucleotide
atgaaatgcagggtatggtctgaggctcgtgtttatacgaatatcaataaacaaagaaccgaggaatattgggattatgaaaatactgtaattgattggtccacaaatacaaaggactatgaaattgaaaataaagttgggagaggaaaatactccgaggttttccaaggtgtcaaattagactctaaagttaaaattgttattaagatgttgaaaccagttaaaaagaagaagatcaagagagaaatcaaaatcttaacggatttgtctaacgaaaaagtgcctccaacgactttgccatttcaaaaagatcaatattacacaaatcaaaaggaggacgttttaaaattcatcaggccctatatctttgatcagccacacaatggtcatgcaaacataattcatttatttgatataataaaggatcccatctccaaaactccggctttggtcttcgaatacgtagataatgtggacttccgtattctttaccctaaattaaccgatctcgaaattaggttttatatgtttgagttattaaaggccttagactattgtcattctatgggaataatgcatagagatgttaaacctcataacgtaatgattgatcataagaataaaaaattgagattgatagattgggggcttgctgaattttatcatgttaatatggaatacaatgttcgtgttgcgtccaggttttttaagggtcctgaattattggttgactacagaatgtatgattattctttagacttgtggtcttttgggacaatgttggcttctatgatctttaaaagagagccatttttccatggaacgagtaacacagaccagcttgtcaagatcgtcaaagtacttggtacaagcgattttgagaaatacttgttgaagtatgaaattaccttaccgagagaattttacgatatggaccaatacatcagaaagccttggcatagattcatcaatgatggtaataaacatttaagcggcaacgatgaaattattgaccttattgacaatcttttgagatatgatcatcaagaaagattaactgctaaggaagcgatgggacacccgtggtttgccccaataagggaacaaattgaaaaatga

SEQ ID NO: 5561 - DNA, 864 bp, Saccharomyces cerevisiae
atgtctgatgctcaattcgatgctgctttagatcttcttaggaggctaaatcctaccacgttacaggagaatctaaacaacttgatcgaattacaaccaaatttggcacaagatttactatcttcagtagacgttcccctatccacacagaaagattccgccgattcaaaccgggagtacttatgctgcgactataatcgtgatattgattcgttcagatcgccttggtcgaacacttattacccagaactatccccaaaggatctacaagacagcccctttccctcagcccctttaagaaaattggagatcttagccaatgactctttcgacgtttacagagatctctattatgaaggcggtatctccagcgtgtacctctgggacctcaatgaagaagatttcaatgggcacgattttgcaggggtagtgcttttcaaaaaaaaccaatcagatcacagtaattgggacagtatccatgtttttgaagttacaacatctccttcttctcccgacagtttcaactatagagtcaccactacaatcattctgcacttggacaaaacaaaaactgaccagaattctcatatgatgttatccgggaacctgacaagacagaccgaaaaggacatcgctattgatatgtcccgtccattagatgttattttcacatcacatgtcgctaatttgggttccttaattgaggacattgagtctcagatgagaaatctattggaaactgtttatttcgaaaagacaagagatatcttccaccaaacaaagaacgcagccattgcttcctctgctgaggaagcgaataaagacgcacaggcagaggtaatcagaggtttacagtctttatag

SEQ ID NO: 5562 - DNA, 864 bp, Artificial Sequence
  Description of Artificial Sequence: Synthetic polynucleotide
atgtctgatgctcaattcgatgctgctttagatcttcttaggaggttgaatcctaccacgttacaggagaatttgaacaacttgatcgaattacaaccaaatttggcacaagatttattatcttctgtagacgttcccttgtccacacagaaagattccgccgattccaacagagagtacttatgctgcgactataatcgtgatattgattctttcagatctccttggagcaacacttattacccagaattatccccaaaggatttgcaagacagcccctttccctctgcccctttaagaaaattggagatcttagccaatgactctttcgacgtttacagagatctctattatgaaggcggtatctccagcgtgtacctctgggacctcaatgaagaagatttcaatgggcacgattttgcaggggtagtgcttttcaaaaaaaaccaatctgatcacagtaattgggacagtatccatgtttttgaagttacaacatctccttcttctcccgacagtttcaactatagagtcaccactacaatcattttacacttggacaaaacaaaaactgaccagaattctcatatgatgttatccgggaacttaacaagacagaccgaaaaggacatcgctattgatatgtcccgtccattagatgttattttcacatctcatgtcgctaatttgggttccttaattgaggacattgagtctcagatgagaaatttattggaaactgtttatttcgaaaagacaagagatatcttccaccaaacaaagaacgcagccattgcttcctctgctgaggaagcgaataaagacgcacaggcagaggtaatcagaggtttacagtctttatga

SEQ ID NO: 5563 - DNA, 1251 bp, Saccharomyces cerevisiae
atggtatcttctttgcccaaggaatcgcaagccgaattgcaactgttccagaacgaaatcaacgccgctaatccgtccgactttcttcagttctccgccaactatttcaataaaaggctggaacaacagagagcgttcctcaaggccagggagcctgaatttaaggcaaagaacattgttctatttccggaaccagaggagtcattttccagacctcaatcagctcaatctcaatcaagatccagatcgagtgttatgttcaaatccccctttgtgaacgaggacccacactccaacgtgtttaaaagtgggtttaatttagacccgcacgaacaggacactcaccagcaagcacaggaagaacaacagcatactagagaaaagacatcaactcctccactcccaatgcacttcaacgcccaaaggcgtacttctgttagtggtgagaccttacaaccaaacaattttgacgattggactccagatcactataaggaaaagtccgagcagcaattgcaaagactggaaaaatcgatccgtaataactttctgttcaacaagctggattccgactcaaaaaggctggtcataaattgtctggaggagaagtccgtccccaaaggtgctacgataatcaagcaaggtgaccaaggggactacttctatgtcgtcgaaaagggtactgttgacttctacgtcaacgacaacaaggtcaactcttccgggccaggctccagtttcggggaacttgctcttatgtacaacagccctcgtgctgccaccgttgtagcaacctccgactgtttgttgtgggctctagacaggctcaccttcagaaaaatacttttgggcagctctttcaagaagagactcatgtatgacgatcttttgaagagcatgccagttttgaagagtttgactacgtacgaccgtgccaaacttgccgatgcactggataccaagatctaccagccgggtgaaacaatcattcgcgagggtgatcaaggggagaacttttatttaattgagtacggagctgtggacgtctctaagaagggccaaggtgtcataaataaactgaaagaccatgattatttcggtgaagtggccttgctaaacgatttgcccagacaggccactgtgactgctacaaagagaaccaaagttgccacattggggaaaagtggttttcaacgtttactgggtcctgcagtagacgtattaaagctcaatgatcctacaagacattaa

SEQ ID NO: 5564 - DNA, 1251 bp, Artificial Sequence
  Description of Artificial Sequence: Synthetic polynucleotide
atggtatcttctttgcccaaggaatctcaagccgaattgcaattattccagaacgaaatcaacgccgctaatccgtccgactttcttcagttctccgccaactatttcaataaaaggttagaacaacagagagcgttcctcaaggccagggagcctgaatttaaggcaaagaacattgttttatttccggaaccagaggagtctttttccagacctcaatctgctcaatctcaatctagatccagaagtagtgttatgttcaaatccccctttgtgaacgaggacccacactccaacgtgtttaaaagtgggtttaatttagacccgcacgaacaggacactcaccagcaagcacaggaagaacaacagcatactagagaaaagacatctactcctccactcccaatgcacttcaacgcccaaaggcgtacttctgttagtggtgagaccttacaaccaaacaattttgacgattggactccagatcactataaggaaaagtccgagcagcaattgcaaagattagaaaaatctatccgtaataactttcttttcaacaagttggattccgactctaaaaggttggtcataaattgtttagaggagaagtccgtccccaaaggtgctacgataatcaagcaaggtgaccaaggggactacttctatgtcgtcgaaaagggtactgttgacttctacgtcaacgacaacaaggtcaactcttccgggccaggctccagtttcggggaacttgctcttatgtacaacagccctcgtgctgccaccgttgtagcaacctccgactgtttgttgtgggctttggacaggctcaccttcagaaaaatacttttgggcagctctttcaagaagagactcatgtatgacgatcttttgaagagcatgccagttttgaagagtttgactacgtacgaccgtgccaaacttgccgatgcattggataccaagatctaccagccgggtgaaacaatcattcgcgagggtgatcaaggggagaacttttatttaattgagtacggagctgtggacgtctctaagaagggccaaggtgtcataaataaattgaaagaccatgattatttcggtgaagtggccttgttgaacgatttgcccagacaggccactgtgactgctacaaagagaaccaaagttgccacattggggaaaagtggttttcaacgtttattgggtcctgcagtagacgtattaaagctcaatgatcctacaagacattga

SEQ ID NO: 5565 - DNA, 3105 bp, Saccharomyces cerevisiae
atgtctgccagaaaacgcaagtttaatagtctcaaaccgctagacaccttgaacagctctcgtgccagctctccaaggtcctctgcttctctaccgcccaaaagatataacacttttcgtaaggatccgaaaatcgttgatcatctaaacaatgcttctacaaaggatttcttaccagttttgagtatgaacagcgagagtaagaggcagatcgaattgtcggataatgatgttgataataatgatgaaggtgaaggcgtcaacagtggctgttcagatcaagattttgaacctttgcaaagctctcctttgaaaagacactcatcactcaaaagcacttccaatggtcttttgttccaaatgtctaataatctggggaatggttcaccggaaccggcagtagcgagcacttctccaaatggctcaattatttccactaaactaaatttgaacggccaattttcttgcgttgattcgaaaacattgcgaatttatcggcataaagcaccatgcataatgacttttgtctcagatcataatcatccgaaattttcattgtattttcaacaatcggtgatctacaattcacaagttaatctgcttgatgatgttgaattgataattttagataagaagaactcttttatggctataattttaaaagatctgaaaaaggtcaagatgatactagacgtgaataactcttcaatcaacattaacacgaacatcttgatatggtccactgcaagctccgcttcaaataaaaaaataaagtctattaaaagattcctgttgatgtcatattcttcgtcgataaaagtcgaaattttagatcataaagagcagattttggaaagactaaaacatctgattcatcctatttcttcgtcatcaccttcattgaacatggaaagggcaataaactccactaaaaatgcattcgactctttaagacttaaaaaaactaaactttctactaatgatgatgaaagtccgcaaattcatactcatttcttatcaaacaaacctcatggtttgcaatccttaacaaaaaggactcgtattgccagccttgggaaaaaagagcattcaatatctgttccaaaatcgaatatttcaccctcagatttctacaacactaacgggacagaaactttacaatcccacgcagtttcacaactaagacgttcaaatagatttaaagatgtttcggatccagcaaactcaaattcaaattcagaatttgatgatgcaactacggaatttgaaacaccagaactgtttaaacctagcctctgttacaaattcaacgatggttcaagctatactataacaaatcaagatttcaagtgtcttttcaataaggattgggttaatgatagcattttggatttttttacaaaattttacattgaatcatctattgaaaagtcaattatcaaaagagagcaagttcacttaatgtcctcttttttttacacgaaactaattagtaatccagcagattattattctaatgtaaaaaagtgggttaacaatactgatttgttttctaaaaagtacgttgttataccaattaacataagttatcattggtttagttgcattataacaaacttggatgcgatcttggattttcatcaaaacaaagataaaaacgatgccatcaactccgatgagatttctataaataatcctctggttaatattttgactttcgactcgttgaggcaaactcattcaagagaaattgatccaataaaagaatttctcatatcctatgcacttgataaatattcaattcaactggataaaacacaaatcaaaatgaaaacgtgtccagttccacaacaacctaatatgagcgattgtggtgttcatgttattttgaatattagaaaattttttgaaaatccggtggaaacaattgatgtatggaagaattctaagattaaaagtaagcacttcaccgcaaaaatgattaataaatattttgataaaaatgaaagaaatagtgcgagaaagaatttaaggcatactctaaaactcttacaactcaattacatcagctatctgaaaaaagaaaatttatatgaagaagttatgcaaatggaggagaaaaaaagcaccaatatcaacaataatgaaaattacgacgatgacgatgaagaaattcaaatcattgaaaatatagatcaaagcagtaaagataataacgcgcagttaacctcggaacctccctgctcacgatcatccagtatttcaacaacagaaagagagccgacagagttgcataattccgtagtacgacagcccaccggtgaaataataactgataatgaagatcccgttcgcgctgcttctccagaaacagcatccgtttctcctcccatacgtcacaatattttaaagagttcatctcctttcatatcagaaagtgcgaatgaaactgaacaagaagaatttacgtcaccatactttggaaggccgtctttaaagacgagggctaagcagtttgaaggcgtttcgtcaccaataaaaaacgatcaagccctgtcatccacccatgatattatgatgccgtcgcctaaacctaaaaggatttacccaagcaaaaaaatcccacaactttcctcgcatgttcaatctctatcgactgattctatggaacgccaatctagtcccaataataccaacattgtaatttcagatacagaacaagattcgaggttaggagtgaattctgaaagtaaaaatactagtggtattgttaacagggatgactcggacgtcaatttaattggtagttcactacctaatgtagcggaaaaaaatcatgacaacactcaggaaagtaatggtaataatgacagtcttggtaaaatacttcaaaatgttgacaaagaactgaacgaaaagttggttgatattgatgatgtggcatttagtagtccaactaggggtattccaagaaccagcgcgacaagcaagggatcaaatgcacaacttctctctaattatggagatgaaaataaccagtctcaagattctgtttgggatgagggcagagataatcctatactcttggaagatgaagacccttga

SEQ ID NO: 5566 - DNA, 3105 bp, Artificial Sequence
  Description of Artificial Sequence: Synthetic polynucleotide
atgtctgccagaaaacgcaagtttaatagtctcaaaccgttagacaccttgaacagctctcgtgccagctctccaaggtcctctgcttctttaccgcccaaaagatataacacttttcgtaaggatccgaaaatcgttgatcatttgaacaatgcttctacaaaggatttcttaccagttttgagtatgaacagcgagagtaagaggcagatcgaattgagtgataatgatgttgataataatgatgaaggtgaaggcgtcaacagtggctgttctgatcaagattttgaacctttgcaaagctctcctttgaaaagacactcttctctcaaaagcacttccaatggtcttttgttccaaatgtctaataatttggggaatggttctccggaaccggcagtagcgagcacttctccaaatggctccattatttccactaaattgaatttgaacggccaattttcttgcgttgattctaaaacattgagaatttatagacataaagcaccatgcataatgacttttgtctctgatcataatcatccgaaattttctttgtattttcaacaatctgtgatctacaattctcaagttaatttacttgatgatgttgaattgataattttagataagaagaactcttttatggctataattttaaaagatttgaaaaaggtcaagatgatattggacgtgaataactcttctatcaacattaacacgaacatcttgatatggtccactgcaagctccgcttctaataaaaaaataaagtctattaaaagattcttgttgatgtcttattcttcttctataaaagtcgaaattttagatcataaagagcagattttggaaagattgaaacatttgattcatcctatttcttcttcttctccttctttgaacatggaaagggcaataaactccactaaaaatgcattcgactctttaagacttaaaaaaactaaactttctactaatgatgatgaaagtccgcaaattcatactcatttcttatctaacaaacctcatggtttgcaatccttaacaaaaaggactcgtattgccagccttgggaaaaaagagcattccatatctgttccaaaatctaatatttctccctctgatttctacaacactaacgggacagaaactttacaatcccacgcagtttctcaattgagacgttccaatagatttaaagatgtttctgatccagcaaacagtaatagtaattctgaatttgatgatgcaactacggaatttgaaacaccagaattatttaaacctagcctctgttacaaattcaacgatggttccagctatactataacaaatcaagatttcaagtgtcttttcaataaggattgggttaatgatagcattttggatttttttacaaaattttacattgaaagctctattgaaaagtctattatcaaaagagagcaagttcacttaatgtcctcttttttttacacgaaattgattagtaatccagcagattattattctaatgtaaaaaagtgggttaacaatactgatttgttttctaaaaagtacgttgttataccaattaacataagttatcattggtttagttgcattataacaaacttggatgcgatcttggattttcatcaaaacaaagataaaaacgatgccatcaactccgatgagatttctataaataatcctttggttaatattttgactttcgactctttgaggcaaactcattccagagaaattgatccaataaaagaatttctcatatcctatgcacttgataaatattctattcaattggataaaacacaaatcaaaatgaaaacgtgtccagttccacaacaacctaatatgagcgattgtggtgttcatgttattttgaatattagaaaattttttgaaaatccggtggaaacaattgatgtatggaagaattctaagattaaaagtaagcacttcaccgcaaaaatgattaataaatattttgataaaaatgaaagaaatagtgcgagaaagaatttaaggcatactttgaaactcttacaactcaattacatcagctatttgaaaaaagaaaatttatatgaagaagttatgcaaatggaggagaaaaaaagcaccaatatcaacaataatgaaaattacgacgatgacgatgaagaaattcaaatcattgaaaatatagatcaaagcagtaaagataataacgcgcagttaaccagtgaacctccctgctctagaagttccagtatttctacaacagaaagagagccgacagagttgcataattccgtagtaagacagcccaccggtgaaataataactgataatgaagatcccgttcgcgctgcttctccagaaacagcatccgtttctcctcccatacgtcacaatattttaaagagttcttctcctttcatatctgaaagtgcgaatgaaactgaacaagaagaatttacgtctccatactttggaaggccgtctttaaagacgagggctaagcagtttgaaggcgtttcttctccaataaaaaacgatcaagccttgtcttccacccatgatattatgatgccgtctcctaaacctaaaaggatttacccaagcaaaaaaatcccacaactttcctctcatgttcaatctttatctactgattctatggaacgccaatctagtcccaataataccaacattgtaatttctgatacagaacaagatagtaggttaggagtgaattctgaaagtaaaaatactagtggtattgttaacagggatgacagtgacgtcaatttaattggtagttctttgcctaatgtagcggaaaaaaatcatgacaacactcaggaaagtaatggtaataatgacagtcttggtaaaatacttcaaaatgttgacaaagaattgaacgaaaagttggttgatattgatgatgtggcatttagtagtccaactaggggtattccaagaaccagcgcgacaagcaagggaagtaatgcacaacttctctctaattatggagatgaaaataaccagtctcaagattctgtttgggatgagggcagagataatcctatactcttggaagatgaagacccttga

SEQ ID NO: 5567 - DNA, 3960 bp, Saccharomyces cerevisiae
atggatgttgattctgacgttaatgtctccaggttaagagatgaactgcataaggtggcaaacgaggaaacagataccgccactttcaatgatgatgcgccatccggcgccacctgccgtatttgtcgtggagaagctactgaggacaatcctcttttccatccttgtaaatgcaggggctcaattaaatacatgcatgaatcctgtctgttggaatgggtagcttcaaaaaatatagacatttcaaaaccaggcgcggatgttaaatgtgacatctgtcactatcccattcaattcaaaacgatatatgcggaaaacatgcccgaaaagatacctttttctttactactatccaagagcatcttgacatttttcgaaaaagctcgtttggctttaacgattggtttggccgctgtactatatattatcggtgttcctttggtatggaacatgtttggaaaattatacaccatgatgctagatggatcatccccttatcctggtgatttcctaaagagtttgatttatggttatgatcagtcagcaactccagaattaaccacgagagcaattttttaccaacttttacaaaaccattcgtttacgtctttacaatttattatgatagtgatactacatatagcattgtactttcaatacgatatgatagtaagagaggatgttttcagtaaaatggttttccacaagataggtccaagattatctcccaaggacttgaaatcacgtttgaaggaaagattccccatgatggatgatagaatggttgaatatttagcgagggaaatgagagctcatgacgaaaatcgtcaagagcaaggtcatgatagactgaacatgccagccgcagcagcagataataataataatgttattaatcccagaaacgataacgttccacctcaggatcctaatgaccatcggaattttgaaaaccttcgccacgtagacgaattagatcatgatgaggctacggaagagcacgagaacaacgactctgacaatagtttaccatcaggtgatgattcgtcacgaattttaccggggtcttcaagtgacaacgaagaagatgaagaagcagaggggcaacagcaacagcagcaaccagaagaagaggcagattaccgtgatcatatagagcccaatccgattgacatgtgggcaaatcgtcgtgcgcaaaatgaatttgatgacctaatcgctgctcaacagaacgcaataaacaggcccaacgctccggttttcatcccaccacctgcccaaaacagagctggaaatgtcgatcaagacgaacaagactttggcgcagctgttggtgtgccaccagcacaggctaacccagacgatcaaggacaaggccctctagtgataaatctcaaattgaaattgttgaatgtcattgcttatttcataattgccgtagttttcaccgcaatatacctggcaatttcctatttgtttccaacttttattgggttcggtttgttgaaaatttattttggtatatttaaggttattttgcgtgggttgtgccatctttactacttgtctggcgctcatatagcttacaatgggctgacgaaactggtccctaaagtagatgtcgcgatgagttggatttcagaccacttaattcatgacatcatttatctttacaacggctacactgaaaacaccatgaagcactcaattttcatcagagctttacctgctttaacgacgtatctaacctcagtcagtatcgtttgtgcttcatccaatcttgtctcgaggggttatggccgtgagaacggaatgagcaaccctactagaaggctgattttccagattttatttgcactcaaatgcactttcaaggtgttcactttatttttcatcgaattggctggattccccattctagctggtgtaatgctagatttctcattattttgcccaatcctggcatccaatagtcggatgctttgggttccttcaatatgcgcaatatggcctccattttcccttttcgtatactggacgattggtactctctacatgtattggtttgccaaatatatcggaatgattaggaaaaatatcattagaccaggtgttctattctttatcagatctccagaagatcctaatattaagatcttgcatgatagtttaattcatccgatgagtattcaattatcaaggctttgcttatccatgtttatttatgcgatttttattgtcttaggttttggcttccatactagaatttttttcccattcatgctcaaatcgaacttattatccgttcctgaagcttataaaccaacatcaattatttcatggaagttcaatacaattttgctaactttatattttacgaagaggatcctggagtctagctcttacgttaaacccttattggaaaggtattggaaaacaatttttaagttatgttcaagaaaattacgtttatcatcctttatcttaggtaaagataccccaacagagagaggccatattgtttaccgcaatttgttttacaagtacattgctgccaagaatgcagaatggtcaaaccaagaacttttcactaaaccaaagactctagaacaagcagaagaattgtttgggcaagttcgtgacgttcatgcttattttgtccccgatggcgttttaatgcgtgttccttcttctgatatagtatccagaaattatgtacaaacaatgtttgtccccgttacaaaggatgataagctgttgaaaccattagatttggaaagaattaaagagagaaacaaacgtgctgctggtgaatttggttatttagacgaacaaaacacggaatatgatcaatattatatcgtttacgtccctccagatttccgtttacgctatatgacattgcttggcctggtttggttatttgcttccattttaatgcttggtgttacatttattagtcaagctttaataaactttgtttgtagtttcggctttcttccagtcgtaaagctattgttaggtgaaagaaataaggtctatgttgcatggaaggaactctctgacattagctactcctatttgaacatttattatgtctgtgtcggatctgtttgtttatccaagattgctaaggatattcttcattttacagaaggccaaaacactctcgatgaacatgccgttgacgaaaacgaagtagaggaagtggaacacgatataccagagagagatatcaacaatgcccctgttaataatatcaataatgtggaagagggtcaaggaattttcatggccatctttaacagtatatttgatagtatgttggtgaagtataacctgatggtgtttatagctatcatgattgcggttattagaactatggtttcgtgggtcgtcttaaccgatggtatactagcctgttacaattatctcaccatcagagtgtttggcaattcttcatacactattggtaattccaaatggtttaaatatgacgagagtttgttattcgtcgtttggatcatttcgtcaatggtcaatttcggaaccggatataagtcattgaaactatttttcagaaacagaaatactagtaaattgaacttcttgaaaacaatggctttggaactgtttaaacaaggtttcctgcacatggtaatttacgtcttgccgattattattttatccttagtatttttacgtgatgtttctacaaagcagattatcgatattagccatggatccaggagtttcactttatcgcttaacgaatcattcccaacatggacaaggatgcaagatatttatttcggactactgatagcattagagtcatttacgttctttttccaagcaactgtgctgttcattcaatggttcaaaagtactgtacagaatgtaaaagacgaggtttacactaagggtagagctttagaaaatttaccagatgaaagttaa

SEQ ID NO: 5568 - DNA, 3960 bp, Artificial Sequence
  Description of Artificial Sequence: Synthetic polynucleotide
atggatgttgattctgacgttaatgtctccaggttaagagatgaattacataaggtggcaaacgaggaaacagataccgccactttcaatgatgatgcgccatccggcgccacctgccgtatttgtcgtggagaagctactgaggacaatcctcttttccatccttgtaaatgcaggggctccattaaatacatgcatgaatcctgtttgttggaatgggtagcttccaaaaatatagacatttccaaaccaggcgcggatgttaaatgtgacatctgtcactatcccattcaattcaaaacgatatatgcggaaaacatgcccgaaaagatacctttttctttattattatccaagagcatcttgacatttttcgaaaaagctcgtttggctttaacgattggtttggccgctgtattatatattatcggtgttcctttggtatggaacatgtttggaaaattatacaccatgatgcttgatggatcttccccttatcctggtgatttcttgaagagtttgatttatggttatgatcagtctgcaactccagaattaaccacgagagcaattttttaccaacttttacaaaaccattcttttacgtctttacaatttattatgatagtgatattacatatagcattgtactttcaatacgatatgatagtaagagaggatgttttcagtaaaatggttttccacaagataggtccaagattatctcccaaggacttgaaatctcgtttgaaggaaagattccccatgatggatgatagaatggttgaatatttagcgagggaaatgagagctcatgacgaaaatcgtcaagagcaaggtcatgatagattgaacatgccagccgcagcagcagataataataataatgttattaatcccagaaacgataacgttccacctcaggatcctaatgaccatagaaattttgaaaaccttcgccacgtagacgaattagatcatgatgaggctacggaagagcacgagaacaacgactctgacaatagtttaccatctggtgatgattcttctagaattttaccggggtcttccagtgacaacgaagaagatgaagaagcagaggggcaacagcaacagcagcaaccagaagaagaggcagattaccgtgatcatatagagcccaatccgattgacatgtgggcaaatcgtcgtgcgcaaaatgaatttgatgacttgatcgctgctcaacagaacgcaataaacaggcccaacgctccggttttcatcccaccacctgcccaaaacagagctggaaatgtcgatcaagacgaacaagactttggcgcagctgttggtgtgccaccagcacaggctaacccagacgatcaaggacaaggccctttagtgataaatctcaaattgaaattgttgaatgtcattgcttatttcataattgccgtagttttcaccgcaatatacttggcaatttcctatttgtttccaacttttattgggttcggtttgttgaaaatttattttggtatatttaaggttattttgcgtgggttgtgccatctttactacttgtctggcgctcatatagcttacaatgggcttacgaaattggtccctaaagtagatgtcgcgatgagttggatttctgaccacttaattcatgacatcatttatctttacaacggctacactgaaaacaccatgaagcactctattttcatcagagctttacctgctttaacgacgtatttgacctctgtcagtatcgtttgtgcttcttccaatcttgtctccaggggttatggccgtgagaacggaatgagcaaccctactagaaggttgattttccagattttatttgcactcaaatgcactttcaaggtgttcactttatttttcatcgaattggctggattccccattttggctggtgtaatgcttgatttctctttattttgcccaatcttggcatccaatagtagaatgctttgggttccttccatatgcgcaatatggcctccattttcccttttcgtatactggacgattggtactctctacatgtattggtttgccaaatatatcggaatgattaggaaaaatatcattagaccaggtgttttgttctttatcagatctccagaagatcctaatattaagatcttgcatgatagtttaattcatccgatgagtattcaattatctaggctttgcttatccatgtttatttatgcgatttttattgtcttaggttttggcttccatactagaatttttttcccattcatgctcaaaagtaacttattatccgttcctgaagcttataaaccaacatccattatttcttggaagttcaatacaattttgttgactttatattttacgaagaggatcttggagtctagctcttacgttaaacccttattggaaaggtattggaaaacaatttttaagttatgttccagaaaattacgtttatcttcctttatcttaggtaaagataccccaacagagagaggccatattgtttaccgcaatttgttttacaagtacattgctgccaagaatgcagaatggagcaaccaagaacttttcactaaaccaaagactttggaacaagcagaagaattgtttgggcaagttcgtgacgttcatgcttattttgtccccgatggcgttttaatgcgtgttccttcttctgatatagtatccagaaattatgtacaaacaatgtttgtccccgttacaaaggatgataagttgttgaaaccattagatttggaaagaattaaagagagaaacaaacgtgctgctggtgaatttggttatttagacgaacaaaacacggaatatgatcaatattatatcgtttacgtccctccagatttccgtttacgctatatgacattgcttggccttgtttggttatttgcttccattttaatgcttggtgttacatttattagtcaagctttaataaactttgtttgtagtttcggctttcttccagtcgtaaagttgttgttaggtgaaagaaataaggtctatgttgcatggaaggaactctctgacattagctactcctatttgaacatttattatgtctgtgtcggatctgtttgtttatccaagattgctaaggatattcttcattttacagaaggccaaaacactctcgatgaacatgccgttgacgaaaacgaagtagaggaagtggaacacgatataccagagagagatatcaacaatgcccctgttaataatatcaataatgtggaagagggtcaaggaattttcatggccatctttaacagtatatttgatagtatgttggtgaagtataacttgatggtgtttatagctatcatgattgcggttattagaactatggtttcctgggtcgtcttaaccgatggtatattggcctgttacaattatctcaccatcagagtgtttggcaattcttcctacactattggtaattccaaatggtttaaatatgacgagagtttgttattcgtcgtttggatcatttcttctatggtcaatttcggaaccggatataagtctttgaaattatttttcagaaacagaaatactagtaaattgaacttcttgaaaacaatggctttggaattatttaaacaaggtttcttgcacatggtaatttacgtcttgccgattattattttatccttagtatttttacgtgatgtttctacaaagcagattatcgatattagccatggatccaggagtttcactttatctcttaacgaatctttcccaacatggacaaggatgcaagatatttatttcggacttttgatagcattagagtcttttacgttctttttccaagcaactgtgcttttcattcaatggttcaaaagtactgtacagaatgtaaaagacgaggtttacactaagggtagagctttagaaaatttaccagatgaaagttga

SEQ ID NO: 5569 - DNA, 429 bp, Saccharomyces cerevisiae
atgcggttaattttcattgcgaaaatgcttcaatattcatttctaccattttccccgttcaatcttttgaattttgataatagtataagcgtaagctggtttataacatactcagtgatcgtttccatttgggggtttgctgtgtggattgaaggagcatataggaataagattaatctacagcttccaagatgtacgaagataaaatgctcccgctacaatacgagaataaaatcccccaagtggttcaactgtaaaaattggatgcattttttcctattatacctttttctaaccgcttctaacttaattgttcaattggcctatttttcaaaagaaatgtgtagtcagggtataaacgttcctggaacgaagaaaccaggtaatagagtttatttatcggttatcatactaatggggaacgggtga

SEQ ID NO: 5570 - DNA, 429 bp, Artificial Sequence
  Description of Artificial Sequence: Synthetic polynucleotide
atgagattaattttcattgcgaaaatgcttcaatattcttttttaccattttccccgttcaatcttttgaattttgataatagtataagcgtaagctggtttataacatactctgtgatcgtttccatttgggggtttgctgtgtggattgaaggagcatataggaataagattaatttacagcttccaagatgtacgaagataaaatgctcccgctacaatacgagaataaaatcccccaagtggttcaactgtaaaaattggatgcattttttcttattatacctttttttaaccgcttctaacttaattgttcaattggcctatttttccaaagaaatgtgtagtcagggtataaacgttcctggaacgaagaaaccaggtaatagagtttatttaagtgttatcatattaatggggaacgggtga

SEQ ID NO: 5571 - DNA, 426 bp, Saccharomyces cerevisiae
atgtcgtttgtttccaagcttctctatacagtctctgcattggtgttatttcattctggtttctcaagctatgagtttcatcacttattaaaacttaactcgcttaataatgcacaaggtgcaatcagcaagttacctaaagatatcatgtatgaaacgtatgcaggattgatactctttgttcttgcagtgttcacttcgttcgagaaattacaatatttaccaattgagagtaacgatgggaagataatatcccaaggaaactatctaaaagaaatcgcattaaataaagccaccaacgtggataacttgataggaagtaaccctaatggtgagatcatatttactccaagctttgttgacgttcatatgaagagaaaaatttgcagggaatgggcctctaacactgtaaaaaaagaaaaataa

SEQ ID NO: 5572 - DNA, 426 bp, Artificial Sequence
  Description of Artificial Sequence: Synthetic polynucleotide
atgagttttgtttccaagcttctctatacagtctctgcattggtgttatttcattctggtttcagtagctatgagtttcatcacttattaaaacttaactctcttaataatgcacaaggtgcaatcagcaagttacctaaagatatcatgtatgaaacgtatgcaggattgatactctttgttcttgcagtgttcacttctttcgagaaattacaatatttaccaattgagagtaacgatgggaagataatatcccaaggaaactatttgaaagaaatcgcattaaataaagccaccaacgtggataacttgataggaagtaaccctaatggtgagatcatatttactccaagctttgttgacgttcatatgaagagaaaaatttgcagggaatgggcctctaacactgtaaaaaaagaaaaatga

SEQ ID NO: 5573 - DNA, 3453 bp, Saccharomyces cerevisiae
atgactgctgtgcgtcgctcaactagaataaggactaaatctcaagttattgaggaagattacgatgacgagcaaaacaccagcgcacaacacgtagaatctgataagatcactgccaaaacgcaacatgaagaagaagaagagcaagatactggtgaaagtgaagaaagtagtagtgaggatgactatgaagaccaggatgatgatgactacgtagataccgctacggcaaagagaaagtctagaaagagaaagcccaaatcagcatcaaataccagtagtaaaaggcagaagaaaaaacctacttctgcccagaagtcggcggtatctcatgcgcctgcttatcaccgctctaaaaaagatcaggatcaatacttagaaattgcgaaggatttccaacctacagaattgtttgatatattatccacttcagaagatgtttctattgaagaactattgcgagaatggttagaaacctattctgaaaatagagataaatttttacaagaatttatcaatttgctattgaattgttgtggctccgtcgctcgcgtcgaagaccacgacgttcacagcaatgaatcttctaacgaaacgattggtgaaattcagttgctatttcaaagacagaaactgcacgaattttacctcttgattagcaaggaaaacaaaaagagaaaaaactttaaaatgggtcccctttatcaaaatttcgcggaattcatgactaaattgttggaagtggcaaatgacttacaattactatacgtggaatcggacgaagatgatacccaaatagttactggtaatcttgtgttggatttgttgacttggctgtcttctttttcagtttgcaaaatcagatgcttcagatacatttctacgctaacgctatatcttttccaggactatttgacccaacaggctgttaatttagaaaagaattatttggcgaagttatccaagcagttatcactagaagagaagaaaaaaaggcccaataacaagactttagaaaagctagagagcactatcgccgaaactcaaggcagcaaagtcgttattgatagcattatcgataacatcgtcaaactatgttttgtgcataggtataaggacgtgtctgatttgattcgttcagaatccatgttgcatctatccatctggattaaaaactatcccgaatatttcctcaaggttacatttttaaaatattttggctggctgctgagcgataactctgtatcagtcagattacaagttacgaagattttaccgcatttaataatccaaaatcataacagtaaatccactgataattccgctatacgccaagtatttgaacgcttcaaaactaagatcctggaagtggcaatccgtgacgttaatcttgatgtaaggatccatagtatccaagttctaacggaggcgtcatcattgggctatttagatgattctgagattcttatcatttctagtttaatgttcgatgaagagttcgacccatttaaaacatcctcattcaataaaagatccaaatttctatccacggtggccaaattcttagcaagagtaataaaagagaaatttgacgaattcatcaagacgcatgaagacttgcccaaagaagtcgacgggttagaagttggacccgttgttcaagtcggtatatttatcaagattctgaatgactctttaatttatcacttgaaggattgcgctgaagttgattcaaggacaaagatccgtatgctaacacaagcagcagagtttttgtctccttacatttccactcacttgaaaactatttgcaatctgctgatctctgacactgaatcaaatgaactgatccaaaagttacaaaactcggccaataataacagcgatgacgaggatgttgacgatgaggaattggacatcactccattgtttcccattgacagaaatagcactattttatatctgaacgtattccacggtctgtgtgcaggtgccaacaaccccaaaatccaaactaaggacagcgttaaggaaatagttttgcctttattctacgatttgttgaatgccgcatccatcgaatctgctgatattctgtgtcctctcctagagagctttatcacattttctctggatgattggatatctattggatatgaaactgaattaaaaaaaattaccgacaaaactattaaagcatttatggattctacaatcgggaattcaaaagttgacatgaagtacgatatatttgctaaattcattcaccatatccatcattttgaaaaaaaggaactgcaggaaaaatttttaaaccagatagctacattgaaaattcatttaaaaaaatttctacaggaaaaaatggatccaaataattctagggacgactacaaagatttaacttgttctttgtacgagctctacatcaataaactgacaattcttggcagggattacccaatcgaggttgatgaagagttgttgcaactgtttttgaacaattttgtttcccgtatccctataatgtttcaagattttgatgatagtaccgctcaagaaataaactttaaaatgctagtgttattagccacatggaatctggaaaaatggagagaaataatagagaaagtaagggattacgagaattctatttcaaaagatcttagatcagtttggaaaccaattgccgctataataggtcgtctaaacacactcgttatttcattggcggctacaaacgaaacatttgaaaacataaacagcttgttttacttaaaatggtcagcttgcacttcattaatggatataatcgttgcaataaaaatatttgagctcaaattgcctgcagacgctacaacatggagatatagtatgagtgaacaatttccattttaccttcacgataatgcttccaaagtgcttttgaaaatatttttatatttggagagtcttttcgctaagcaagttgacgtccaattagaaagggtagcagatgaagacgccaacctaaatgatttgccggaaaccgggtttttcgagaatattgaaactgaattccttttattcacagttaaattgaagggactaatgaaactgaatattttagatgaacgatttgcttcccgtgtggcactaaacaaagaaaagcttggcccgctgttcaaaaaaatcgtagatgataccataatggaaaatccagaacctaataaaaagaacatacagaaagcaaaatcaaatcaaacacagagggaaaaagcgcctttacaacccaacagtgaacgagaaaccgaccatgcaaatactgaaaataatgatccagatattcccatgacaatcgatctagaacctattgaagaaagttcgcaaaataattcagagttagcaccaattgaggaacacccaaccgtggtagatgctatagacaacagcgacgaaatcacacaagattaa

SEQ ID NO: 5574 - DNA, 3453 bp, Artificial Sequence
  Description of Artificial Sequence: Synthetic polynucleotide
atgactgctgtgcgtcgctccactagaataaggactaaatctcaagttattgaggaagattacgatgacgagcaaaacaccagcgcacaacacgtagaatctgataagatcactgccaaaacgcaacatgaagaagaagaagagcaagatactggtgaaagtgaagaaagtagtagtgaggatgactatgaagaccaggatgatgatgactacgtagataccgctacggcaaagagaaagtctagaaagagaaagcccaaatctgcatctaataccagtagtaaaaggcagaagaaaaaacctacttctgcccagaagtctgcggtatctcatgcgcctgcttatcaccgctctaaaaaagatcaggatcaatacttagaaattgcgaaggatttccaacctacagaattgtttgatatattatccacttctgaagatgtttctattgaagaattattgagagaatggttagaaacctattctgaaaatagagataaatttttacaagaatttatcaatttgttgttgaattgttgtggctccgtcgctcgcgtcgaagaccacgacgttcacagcaatgaatcttctaacgaaacgattggtgaaattcagttgttatttcaaagacagaaattacacgaattttacctcttgattagcaaggaaaacaaaaagagaaaaaactttaaaatgggtcccctttatcaaaatttcgcggaattcatgactaaattgttggaagtggcaaatgacttacaattattgtacgtggaaagtgacgaagatgatacccaaatagttactggtaatcttgtgttggatttgttgacttggttatcttctttttctgtttgcaaaatcagatgcttcagatacatttctacgttaacgctttatcttttccaggactatttgacccaacaggctgttaatttagaaaagaattatttggcgaagttatccaagcagttaagtttagaagagaagaaaaaaaggcccaataacaagactttagaaaagttggagagcactatcgccgaaactcaaggcagcaaagtcgttattgatagcattatcgataacatcgtcaaattatgttttgtgcataggtataaggacgtgtctgatttgattcgttctgaatccatgttgcatttgtccatctggattaaaaactatcccgaatatttcctcaaggttacatttttaaaatattttggctggttgttgagcgataactctgtaagtgtcagattacaagttacgaagattttaccgcatttaataatccaaaatcataacagtaaatccactgataattccgctatacgccaagtatttgaacgcttcaaaactaagatcttggaagtggcaatccgtgacgttaatcttgatgtaaggatccatagtatccaagttttgacggaggcgagttctttgggctatttagatgattctgagattcttatcatttctagtttaatgttcgatgaagagttcgacccatttaaaacatccagtttcaataaaagatccaaatttctttccacggtggccaaattcttagcaagagtaataaaagagaaatttgacgaattcatcaagacgcatgaagacttgcccaaagaagtcgacgggttagaagttggacccgttgttcaagtcggtatatttatcaagattttgaatgactctttaatttatcacttgaaggattgcgctgaagttgatagtaggacaaagatccgtatgttaacacaagcagcagagtttttgtctccttacatttccactcacttgaaaactatttgcaatttattgatctctgacactgaaagtaatgaattgatccaaaagttacaaaactctgccaataataacagcgatgacgaggatgttgacgatgaggaattggacatcactccattgtttcccattgacagaaatagcactattttatatttgaacgtattccacggtttgtgtgcaggtgccaacaaccccaaaatccaaactaaggacagcgttaaggaaatagttttgcctttattctacgatttgttgaatgccgcatccatcgaatctgctgatattctttgtcctctcttggagagctttatcacattttctttagatgattggatatctattggatatgaaactgaattaaaaaaaattaccgacaaaactattaaagcatttatggattctacaatcgggaattctaaagttgacatgaagtacgatatatttgctaaattcattcaccatatccatcattttgaaaaaaaggaattacaggaaaaatttttaaaccagatagctacattgaaaattcatttaaaaaaatttttgcaggaaaaaatggatccaaataattctagggacgactacaaagatttaacttgttctttgtacgagctctacatcaataaattaacaattcttggcagggattacccaatcgaggttgatgaagagttgttgcaattatttttgaacaattttgtttcccgtatccctataatgtttcaagattttgatgatagtaccgctcaagaaataaactttaaaatgttggtgttattagccacatggaatttggaaaaatggagagaaataatagagaaagtaagggattacgagaattctatttccaaagatcttagatctgtttggaaaccaattgccgctataataggtcgtttgaacacactcgttatttctttggcggctacaaacgaaacatttgaaaacataaacagcttgttttacttaaaatggagtgcttgcacttctttaatggatataatcgttgcaataaaaatatttgagctcaaattgcctgcagacgctacaacatggagatatagtatgagtgaacaatttccattttaccttcacgataatgcttccaaagtgcttttgaaaatatttttatatttggagagtcttttcgctaagcaagttgacgtccaattagaaagggtagcagatgaagacgccaacttgaatgatttgccggaaaccgggtttttcgagaatattgaaactgaattccttttattcacagttaaattgaagggattaatgaaattgaatattttagatgaaagatttgcttcccgtgtggcattgaacaaagaaaagcttggcccgcttttcaaaaaaatcgtagatgataccataatggaaaatccagaacctaataaaaagaacatacagaaagcaaaatctaatcaaacacagagggaaaaagcgcctttacaacccaacagtgaaagagaaaccgaccatgcaaatactgaaaataatgatccagatattcccatgacaatcgatttggaacctattgaagaaagttctcaaaataattctgagttagcaccaattgaggaacacccaaccgtggtagatgctatagacaacagcgacgaaatcacacaagattga

SEQ ID NO: 5575 - DNA, 570 bp, Saccharomyces cerevisiae
atgtccaattttttacttgtgatccctgaagacgtgatcaagggctgctccaaggcagataaactagttgttacaggagaattcgataactggagacattccgattatgttctgcagtatgacggcagcacacagaactacagggtgcaaattcccagaagaaagggccaacgtagcaccatgttcaaagtggtgataaacgacaaaaaatgggtcactctcaactacttcgacactgtcacagacaagtcaggttacaccaacaatattctccactttaaggacaatgaggccagtcaactcatggatatacctctatcaccacatacacggtccaacaccgcaaaagggaaaccggaagacgactctttaaatgattatgtcaacttgtcgtcacatagtgacctaagcagcacagaggagatagtgtgctggaattctgatatggaggacgaaaacatggatgcaaccatccagtgtgatttccatcaggcgttcaatagcaggaaagagtctctaaatgggctaatgtgcattgccaagaaagtcaagacgtactggaacaaatag

SEQ ID NO: 5576 - DNA, 570 bp, Artificial Sequence
  Description of Artificial Sequence: Synthetic polynucleotide
atgtccaattttttacttgtgatccctgaagacgtgatcaagggctgctccaaggcagataaattggttgttacaggagaattcgataactggagacattccgattatgttttacagtatgacggcagcacacagaactacagggtgcaaattcccagaagaaagggccaacgtagcaccatgttcaaagtggtgataaacgacaaaaaatgggtcactctcaactacttcgacactgtcacagacaagtctggttacaccaacaatattctccactttaaggacaatgaggccagtcaactcatggatatacctttatctccacatacaagatccaacaccgcaaaagggaaaccggaagacgactctttaaatgattatgtcaacttgagttctcatagtgacttgagcagcacagaggagatagtgtgctggaattctgatatggaggacgaaaacatggatgcaaccatccagtgtgatttccatcaggcgttcaatagcaggaaagagtctttgaatgggttgatgtgcattgccaagaaagtcaagacgtactggaacaaatga

SEQ ID NO: 5577 - DNA, 1041 bp, Saccharomyces cerevisiae
atgaaggcgtcgcacatttgctcttatttgctaagcattgcacccctagtggtgtcccatggagtacatcataatcgagatcatggccacgaggcaaaccatgagtccaagcaaagtttcttgattttgaagcaagaatccattttttactctctagtttgctttctgcagaaccacctctttgtcctgggaccccgttacaatgcgattgtggctatcctaatcatacaacttatgccgtgtcttttcgtactgtttgttcctggactgcgcaagaacgatcgtgccagcttgacactgtccttactagtttccttttctctaggaacactcctgggtgatattttattacacgtgatacctgaaagtctcagcggcgtaactgatgtcacaatggttggaggagccatatttctggggtttataagcttcttgactctggataaaacgatgcgtattctgtcagggacgtccaacgatgacggcagcatacattctcattctcatagtcatactccacaacaaactgcagagaagaaagcgggctttaacatgtctgcgtatctgaatgtcatatccggcattgctcatcacatcacggatggcatagcgctggctacgtcattctatagttccacacaagttggcataatgaccagcatagctgtcactttccatgagatccctcatgagctaggtgacttcgccattctgctttccagtgggtttacgttcccacaagcgataagagcccaagcggtgacagctttcggcgccgtcgttggaacgtccattggctgctggatgaacgaaatcgggaacaacagccataaagcaacgtcttcatccgcgaacgcatctgaacttatgctgccgttcacggcgggcggcctcatatacatagccactactagcgttgtaccgcagatcttacatagctccgcacccgatagcaagcttcgagagtttaagaagtgggccttgcagctagtcttcatttttgtaggatttgccgttatggcgctcatggatgagcattga

SEQ ID NO: 5578 - DNA, 1041 bp, Artificial Sequence
  Description of Artificial Sequence: Synthetic polynucleotide
atgaaggcgtcccacatttgctcttatttgttgagcattgcacccttagtggtgtcccatggagtacatcataatagagatcatggccacgaggcaaaccatgagtccaagcaaagtttcttgattttgaagcaagaatccattttttactctttggtttgctttttgcagaaccacctctttgtccttggaccccgttacaatgcgattgtggctatcttaatcatacaacttatgccgtgtcttttcgtattatttgttcctggattacgcaagaacgatcgtgccagcttgacattatccttattggtttccttttctttgggaacactcttaggtgatattttattacacgtgatacctgaaagtctcagcggcgtaactgatgtcacaatggttggaggagccatatttttggggtttataagcttcttgactttagataaaacgatgcgtattttaagtgggacgtccaacgatgacggcagcatacattctcattctcatagtcatactccacaacaaactgcagagaagaaagcgggctttaacatgtctgcgtatttgaatgtcatatccggcattgctcatcacatcacggatggcatagcgttagctacgtccttctatagttccacacaagttggcataatgaccagcatagctgtcactttccatgagatccctcatgagttaggtgacttcgccattttactttccagtgggtttacgttcccacaagcgataagagcccaagcggtgacagctttcggcgccgtcgttggaacgtccattggctgctggatgaacgaaatcgggaacaacagccataaagcaacgtcttcttccgcgaacgcatctgaacttatgttaccgttcacggcgggcggcctcatatacatagccactactagcgttgtaccgcagatcttacatagctccgcacccgatagcaagcttcgtgagtttaagaagtgggccttgcagttggtcttcatttttgtaggatttgccgttatggcgctcatggatgagcattga

SEQ ID NO: 5579 - DNA, 1296 bp, Saccharomyces cerevisiae
atgcacagatccacttttatcaggacgtccggcacgagctctaggacactaaccgcaaggtacagatcgcagtacacaggattactcgttgcccgagtattattctccacctctacgacccgtgcgcaaggtggaaaccctcgatcaccactccagattttccgcgatacattcaagaaggaatgggagaagtctcaggaactgcaggagaacataaagacgctgcaagatgcttcgggaaagttaggcgagtctgaggcctacaaaaaggctagggaagcatatttgaaagctcagagaggctccacaattgtgggtaaaactctgaaaaagaccggtgagaccatggaacatatagccactaaggcctgggagtccgaactcggtaagaacacaagaaaggcggctgccgccacggcgaagaagctggatgagagttttgagccagtgagacagacgaagatttacaaggaagtctcagaagtcattgacgatggggagagttcccgatacggtgggtttatcacgaaagagcaaaggagacttaaacgtgagagagacctggcctctgggaaaagacacagggcagtaaagagcaatgaagatgcaggaacagcagtggttgcgacaaatatcgagtctaaagaatcgtttggtaagaaagtggaggatttcaaggagaaaaccgtggttggccgttctatacaatctttaaagaacaaattgtgggatgaaagtgaaaaccccttaattgttgtcatgaggaaaataaccaacaaagtgggcggtttctttgcagaaacagaatcctcccgtgtttacagtcaatttaagctaatggacccaaccttttcgaacgaaagcttcaccagacacttaagagaatacattgttcccgagattctcgaagcgtatgtgaaaggcgatgtcaaagttctcaaaaaatggttcagcgaggcgccattcaatgtttacgccgcccaacagaaaatcttcaaagaacaggatgtttacgccgatggccgtatcctagatatcaggggcgttgaaatagtgagtgcaaagttattggctccccaagacatcccagtcttggtggtcgggtgtagagcacaagaaatcaacctttacaggaaaaagaaaactggcgagattgcggctggtgacgaagctaatatcttgatgagctcttatgccatggttttcaccagagacccagagcaaatcgacgatgacgaaacagaagggtggaagatcttggagtttgtgcgcgggggttctagacaattcacctga

SEQ ID NO: 5580 - DNA, 1296 bp, Artificial Sequence
  Description of Artificial Sequence: Synthetic polynucleotide
atgcacagatccacttttatcaggacgtccggcacgagctctaggacattaaccgcaaggtacagaagccagtacacaggattactcgttgcccgtgtattattctccacctctacgacccgtgcgcaaggtggaaaccctagatctccactccagattttccgcgatacattcaagaaggaatgggagaagtctcaggaattacaggagaacataaagacgttacaagatgcttctggaaagttaggcgagtctgaggcctacaaaaaggctagggaagcatatttgaaagctcagagaggctccacaattgtgggtaaaactttgaaaaagaccggtgagaccatggaacatatagccactaaggcctgggagtccgaactcggtaagaacacaagaaaggcggctgccgccacggcgaagaagttggatgagagttttgagccagtgagacagacgaagatttacaaggaagtcagtgaagtcattgacgatggggagagttccagatacggtgggtttatcacgaaagagcaaaggagacttaaacgtgagagagacttggcctctgggaaaagacacagggcagtaaagagcaatgaagatgcaggaacagcagtggttgcgacaaatatcgagtctaaagaaagttttggtaagaaagtggaggatttcaaggagaaaaccgtggttggccgttctatacaatctttaaagaacaaattgtgggatgaaagtgaaaaccccttaattgttgtcatgaggaaaataaccaacaaagtgggcggtttctttgcagaaacagaatcctcccgtgtttacagtcaatttaagttgatggacccaaccttttccaacgaaagcttcaccagacacttaagagaatacattgttcccgagattctcgaagcgtatgtgaaaggcgatgtcaaagttctcaaaaaatggttcagcgaggcgccattcaatgtttacgccgcccaacagaaaatcttcaaagaacaggatgtttacgccgatggccgtatcttagatatcaggggcgttgaaatagtgagtgcaaagttattggctccccaagacatcccagtcttggtggtcgggtgtagagcacaagaaatcaacctttacaggaaaaagaaaactggcgagattgcggctggtgacgaagctaatatcttgatgagctcttatgccatggttttcaccagagacccagagcaaatcgacgatgacgaaacagaagggtggaagatcttggagtttgtgcgcgggggttctagacaattcacctga

SEQ ID NO: 5581 - DNA, 957 bp, Saccharomyces cerevisiae
atgagtgaagaaggtcctcaagttaaaataagagaagctagtaaagataacgtcgactttatactatccaatgtggatttggctatggccaattctctccgtagagtcatgatagcagagattcccactttagccattgattcagtcgaagtcgaaacaaatactacggttttggccgatgaatttattgcacacagattaggtttaatacctctacaaagtatggatatcgaacaactagaatacagtcgtgattgtttttgtgaggaccactgtgataagtgttcagtggtgttaacattgcaagcgttcggcgaaagcgaaagtactacaaacgtctacagcaaggacttggtaattgtgtctaatctcatgggccgtaatattgggcatcctattatacaagataaagaaggtaacggtgttcttatttgtaaattgagaaaaggtcaagaattgaaactgacatgcgttgcgaaaaagggtatagccaaagagcacgccaagtggggtccagcagcagccatagagttcgagtatgatccttggaataagctcaaacataccgattactggtatgaacaggattctgccaaagaatggcctcagtctaaaaattgtgaatacgaagatcctccaaacgaaggtgaccccttcgattataaggctcaggcagatacattttatatgaatgtagaatctgtggggtctattcccgttgatcaagttgtcgtcagaggtatcgatacattacagaaaaaggttgcctcaatattgttagctctgacacagatggatcaagacaaagttaattttgcatcgggtgataacaacaccgcttcaaatatgctgggaagtaacgaagacgtaatgatgacgggcgctgagcaagatccttactccaatgcatctcaaatgggtaatactggatcaggagggtatgataatgcttggtag

SEQ ID NO: 5582 - DNA, 957 bp, Artificial Sequence
  Description of Artificial Sequence: Synthetic polynucleotide
atgagtgaagaaggtcctcaagttaaaataagagaagctagtaaagataacgtcgactttatattatccaatgtggatttggctatggccaattctctccgtagagtcatgatagcagagattcccactttagccattgattctgtcgaagtcgaaacaaatactacggttttggccgatgaatttattgcacacagattaggtttaatacctttacaaagtatggatatcgaacaattggaatacagtcgtgattgtttttgtgaggaccactgtgataagtgttctgtggtgttaacattgcaagcgttcggcgaaagcgaaagtactacaaacgtctacagcaaggacttggtaattgtgtctaatctcatgggccgtaatattgggcatcctattatacaagataaagaaggtaacggtgttcttatttgtaaattgagaaaaggtcaagaattgaaattaacatgcgttgcgaaaaagggtatagccaaagagcacgccaagtggggtccagcagcagccatagagttcgagtatgatccttggaataagctcaaacataccgattactggtatgaacaggattctgccaaagaatggcctcagtctaaaaattgtgaatacgaagatcctccaaacgaaggtgaccccttcgattataaggctcaggcagatacattttatatgaatgtagaatctgtggggtctattcccgttgatcaagttgtcgtcagaggtatcgatacattacagaaaaaggttgcctctatattgttagctttaacacagatggatcaagacaaagttaattttgcatctggtgataacaacaccgcttctaatatgcttggaagtaacgaagacgtaatgatgacgggcgctgagcaagatccttactccaatgcatctcaaatgggtaatactggatctggagggtatgataatgcttggtga

SEQ ID NO: 5583 - DNA, 786 bp, Saccharomyces cerevisiae
atgacgaagtttattggttgtatagacctgcataatggagaggttaaacagattgtaggtggaacgttaacgagcaaaaaggaggacgttccaaaaactaactttgtatcacaacatccttcttcatattacgctaaactttacaaagacagagatgtccaaggatgtcatgttattaagttgggacctaacaatgacgacgctgcacgcgaggcactccaggagtcaccacaatttctacaagtgggcggaggaattaatgatacgaactgtttggaatggttaaaatgggccagtaaagtaattgttacgagttggctatttacaaaagagggtcattttcaattaaaaaggttagaaagactgacagaactatgtgggaaagaccgcattgttgtagacttaagctgtagaaaaacccaggacggtcgttggattgtggccatgaacaaatggcaaactctaactgatcttgagcttaatgctgacactttcagagaattgaggaaatatacaaatgagtttctaattcacgctgcagacgttgaaggtttgtgtggtggtatcgatgaattattggtttctaagcttttcgaatggaccaaagattacgatgatttgaaaatcgtttatgctggtggggccaaaagtgttgatgatttgaaattagtagacgaactaagtcacggaaaagtagatttgacattcggtagttccttagatatatttggtggtaacctagttaagtttgaagactgctgtagatggaatgaaaagcaaggttag

SEQ ID NO: 5584 - DNA, 786 bp, Artificial Sequence
  Description of Artificial Sequence: Synthetic polynucleotide
atgacgaagtttattggttgtatagacttgcataatggagaggttaaacagattgtaggtggaacgttaacgagcaaaaaggaggacgttccaaaaactaactttgtatctcaacatccttcttcttattacgctaaactttacaaagacagagatgtccaaggatgtcatgttattaagttgggacctaacaatgacgacgctgcacgcgaggcactccaggagtctccacaatttttgcaagtgggcggaggaattaatgatacgaactgtttggaatggttaaaatgggccagtaaagtaattgttacgagttggttatttacaaaagagggtcattttcaattaaaaaggttagaaagattgacagaattatgtgggaaagaccgcattgttgtagacttaagctgtagaaaaacccaggacggtcgttggattgtggccatgaacaaatggcaaactttaactgatcttgagcttaatgctgacactttcagagaattgaggaaatatacaaatgagtttttgattcacgctgcagacgttgaaggtttgtgtggtggtatcgatgaattattggtttctaagcttttcgaatggaccaaagattacgatgatttgaaaatcgtttatgctggtggggccaaaagtgttgatgatttgaaattagtagacgaattaagtcacggaaaagtagatttgacattcggtagttccttagatatatttggtggtaacttggttaagtttgaagactgctgtagatggaatgaaaagcaaggttga

SEQ ID NO: 5585 - DNA, 1041 bp, Saccharomyces cerevisiae
atgacccttgatgatgacgactatataaaacaaatggagcttcaaagaaaagcttttgaaagtcagttcggatctttagagtccatggggttcgaagataaaacaaaaaatatacgaactgaagtagataccagagacagttcaggtgatgaaattgacaattccgatcatggtagtgatttcaaggatggtactatagaaagttctaattcttctgatgaagatagcggtaacgaaaccgcggaagaaaataatcaagattccaaaccgaaaactcaaccaaaggtcattagattcaacgggcctagtgacgtttatgttcctccaagtaagaagacacagaaacttttgagaagcggcaaaactttaactcaaataaacaaaaaattggagagtactgaagccaaggaagaaaaagaagatgagactttggaggcggaaaatttacaaaacgacctggagttgcagcaatttctgagagagtctcacttattgagcgctttcaataacggtggaagtggttctacaaacagtggtgtatcgttgactctacagagtatgggtggtggaaatgatgatggcatagtataccaggatgatcaagttattgggaaggccagatcgcgtacactcgaaatgagactgaatagactctcaagggtgaatggtcatcaggacaaaataaataagctggaaaaagtacccatgcatattagaagaggaatgatcgacaagcacgtcaagagaatcaaaaaatacgaacaagaagctgcagaaggtggaattgttctatccaaagtgaaaaagggacaattcagaaaaattgaatctacatacaagaaagatatcgagaggcgtatcgggggaagcattaaggccagggataaagaaaaagctaccaaaagggaacgtggtttgaagatcagtagtgtaggcagatcgacgaggaatggactgattgtatccaaaagagatattgctcgtatcagtggaggcgagaggagtggtaaatttaatggcaaaaagaaatcccgtcgctag

SEQ ID NO: 5586 - DNA, 1041 bp, Artificial Sequence
  Description of Artificial Sequence: Synthetic polynucleotide
atgacccttgatgatgacgactatataaaacaaatggagcttcaaagaaaagcttttgaaagtcagttcggatctttagagtccatggggttcgaagataaaacaaaaaatataagaactgaagtagataccagagacagttctggtgatgaaattgacaattccgatcatggtagtgatttcaaggatggtactatagaaagttctaattcttctgatgaagatagcggtaacgaaaccgcggaagaaaataatcaagattccaaaccgaaaactcaaccaaaggtcattagattcaacgggcctagtgacgtttatgttcctccaagtaagaagacacagaaacttttgagaagcggcaaaactttaactcaaataaacaaaaaattggagagtactgaagccaaggaagaaaaagaagatgagactttggaggcggaaaatttacaaaacgacttggagttgcagcaatttttaagagagtctcacttattgagcgctttcaataacggtggaagtggttctacaaacagtggtgtatctttgactttacagagtatgggtggtggaaatgatgatggcatagtataccaggatgatcaagttattgggaaggccagatctcgtacactcgaaatgagattgaatagactctccagggtgaatggtcatcaggacaaaataaataagttggaaaaagtacccatgcatattagaagaggaatgatcgacaagcacgtcaagagaatcaaaaaatacgaacaagaagctgcagaaggtggaattgttttatccaaagtgaaaaagggacaattcagaaaaattgaatctacatacaagaaagatatcgagaggcgtatcgggggaagcattaaggccagggataaagaaaaagctaccaaaagggaacgtggtttgaagatcagtagtgtaggcagatctacgaggaatggattgattgtatccaaaagagatattgctcgtatcagtggaggcgagaggagtggtaaatttaatggcaaaaagaaatcccgtcgctga

SEQ ID NO: 5587 - DNA, 765 bp, Saccharomyces cerevisiae
atgggtagagttattcgtaaccaaagaaagggtgctggttctatcttcacctctcacaccagattaagacaaggtgctgccaagttgagaactttggactatgctgaacgtcatggttacatccgtggtatcgttaagcaaattgtccacgactccggtagaggtgctccattggccaaggttgttttccgtgacccatacaagtacagattacgtgaagaaatcttcattgctaacgaaggtgttcacactggtcaattcatttacgctggtaaaaaggcttctttgaacgtcggtaacgtcttgccattgggttctgtcccagaaggtaccattgtctccaacgttgaagaaaagccaggtgacagaggtgccctagccagagcttctggtaactacgttatcatcattggtcacaacccagatgaaaacaaaaccagagtcagattaccatccggtgccaagaaggttatctcttctgacgccagaggtgtcatcggtgtcattgccggtggtggtagagttgacaaaccattgttgaaggctggtcgtgctttccacaagtacagattgaagagaaactcttggccaaagacccgtggtgttgccatgaatccagttgatcaccctcacggtggtggtaaccatcaacatattggtaaggcttctactatctctagaggtgccgtttctggtcaaaaggctggtttgattgctgccagaagaaccggtttactacgtggttctcaaaagacccaagattaa

SEQ ID NO: 5588 - DNA, 765 bp, Artificial Sequence
  Description of Artificial Sequence: Synthetic polynucleotide
atgggtagagttattcgtaaccaaagaaagggtgctggttctatcttcacctctcacaccagattaagacaaggtgctgccaagttgagaactttggactatgctgaacgtcatggttacatccgtggtatcgttaagcaaattgtccacgactccggtagaggtgctccattggccaaggttgttttccgtgacccatacaagtacagattacgtgaagaaatcttcattgctaacgaaggtgttcacactggtcaattcatttacgctggtaaaaaggcttctttgaacgtcggtaacgtcttgccattgggttctgtcccagaaggtaccattgtctccaacgttgaagaaaagccaggtgacagaggtgccttggccagagcttctggtaactacgttatcatcattggtcacaacccagatgaaaacaaaaccagagtcagattaccatccggtgccaagaaggttatctcttctgacgccagaggtgtcatcggtgtcattgccggtggtggtagagttgacaaaccattgttgaaggctggtcgtgctttccacaagtacagattgaagagaaactcttggccaaagacccgtggtgttgccatgaatccagttgatcaccctcacggtggtggtaaccatcaacatattggtaaggcttctactatctctagaggtgccgtttctggtcaaaaggctggtttgattgctgccagaagaaccggtttattacgtggttctcaaaagacccaagattga

SEQ ID NO: 5589 - DNA, 2766 bp, Saccharomyces cerevisiae
atgacggtggcttattccctagagaatctcaaaaagattagtaattccctggtgggagaccagttggctaaggtagattactttttggctccaaagtgccagatttttcaatgtttgttgtccattgagcaaagtgacggtgtagagttaaaaaatgcgaaattagatctgctatatacccttttacatctagaaccgcaacaaagggatatagtaggcacatattactttgatattgtgtccgcaatctataagtccatgagtttggcaagcagttttactaaaaataattcttcgacaaactataagtacataaagcttctaaatttgtgtgcaggagtttatccaaattgcggattcccagacttgcaatacctccagaacgggttcatccagttagtcaaccataaatttttgaggagcaaatgtaaaattgatgaggtggtcacgattattgaattattgaagttgtttttacttgtggacgagaaaaattgcagcgacttcaacaagagcaagtttatggaggaagagagagaagtgacagaaacttcacactaccaagattttaaaatggcagaatcccttgaacacataatagttaaaatatcatcgaagtacttggaccaaataagcctcaagtatatagtgaggctaaaagtatccaggccagcgtcaccatccagcgtcaagaacgatccgtttgacaataaaggggtcgactgcacccgtgccatacctaaaaaaatcaatatctcaaacatgtatgattctagtttactctcattggcactccttctatatctaagatatcattatatgataccgggtgataggaaactgcggaatgatgcgacgttcaagatgttcgttctgggtcttttgaagagtaatgacgttaacattaggtgcgtggccctgaagtttttgttacaaccgtactttacagaggataagaaatgggaagatacgcgtacactcgagaaaatactaccctatttagttaagtcatttaattatgacccgttgccttggtggtttgatccattcgatatgctggattcattgattgtgttgtataatgaaattactccaatgaataatcctgtgctcaccacgctagctcatacaaacgttatattttgcattctatcccgttttgcgcagtgtctttctctaccacaacacaatgaagctactttgaaaacaactacaaaattcattaaaatatgtgcgtcatttgcagcatcggacgaaaaataccgtcttttactgttgaatgacacattgttgttgaatcatttagaatacgggttggaatcccacattactttgatacaggattttatatctttgaaagatgagataaaggaaacaactacggaaagtcattctatgtgtttacccccaatatatgatcacgatttcgtggcagcttggttactattgttgaaatcattctcgagaagtgtttcagcgcttaggacgacgttgaagagaaataaaattgcacagctgcttttacagatactaagtaaaacatatacgttgaccaaggaatgctattttgctggacaagattttatgaaaccggaaattatgattatgggcattactctgggtagtatttgtaacttcgtggtggagttctctaatttacagtcatttatgctgagaaacggtataatcgatataattgaaaagatgttaacagatccattgtttaactcaaaaaaagcctgggacgataatgaagatgaaagaaggattgcattgcaaggcatacctgtgcatgaagtgaaggcaaactctttatgggtactaaggcatctaatgtacaattgccagaatgaagagaagtttcagcttttggccaaaatcccgatgaatttaattttggattttattaatgatccatgttgggcagtacaagcccaatgttttcagttgctcagaaatttgacttgtaattcaaggaaaattgtaaatattcttttggaaaaatttaaagatgtagaatacaagatcgatcctcaaacaggtaataaaattagcatcggctcaacgtatcttttcgaatttcttgcaaagaagatgaggcttttaaatccattagacactcaacaaaagaaagcaatggaaggcatcctatatattatcgtgaatctagcggcagtcaatgagaataaaaagcagctagtcatcgaacaagacgaaatattgaacattatgagtgaaatattggtagaaacaacgactgatagttcaagtaatggtaatgacagcaatctgaaattggcatgcctctgggtactcaataacttactttggaattcatcagtttcacattatacccaatatgcaattgaaaatggtctggaaccagggcattcaccaagtgattcagaaaaccctcaatctacggtgacaatcgggtataatgaatcagtggctggtggatattctagggggaaatactacgatgagccagatggcgatgatagcagtagcaatgcgaatgatgatgaagatgacgataatgatgagggtgatgatgaaggcgatgagttcgttcgcaccccggctgcaaaaggtagtacatcaaatgtacaagtaacacgtgccacggtggaaagatgtagaaaactcgtggaggtaggattatacgatctggttagaaaaaatattacagacgaatcattatctgtcagggaaaaggccagaacgttactatatcacatggacctgcttttgaaagttaaatga

SEQ ID NO: 5590 - DNA, 2766 bp, Artificial Sequence
  Description of Artificial Sequence: Synthetic polynucleotide
atgacggtggcttattccttggagaatctcaaaaagattagtaattccttagtgggagaccagttggctaaggtagattactttttggctccaaagtgccagatttttcaatgtttgttgtccattgagcaaagtgacggtgtagagttaaaaaatgcgaaattagatttattatatacccttttacatttggaaccgcaacaaagggatatagtaggcacatattactttgatattgtgtccgcaatctataagtccatgagtttggcaagcagttttactaaaaataattcttctacaaactataagtacataaagcttttgaatttgtgtgcaggagtttatccaaattgcggattcccagacttgcaatacctccagaacgggttcatccagttagtcaaccataaatttttgaggagcaaatgtaaaattgatgaggtggtcacgattattgaattattgaagttgtttttacttgtggacgagaaaaattgcagcgacttcaacaagagcaagtttatggaggaagagagagaagtgacagaaacttctcactaccaagattttaaaatggcagaatcccttgaacacataatagttaaaatatcttccaagtacttggaccaaataagcctcaagtatatagtgaggttgaaagtatccaggccagcgtctccatccagcgtcaagaacgatccgtttgacaataaaggggtcgactgcacccgtgccatacctaaaaaaatcaatatctccaacatgtatgattctagtttactctctttggcactccttttatatttaagatatcattatatgataccgggtgataggaaattaagaaatgatgcgacgttcaagatgttcgttttaggtcttttgaagagtaatgacgttaacattaggtgcgtggccttgaagtttttgttacaaccgtactttacagaggataagaaatgggaagatacgcgtacactcgagaaaatattgccctatttagttaagagctttaattatgacccgttgccttggtggtttgatccattcgatatgcttgattctttgattgtgttgtataatgaaattactccaatgaataatcctgtgctcaccacgttggctcatacaaacgttatattttgcattttatcccgttttgcgcagtgtctttctttaccacaacacaatgaagctactttgaaaacaactacaaaattcattaaaatatgtgcgtcttttgcagcaagtgacgaaaaataccgtcttttattattgaatgacacattgttgttgaatcatttagaatacgggttggaatcccacattactttgatacaggattttatatctttgaaagatgagataaaggaaacaactacggaaagtcattctatgtgtttacccccaatatatgatcacgatttcgtggcagcttggttattattgttgaaatctttcagtagaagtgtttctgcgcttaggacgacgttgaagagaaataaaattgcacagttacttttacagatattgagtaaaacatatacgttgaccaaggaatgctattttgctggacaagattttatgaaaccggaaattatgattatgggcattactttaggtagtatttgtaacttcgtggtggagttctctaatttacagtcttttatgttgagaaacggtataatcgatataattgaaaagatgttaacagatccattgtttaactccaaaaaagcctgggacgataatgaagatgaaagaaggattgcattgcaaggcatacctgtgcatgaagtgaaggcaaactctttatgggtattgaggcatttaatgtacaattgccagaatgaagagaagtttcagcttttggccaaaatcccgatgaatttaattttggattttattaatgatccatgttgggcagtacaagcccaatgttttcagttgctcagaaatttgacttgtaattctaggaaaattgtaaatattcttttggaaaaatttaaagatgtagaatacaagatcgatcctcaaacaggtaataaaattagcatcggctctacgtatcttttcgaatttcttgcaaagaagatgaggcttttaaatccattagacactcaacaaaagaaagcaatggaaggcatcttatatattatcgtgaatttggcggcagtcaatgagaataaaaagcagttggtcatcgaacaagacgaaatattgaacattatgagtgaaatattggtagaaacaacgactgatagtagtagtaatggtaatgacagcaatttgaaattggcatgcctctgggtactcaataacttactttggaattcttctgtttctcattatacccaatatgcaattgaaaatggtttggaaccagggcattctccaagtgattctgaaaaccctcaatctacggtgacaatcgggtataatgaatctgtggctggtggatattctagggggaaatactacgatgagccagatggcgatgatagcagtagcaatgcgaatgatgatgaagatgacgataatgatgagggtgatgatgaaggcgatgagttcgttcgcaccccggctgcaaaaggtagtacaagtaatgtacaagtaacacgtgccacggtggaaagatgtagaaaactcgtggaggtaggattatacgatttggttagaaaaaatattacagacgaatctttatctgtcagggaaaaggccagaacgttattatatcacatggacttacttttgaaagttaaatga

SEQ ID NO: 5591 - DNA, 480 bp, Saccharomyces cerevisiae
atgtcgcacaacgcaatggaacattggaagagcaagctgagcaaaacaagtacctcgacgtacgtcctcttggccgtgattgctgttgtatttttggttacaatcagaagacccaatggcagcaagggaaaaagcagtaaaaagagggcttctaaaaagaacaagaaaggtaagaatcagtttgaaaaagcgccggttcctctgactctagaagaacaaattgacaatgtgtcgttgagatacggcaacgagttggaaggtcgtagcaaggatctaataaacagatttgatgtggaagatgaaaaggacatctacgagcgtaactattgcaacgaaatgcttttgaagttgctgattgagttagacagtatcgatttgattaacgtggatgagtccttaagaaggccgttgaaggaaaaaaggaaaggcgtcataaaggaaattcaggctatgttaaaaagtttggactctcttaaataa

SEQ ID NO: 5592 - DNA, 480 bp, Artificial Sequence
  Description of Artificial Sequence: Synthetic polynucleotide
atgtctcacaacgcaatggaacattggaagagcaagttgagcaaaacaagtacctctacgtacgtcctcttggccgtgattgctgttgtatttttggttacaatcagaagacccaatggcagcaagggaaaaagcagtaaaaagagggcttctaaaaagaacaagaaaggtaagaatcagtttgaaaaagcgccggttcctttaactttggaagaacaaattgacaatgtgtctttgagatacggcaacgagttggaaggtcgtagcaaggatttgataaacagatttgatgtggaagatgaaaaggacatctacgagcgtaactattgcaacgaaatgcttttgaagttgttaattgagttagacagtatcgatttgattaacgtggatgagtccttaagaaggccgttgaaggaaaaaaggaaaggcgtcataaaggaaattcaggctatgttaaaaagtttggactctcttaaatga

SEQ ID NO: 5593 - DNA, 1764 bp, Saccharomyces cerevisiae
atgtctgcaattaatcatctttgtttgaaacttattttggcgagtttcgcgattattaacaccattactgctttaacaaacgatggcactggtcacttagaattccttttacaacacgaagaggagatgtattacgcaacaaccttagatataggtacaccgtcccaaagtctgacagtgttgtttgataccggatctgccgatttttgggttatggattctagcaatcccttctgcttaccaaattcaaatacgtcatcctattcaaacgcaacttataatggcgaagaagttaagccttcaattgattgcaggtctatgagtacttataatgagcatagatcttccacctaccaatatctggaaaatggtaggttttacatcacatatgctgacggaacatttgctgacggtagttgggggacggaaactgtatcaattaatggaattgacatccccaatatccagttcggagttgccaagtatgctacgacacccgttagtggtgttcttggaattgggtttcctagaagagagtccgttaagggctatgaaggtgctcctaatgaatattatcctaattttcctcagattttaaaaagtgaaaaaataatcgatgtggtcgcgtattcgctgttcttaaactcacctgattcaggtactggttcgattgtttttggtgccattgatgaatcaaagttttctggtgatttgttcactttccctatggtaaatgaatatcccacaatagtcgacgctcctgcaactttagcaatgactatacaaggattaggtgcccaaaacaaaagtagttgtgaacatgaaacgtttacgacgaccaagtatccagttttgttggactcaggaacctcgctattgaatgcgcccaaggtcatagcagataaaatggcttcttttgtaaatgcgtcctatagtgaagaggaaggtatatatatattagactgtccagtatctgtaggtgacgtggaatacaattttgatttcggcgatttgcaaataagtgttccactgtctagtttgattttaagtcccgagacagaaggcagctattgtgggtttgcggtccagccaacaaacgattcgatggttctgggtgatgtgttcctgtcctctgcatacgtcgtattcgatctcgataattataagatatctttagcacaggcaaattggaacgcaagcgaagtttcgaaaaagctagtaaatattcaaacagatgggtctatttcaggtgccaaaattgctacagctgaaccctggtccaccaatgaaccatttacagtcacctctgacatttattcatctacaggctgcaagagtaggccttttcttcaatcatcgacagcctcttcgcttattgcagaaaccaacgtacaaagtcgcaactgctctacgaagatgccaggcactagatcaactactgtcttaagtaagcctactcaaaatagtgctatgcatcaaagtacaggcgctgtcacacaaacctcaaatgaaactaaattagaattatcctcgactatggcaaattcgggcagtgtctcgcttcccacttcgaattcaatagacaaagagttcgaacattcgaaatctcaaactaccagcgatccaagtgtagcagagcattctacgtttaaccaaacgtttgtacatgaaactaaatatcggcctactcataagacagtcataacagaaactgtcacgaagtattctacagtcttaataaatgtctgtaaaccaacatattaa

SEQ ID NO: 5594 - DNA, 1764 bp, Artificial Sequence
  Description of Artificial Sequence: Synthetic polynucleotide
atgtctgcaattaatcatctttgtttgaaacttattttggcgagtttcgcgattattaacaccattactgctttaacaaacgatggcactggtcacttagaattccttttacaacacgaagaggagatgtattacgcaacaaccttagatataggtacaccgtcccaaagtttgacagtgttgtttgataccggatctgccgatttttgggttatggattctagcaatcccttctgcttaccaaatagtaatacgtcttcctattccaacgcaacttataatggcgaagaagttaagccttctattgattgcaggtctatgagtacttataatgagcatagatcttccacctaccaatatttggaaaatggtaggttttacatcacatatgctgacggaacatttgctgacggtagttgggggacggaaactgtatctattaatggaattgacatccccaatatccagttcggagttgccaagtatgctacgacacccgttagtggtgttcttggaattgggtttcctagaagagagtccgttaagggctatgaaggtgctcctaatgaatattatcctaattttcctcagattttaaaaagtgaaaaaataatcgatgtggtcgcgtattctttattcttaaactctcctgattctggtactggttccattgtttttggtgccattgatgaatccaagttttctggtgatttgttcactttccctatggtaaatgaatatcccacaatagtcgacgctcctgcaactttagcaatgactatacaaggattaggtgcccaaaacaaaagtagttgtgaacatgaaacgtttacgacgaccaagtatccagttttgttggactctggaacctctttgttgaatgcgcccaaggtcatagcagataaaatggcttcttttgtaaatgcgtcctatagtgaagaggaaggtatatatatattagactgtccagtatctgtaggtgacgtggaatacaattttgatttcggcgatttgcaaataagtgttccattatctagtttgattttaagtcccgagacagaaggcagctattgtgggtttgcggtccagccaacaaacgattctatggttttaggtgatgtgttcttatcctctgcatacgtcgtattcgatctcgataattataagatatctttagcacaggcaaattggaacgcaagcgaagtttccaaaaagttggtaaatattcaaacagatgggtctatttctggtgccaaaattgctacagctgaaccctggtccaccaatgaaccatttacagtcacctctgacatttattcttctacaggctgcaagagtaggccttttcttcaatcttctacagcctcttctcttattgcagaaaccaacgtacaaagtcgcaactgctctacgaagatgccaggcactagatctactactgtcttaagtaagcctactcaaaatagtgctatgcatcaaagtacaggcgctgtcacacaaacctctaatgaaactaaattagaattatccagcactatggcaaatagtggcagtgtctcccttcccacttccaattctatagacaaagagttcgaacattctaaatctcaaactaccagcgatccaagtgtagcagagcattctacgtttaaccaaacgtttgtacatgaaactaaatataggcctactcataagacagtcataacagaaactgtcacgaagtattctacagtcttaataaatgtctgtaaaccaacatattga

SEQ ID NO: 5595 - DNA, 315 bp, Saccharomyces cerevisiae
atggacattgacatgaactatcccagtataactactttgatgagtaatgaatcagcaaacttattgattatttgggggaatgccacgcctgatattagctatctatcttatacaactaacccaatgttaggtgactatgttttaaatgtgtccgctataaatggctgcacggaggaattaatagcaactcatctagtgccaactttggagaatgcaacccagtgggtttatgatgcgggggagtactgggacaattattcctttactgatgaaagtacccctctgccaggactttcctggccatttaatgaataa

SEQ ID NO: 5596 - DNA, 315 bp, Artificial Sequence
  Description of Artificial Sequence: Synthetic polynucleotide
atggacattgacatgaactatcccagtataactactttgatgagtaatgaaagtgcaaacttattgattatttgggggaatgccacgcctgatattagctatttatcttatacaactaacccaatgttaggtgactatgttttaaatgtgtccgctataaatggctgcacggaggaattaatagcaactcatttggtgccaactttggagaatgcaacccagtgggtttatgatgcgggggagtactgggacaattattcctttactgatgaaagtacccctttaccaggactttcctggccatttaatgaatga

SEQ ID NO: 5597 - DNA, 1893 bp, Saccharomyces cerevisiae
atgcttaaatcattaaaatccagaagactaatcttaaaacgattagtaacactgctgctctctttattcttttcttatctcattttctctgccagtcggaatgttacatcatccaataaattaaacaaccatgcaagcgagaggacagctgttgaatcatctgcattcaattggattgaaaaacgacaacaccaagtgagatccgaaaacttaatgaacagattatctgcctactttttgccctttttgagtagaagttctcacaaagaacgtgtattgttgaggcaattaggaaataatgaaatagcgaagagtgacaagtgccgttacatttttgaagtactatacaagattgatcccgactgggacaatgcgcaaactgcaaaattttataatgttgatggtgtagataacacgttggcctcattgttaggggaaagattaagatcttatgattattgctttttatctggtcaattagatcctactgcaatatttgcaaattcaaccgtaaatcctcatgatttgcaaaacagaatgtttccatttctgaagaaaattaacgaggaatccaaaactgtaatgtggcctattatcacagacatgacaactggagaggcagttccggcacccgaggttgatatggaatcatcaaactttaatggtaacttttggtccaactggaataggttgagcaaaggaagaggttttgttttaactattgctgaaaaggatgttcctttatttttgaaacagttgaaagtgatggaattttcaaaaaacgaattaccattccaaatagtatccacgggaaatgaactatcagcagagtctattgctaaaatttctgagaccgctaaagaaacggaacaaagggtctacttagtagactgctcgacagtgcttgacactaattttgctaatacatacatttctttttttcagaataaatgggtcgccactttgttcaacacatttgaagaatacattttgttggatgcagacgtagtaccgtttgtagggtctgattactttttcgactctccttcttacagggagagcgggatacttttgttcaaggatagggttatggaaaacgagcaaactttccaatactgcatcgaaatgttaaatgaagtggaaccctctgcacaagaacgcagatttattggaagtaggttagtttttgattcgtcattaccgttttcttccgaaacctcagaagaagcatctgtgtattacaattttttcaaaaaattacgactccatcatgttgatagtggtttggttgtagtcaataaacttgagaaattaaatggattgttgatgtcttttatgttaaatttggatggaaaattgcagaggtgtgtgtatggtgacaaggaaatattctggttggggcaattatatgctggccaggattattctatcaatcccgttgatggcagtattattggacctgttaatgaagagcctgaaaatgatgacggacataaaagcgggatgtactacatttgttctacgcagattgcacacagtgactccaaaaatcgattactatgggtaaacggtggactgaagacttgtaaaatttcgaacagtgctgaagatgactttggaagagagccagagtattttaagagtagatatggggacatttcaaaattaaaaaggatatatgatgcttcgttgaacgtagagggactaatcgttcctgacgtttctgttcatccatggatgcaaatcaaggaatgttctaattatatgtattgtgcatatgctacgggtgacggacacacaaactctgaacttgacgaaggtcgtctaatcacgtttactgaaaaggaattacgatatatcaatgatatttctcgaacctggaatgctaattga

SEQ ID NO: 5598 - DNA, 1893 bp, Artificial Sequence
  Description of Artificial Sequence: Synthetic polynucleotide
atgcttaaatctttaaaatccagaagattgatcttaaaaagattagtaacattacttctctctttattcttttcttatctcattttctctgccagtagaaatgttacatcttccaataaattaaacaaccatgcaagcgagaggacagctgttgaaagctctgcattcaattggattgaaaaaagacaacaccaagtgagatccgaaaacttaatgaacagattatctgcctactttttgccctttttgagtagaagttctcacaaagaacgtgtattgttgaggcaattaggaaataatgaaatagcgaagagtgacaagtgccgttacatttttgaagtattgtacaagattgatcccgactgggacaatgcgcaaactgcaaaattttataatgttgatggtgtagataacacgttggcctctttgttaggggaaagattaagatcttatgattattgctttttatctggtcaattagatcctactgcaatatttgcaaattctaccgtaaatcctcatgatttgcaaaacagaatgtttccatttttgaagaaaattaacgaggaatccaaaactgtaatgtggcctattatcacagacatgacaactggagaggcagttccggcacccgaggttgatatggaatcttccaactttaatggtaacttttggtccaactggaataggttgagcaaaggaagaggttttgttttaactattgctgaaaaggatgttcctttatttttgaaacagttgaaagtgatggaattttccaaaaacgaattaccattccaaatagtatccacgggaaatgaattaagtgcagagtctattgctaaaatttctgagaccgctaaagaaacggaacaaagggtctacttagtagactgctccacagtgcttgacactaattttgctaatacatacatttctttttttcagaataaatgggtcgccactttgttcaacacatttgaagaatacattttgttggatgcagacgtagtaccgtttgtagggtctgattactttttcgactctccttcttacagggagagcgggatacttttgttcaaggatagggttatggaaaacgagcaaactttccaatactgcatcgaaatgttaaatgaagtggaaccctctgcacaagaacgcagatttattggaagtaggttagtttttgattcttctttaccgttttcttccgaaaccagtgaagaagcatctgtgtattacaattttttcaaaaaattaagactccatcatgttgatagtggtttggttgtagtcaataaacttgagaaattaaatggattgttgatgtcttttatgttaaatttggatggaaaattgcagaggtgtgtgtatggtgacaaggaaatattctggttggggcaattatatgctggccaggattattctatcaatcccgttgatggcagtattattggacctgttaatgaagagcctgaaaatgatgacggacataaaagcgggatgtactacatttgttctacgcagattgcacacagtgactccaaaaatagattattatgggtaaacggtggattgaagacttgtaaaatttccaacagtgctgaagatgactttggaagagagccagagtattttaagagtagatatggggacatttccaaattaaaaaggatatatgatgcttctttgaacgtagagggattgatcgttcctgacgtttctgttcatccatggatgcaaatcaaggaatgttctaattatatgtattgtgcatatgctacgggtgacggacacacaaactctgaacttgacgaaggtcgtttgatcacgtttactgaaaaggaattaagatatatcaatgatatttctcgtacctggaatgctaattga

SEQ ID NO: 5599 - DNA, 4236 bp, Saccharomyces cerevisiae
atgtctctttccaaatattttaatccaattcctgacgcttcagtcacctttgatggggctaccgttcaattggaagaatccctcggtgctgttcagaacgatgaagagtccgcatcggaattcaaaaacgtaggccatttagaaattagtgatatcacttttcgtgctaatgaaggtgaagtcgtcttagtactgggaaacccaacatcagcgctcttcaaaggtctattccatggtcacaagcatctgaaatactcgcctgaagggtctattagattcaaagacaatgagtacaaacagtttgcttccaaatgcccccatcagatcatttataataacgaacaagatattcacttcccgtatctgacggtggagcaaaccattgattttgcgttgagttgtaagtttcacattcccaagcaagagcgtattgaaatgagagacgagttattaaaagagttcggactgtcgcacgtaaagaagacgtatgtgggtaatgactacgttcgtggtgtttctggaggtgaaaggaaacgtatctccattatagaaacgtttattgccaatgggtctgtttacttatgggacaactcgacgaagggtttggactctgccaccgccctagaatttctttccattacccaaaagatggcaaaagctacaagatcggtgaattttgttaaaatttctcaagcaagcgacaaaattgtcagcaagtttgacaagattcttatgttaggtgattccttccaggtgttttacggaaccatggaggagtgtttaacccattttcatgacaccttacagataaaaaaaaaccctaacgattgtattattgaatatttaacatcaatcttaaattttaagttcaaggaaacgtctaattccattgttggtcttgacactccatctgttgtttctgaagaaaatcaagctttaaacatcaataatgaaacagatttgcatacattatggattcagtctccatactataaacactggaaggccatcacttcaaaaacagtgcaagaatgcaccagaaaagatgttaatccggatgatatctcccccatttttagtattccgctaaagacgcaactgaaaacgtgcactgtaagagctttcgaaagaatcattggtgacagaaactacttgatttctcaatttgtttctgttgtggtgcagtctttggttattgggtcccttttttataacattcccctgacaacaattggttcgttttctagaggatctttaactttcttttccatcctattctttacatttctttctctcgccgacatgcctgcttcctttcaaaggcaacccgtcgttcgtaaacatgtccagctccatttttattataattgggtggaaactttagcaacaaattttttcgattgctgctctaaatttatactggtggttatttttacaatcatactttactttttggcccatttacagtacaatgcagctaggtttttcatctttttgcttttcctttccgtctataatttttgcatggtgtcactatttgcattaactgctttgatcgctccaactctatcaatggcaaacctattggccggtatcttactgttagccattgccatgtacgcgtcctatgttatttatatgaaagatatgcatccatggttcatatggattgcatatttgaatcctgctatgtttgccatggaagccattttgagtaacgaattgtttaacctgaaactagactgtcatgaaagtattattcccagaggtgaatattatgacaatatttcattcagtcataaagcttgtgcctggcaaggcgctaccctaggtaacgattacgtcagaggccgtgattatttaaaaagtggattgaaatacacttaccatcacgtgtggagaaatttcggtattatcattgggtttctgtgtttcttcctattttgctctttactagcagcggaatatatcacgcctctgtttactagagaaaatttattgcgctggaataactatctcaaaagatactgtccctttctgaatagccaaaaaaagaataataaaagcgctattaccaacaacgatggcgtatgtactcccaagaccccgatagccaatttttccacttcatcctcttctgttccatcagtctcgcatcaatacgatactgattacaatattaaacatccagatgaaactgttaacaatcatactaaggaatccgtagctatggaaacgcaaaagcacgtcatctcctggaaaaatatcaattataccattggagacaaaaaattgatcaacgacgcttctggatatataagttccggattaactgccctaatgggtgaatctggtgctggtaagacaactttgttgaatgtcttgtctcaaaggaccgaaagcggggttgttaccggtgaattattaatcgatggacagcccttaacgaatattgatgcattcagaagaagtatagggttcgttcaacagcaagatgttcatttagagctcttaactgtgagagagtctttggaaatttcctgcgtcctaagaggtgatggggatagagactatttaggagttgttagcaacctattaagattgccttcggaaaaactggttgctgatttatctccaactcaaagaaaattattatctattggtgttgaattggtcactaagccttctctgttgttattcctagatgaacctacttcagggctagacgccgaagcagctttaaccatcgtgcaatttctgaaaaagctttcgatgcaaggtcaggctatcttatgtactattcatcagcctagcaaaagtgtcatcagctattttgataacatctatttactaaaaagaggtggtgagtgtgtctattttggttcattacctaatgcctgtgactattttgtagctcacgatagacgcctaacatttgacagagaaatggataatccggctgatttcgttattgacgttgttggtagcggaagtacaaatattccaatggatgatgcagagaagccaacctcaagcaaaattgatgagccagtatcttaccataagcaatctgattcaattaactgggcagaactctggcaatcctctccagaaaaagtgcgggttgctgatgatttgcttttattagaagaagaagcccggaaatctggtgttgatttcactacgtccgtatggagtccgccttcgtatatggaacaaataaagttaatcacaaagagacagtacatttgtaccaagagagacatgacctatgttttcgctaaatatgctttgaatgctggcgctggactattcattggattttcattttggaggacaaagcataatatcaacggtctgcaagatgctattttcttgtgcttcatgatgctttgtgtttcctcccctttgatcaatcaggttcaagataaggctttgcaatctaaagaagtatatatcgccagggaagcgagatctaatacttatcattggaccgttcttttgattgctcaaactattgttgaattaccattagccatttccagttctaccttatttttcctgtgttgctacttctgttgcggtttcgaaacctctgcccgtgtagctggtgtcttttacttgaattatattttattttccatgtattatttgtcatttgggttgtggcttctatattctgcccccgatttacaaactgccgctgtctttgttgccttcctctatagtttcacagcttcattctgtggcgttatgcaaccatactcgttattcccaagattttggacattcatgtacagggtttcaccatacacgtatttcattgaaactttcgtaagcttacttctccatgacagagaagtaaactgctcgacaagtgaaatggtaccaagccaacctgtaatgggtcaaacctgcggtcagtttatgaaaccctttattgatgaatttggtgggaaactgcacatcaataacacatacaccgtctgcgcctactgcatgtacactgttggggatgacttccttgctcaagaaaatatgagttatcatcacagatggagaaattttggttttgaatgggttttcgtttgctttaacattgccgccatgtttgtgggcttctacctaacctacatcaaaaaaatttggccttctgtgattgatggtataaagaagtgtatcccatcaatgaggcggtccaaaacatctcataatccaaacgaacaaagcgtataa

SEQ ID NO: 5600 - DNA, 4236 bp, Artificial Sequence
  Description of Artificial Sequence: Synthetic polynucleotide
atgtctctttccaaatattttaatccaattcctgacgcttctgtcacctttgatggggctaccgttcaattggaagaatccctcggtgctgttcagaacgatgaagagtccgcatctgaattcaaaaacgtaggccatttagaaattagtgatatcacttttcgtgctaatgaaggtgaagtcgtcttagtattgggaaacccaacatctgcgctcttcaaaggtcttttccatggtcacaagcatttgaaatactctcctgaagggtctattagattcaaagacaatgagtacaaacagtttgcttccaaatgcccccatcagatcatttataataacgaacaagatattcacttcccgtatttgacggtggagcaaaccattgattttgcgttgagttgtaagtttcacattcccaagcaagagcgtattgaaatgagagacgagttattaaaagagttcggattatcccacgtaaagaagacgtatgtgggtaatgactacgttcgtggtgtttctggaggtgaaaggaaacgtatctccattatagaaacgtttattgccaatgggtctgtttacttatgggacaactccacgaagggtttggactctgccaccgccttggaatttctttccattacccaaaagatggcaaaagctacaagatctgtgaattttgttaaaatttctcaagcaagcgacaaaattgtcagcaagtttgacaagattcttatgttaggtgattccttccaggtgttttacggaaccatggaggagtgtttaacccattttcatgacaccttacagataaaaaaaaaccctaacgattgtattattgaatatttaacatctatcttaaattttaagttcaaggaaacgtctaattccattgttggtcttgacactccatctgttgtttctgaagaaaatcaagctttaaacatcaataatgaaacagatttgcatacattatggattcagtctccatactataaacactggaaggccatcacttctaaaacagtgcaagaatgcaccagaaaagatgttaatccggatgatatctcccccatttttagtattccgttgaagacgcaattgaaaacgtgcactgtaagagctttcgaaagaatcattggtgacagaaactacttgatttctcaatttgtttctgttgtggtgcagtctttggttattgggtcccttttttataacattcccttgacaacaattggttctttttctagaggatctttaactttcttttccatcttattctttacatttctttctctcgccgacatgcctgcttcctttcaaaggcaacccgtcgttcgtaaacatgtccagctccatttttattataattgggtggaaactttagcaacaaattttttcgattgctgctctaaatttatattggtggttatttttacaatcatactttactttttggcccatttacagtacaatgcagctaggtttttcatctttttgcttttcctttccgtctataatttttgcatggtgtctttatttgcattaactgctttgatcgctccaactttatctatggcaaaccttttggccggtatcttattattagccattgccatgtacgcgtcctatgttatttatatgaaagatatgcatccatggttcatatggattgcatatttgaatcctgctatgtttgccatggaagccattttgagtaacgaattgtttaacttgaaattagactgtcatgaaagtattattcccagaggtgaatattatgacaatatttctttcagtcataaagcttgtgcctggcaaggcgctaccttgggtaacgattacgtcagaggccgtgattatttaaaaagtggattgaaatacacttaccatcacgtgtggagaaatttcggtattatcattgggtttttatgtttcttcttattttgctctttattggcagcggaatatatcacgcctttatttactagagaaaatttattgcgctggaataactatctcaaaagatactgtccctttttgaatagccaaaaaaagaataataaaagcgctattaccaacaacgatggcgtatgtactcccaagaccccgatagccaatttttccacttcttcctcttctgttccaagtgtctctcatcaatacgatactgattacaatattaaacatccagatgaaactgttaacaatcatactaaggaatccgtagctatggaaacgcaaaagcacgtcatctcctggaaaaatatcaattataccattggagacaaaaaattgatcaacgacgcttctggatatataagttccggattaactgccttgatgggtgaatctggtgctggtaagacaactttgttgaatgtcttgtctcaaaggaccgaaagcggggttgttaccggtgaattattaatcgatggacagcccttaacgaatattgatgcattcagaagaagtatagggttcgttcaacagcaagatgttcatttagagctcttaactgtgagagagtctttggaaatttcctgcgtcttgagaggtgatggggatagagactatttaggagttgttagcaacttattaagattgccttctgaaaaattggttgctgatttatctccaactcaaagaaaattattatctattggtgttgaattggtcactaagccttctttgttgttattcttggatgaacctacttctgggttggacgccgaagcagctttaaccatcgtgcaatttttgaaaaagctttctatgcaaggtcaggctatcttatgtactattcatcagcctagcaaaagtgtcatcagctattttgataacatctatttattgaaaagaggtggtgagtgtgtctattttggttctttacctaatgcctgtgactattttgtagctcacgatagacgcctcacatttgacagagaaatggataatccggctgatttcgttattgacgttgttggtagcggaagtacaaatattccaatggatgatgcagagaagccaaccagtagcaaaattgatgagccagtatcttaccataagcaatctgattctattaactgggcagaactctggcaatcctctccagaaaaagtgagagttgctgatgatttgcttttattagaagaagaagccagaaaatctggtgttgatttcactacgtccgtatggagtccgccttcttatatggaacaaataaagttaatcacaaagagacagtacatttgtaccaagagagacatgacctatgttttcgctaaatatgctttgaatgctggcgctggattattcattggattttctttttggaggacaaagcataatatcaacggtttacaagatgctattttcttgtgcttcatgatgctttgtgtttcctcccctttgatcaatcaggttcaagataaggctttgcaatctaaagaagtatatatcgccagggaagcgagatctaatacttatcattggaccgttcttttgattgctcaaactattgttgaattaccattagccatttccagttctaccttatttttcttgtgttgctacttctgttgcggtttcgaaacctctgcccgtgtagctggtgtcttttacttgaattatattttattttccatgtattatttgagttttgggttgtggcttttatattctgcccccgatttacaaactgccgctgtctttgttgccttcctctatagtttcacagcttctttctgtggcgttatgcaaccatactctttattcccaagattttggacattcatgtacagggtttctccatacacgtatttcattgaaactttcgtaagcttacttctccatgacagagaagtaaactgctccacaagtgaaatggtaccaagccaacctgtaatgggtcaaacctgcggtcagtttatgaaaccctttattgatgaatttggtgggaaattacacatcaataacacatacaccgtctgcgcctactgcatgtacactgttggggatgacttccttgctcaagaaaatatgagttatcatcacagatggagaaattttggttttgaatgggttttcgtttgctttaacattgccgccatgtttgtgggcttctacttgacctacatcaaaaaaatttggccttctgtgattgatggtataaagaagtgtatcccaagcatgaggagatccaaaacatctcataatccaaacgaacaaagcgtatga

SEQ ID NO: 5601 - DNA, 342 bp, Saccharomyces cerevisiae
atgtgcctaggtaagctgtacttcgaacagctaatattagtaagatgcataaaggggcgtcaaagtggaaatataacgacaggagaatctcggtgtgtaagttggaatgtgtattgcaccacttccatgattgggcttttttcctggcgcaaaatgttgctttttcaacatttttcttatacgcagagagagaatcgtcagataggtggtaaaacttggagcctaattagctcattatttcatttgaacgagacattggcttctgccctacatcacccatacgagacattggccttatacgaggcgtacttcgccttgcgggaaaaaaaatttcttttgtaa

SEQ ID NO: 5602 - DNA, 342 bp, Artificial Sequence
  Description of Artificial Sequence: Synthetic polynucleotide
atgtgcttgggtaagttgtacttcgaacagttgatattagtaagatgcataaaggggcgtcaaagtggaaatataacgacaggagaatctcgttgtgtaagttggaatgtgtattgcaccacttccatgattgggcttttttcctggcgcaaaatgttgctttttcaacatttttcttatacgcagagagagaatcgtcagataggtggtaaaacttggagcttaattagctctttatttcatttgaacgagacattggcttctgccttgcatcacccatacgagacattggccttatacgaggcgtacttcgccttgagagaaaaaaaatttcttttgtga

SEQ ID NO: 5603 - DNA, 810 bp, Saccharomyces cerevisiae
atgtctttcactaaaatcgctgccttattagctgttgccgctgcctccactcaattggtttctgctgaagttggacaatatgaaatcgtcgaatttgacgctattttggctgatgtcaaggccaatttggaacaatatatgtccttggcaatgaataatccagactttaccctaccatctggtgttttggatgtttaccaacatatgaccactgctactgatgattcctacaccagttatttcaccgaaatggactttgctcaaatcaccactgccatggttcaagtgccttggtactcttctagactggaacctgaaatcatcgctgctttacaaagcgcgggtatcagtattacctccttaggtcaaaccgtttccgaatctggttccgaatctgccactgcttcctcagacgcttcttctgcttctgaatcctcttcagctgcttcttcttctgcttctgaatcctcttcagctgcctcctcttctgcttctgaatcctcttcagctgcttcttcctctgcttcagaatcttcttctgctgcctcctcttctgcttctgaagctgctaagtcttctagctctgccaagtcttctggctcttctgctgcttcatctgctgcttcatctgcttcttccaaggcctcttctgcagcttcctcttctgcaaaggcctcctcttctgcagaaaaatctactaatagctcctcctctgctacctccaagaacgctggtgcagctatggacatgggcttcttctccgctggtgttggtgccgctattgccggtgccgctgctatgctcttatga

SEQ ID NO: 5604 - DNA, 810 bp, Artificial Sequence
  Description of Artificial Sequence: Synthetic polynucleotide
atgtctttcactaaaatcgctgccttattagctgttgccgctgcctccactcaattggtttctgctgaagttggacaatatgaaatcgtcgaatttgacgctattttggctgatgtcaaggccaatttggaacaatatatgtccttggcaatgaataatccagactttaccttgccatctggtgttttggatgtttaccaacatatgaccactgctactgatgattcctacaccagttatttcaccgaaatggactttgctcaaatcaccactgccatggttcaagtgccttggtactcttctagattagaacctgaaatcatcgctgctttacaaagcgcgggtatcagtattacctccttaggtcaaaccgtttccgaatctggttccgaatctgccactgcttccagtgacgcttcttctgcttctgaatcctcttctgctgcttcttcttctgcttctgaatcctcttctgctgcctcctcttctgcttctgaatcctcttctgctgcttcttcctctgcttctgaatcttcttctgctgcctcctcttctgcttctgaagctgctaagtcttctagctctgccaagtcttctggctcttctgctgcttcttctgctgcttcttctgcttcttccaaggcctcttctgcagcttcctcttctgcaaaggcctcctcttctgcagaaaaatctactaatagctcctcctctgctacctccaagaacgctggtgcagctatggacatgggcttcttctccgctggtgttggtgccgctattgccggtgccgctgctatgctcttatga

SEQ ID NO: 5605 - DNA, 648 bp, Saccharomyces cerevisiae
atgggtgaagcactacgtagatcaaccaggattgcaatatccaaaagaatgttggaagaggaagagtccaaactggcccctatttcgacaccggaagtgcctaagaagaaaatcaagacgggtcctaaacataacgctaatcaagcagtagttcaagaggcaaataggtcatctgatgttaacgaattagagataggcgatcctattcctgatttgagtcttttaaatgaagataatgactctatctccttgaagaaaatcaccgaaaataacagagttgtggtgttttttgtgtatcccagggcaagcacgcctggttgtactagacaggcctgtggatttcgtgacaattaccaggaactcaagaaatatgctgctgtctttggactgagtgcagattctgtgacatcccagaaaaagtttcagagtaaacaaaatttgccatatcatttactaagcgatccaaagagagagtttattgggttgctaggagccaaaaaaacgccactttctggttctattagatcgcatttcatttttgttgatgggaagttaaaattcaaaagagttaagatatcaccagaagttagtgtaaatgacgccaaaaaggaggttttagaagtcgctgaaaagtttaaagaagaatga

SEQ ID NO: 5606 - DNA, 648 bp, Artificial Sequence
  Description of Artificial Sequence: Synthetic polynucleotide
atgggtgaagcattgcgtagatctaccaggattgcaatatccaaaagaatgttggaagaggaagagtccaaattggcccctatttctacaccggaagtgcctaagaagaaaatcaagacgggtcctaaacataacgctaatcaagcagtagttcaagaggcaaataggtcttctgatgttaacgaattagagataggcgatcctattcctgatttgagtcttttaaatgaagataatgactctatctccttgaagaaaatcaccgaaaataacagagttgtggtgttttttgtgtatcccagggcaagcacgcctggttgtactagacaggcctgtggatttcgtgacaattaccaggaactcaagaaatatgctgctgtctttggattgagtgcagattctgtgacatcccagaaaaagtttcagagtaaacaaaatttgccatatcatttattaagcgatccaaagagagagtttattgggttgttgggagccaaaaaaacgccactttctggttctattagaagccatttcatttttgttgatgggaagttaaaattcaaaagagttaagatatctccagaagttagtgtaaatgacgccaaaaaggaggttttagaagtcgctgaaaagtttaaagaagaatga

SEQ ID NO: 5607 - DNA, 546 bp, Saccharomyces cerevisiae
atgccgaaagtaattctggagtctcattcaaagccaacagactcagtttttctacaaccatggataaaggcattaattgaagacaactcggagcatgatcaatatcatccctctggccatgtaattcctagcttgaccaagcaggacttagcgctaccgcatatgagcccgacaattttaaccaatccgtgccatttcgccaaaattacaaaattttataacgtttgcgactacaaggtatacgcatcgataagagattcctcacaccaaatacttgttgagttttcccaagagtgtgtatctaattttgaaaggactcataattgcaggatcacatctgagacgaccaattgcttaatgatcattggcgatgctgacttagtctacgtaacaaattctcgagcaatgtctcacttcaaaatttgcctaagcaacatttcgtccaaagaaatagtgcccgttctcaatgtaaaccaggccacgatatttgatattgatcaagtcggatcgttaagtactttcccatttgtatataaatatttatga

SEQ ID NO: 5608 - DNA, 546 bp, Artificial Sequence
  Description of Artificial Sequence: Synthetic polynucleotide
atgccgaaagtaattttagagtctcattctaagccaacagactctgtttttttgcaaccatggataaaggcattaattgaagacaacagtgagcatgatcaatatcatccctctggccatgtaattcctagcttgaccaagcaggacttagcgttaccgcatatgagcccgacaattttaaccaatccgtgccatttcgccaaaattacaaaattttataacgtttgcgactacaaggtatacgcatctataagagattcctcccaccaaatacttgttgagttttcccaagagtgtgtatctaattttgaaaggactcataattgcaggatcacatctgagacgaccaattgcttaatgatcattggcgatgctgacttagtctacgtaacaaattctagagcaatgtctcacttcaaaatttgcttaagcaacatttcttccaaagaaatagtgcccgttctcaatgtaaaccaggccacgatatttgatattgatcaagtcggatctttaagtactttcccatttgtatataaatatttatga

SEQ ID NO: 5609 - DNA, 2085 bp, Saccharomyces cerevisiae
atgtccgaacaacactctgtcgcagtcggtaaagctgctaatgagcacgagactgcccctaggagaaatgttagagtcaagaagcggcccttaattagaccattgaactcgtcagcatctacgctgtatgaatttgccctagagtgtttcaacaagggtggaaaacgagatggtatggcttggagagatgtcatcgagattcatgagacaaagaaaaccattgtgagaaaggtagacggcaaggataaatctatagaaaagacatggctgtattatgaaatgtcaccatataaaatgatgacctaccaggaactgatctgggtgatgcacgatatgggccgtgggctggcaaaaataggcatcaagcccaatggagaacacaaattccacatcttcgcatctacttcccataaatggatgaagattttccttggttgcatatcccagggtatccccgtagtaaccgcgtatgatactttgggtgagagcggtttgattcactccatggttgaaaccgagtctgctgctattttcactgataatcaattattggctaaaatgatagtgcctttgcaatctgctaaagatatcaaatttcttatccataacgaacctatcgaccccaatgacagaagacaaaacggcaaactttacaaggctgctaaggatgccattaataagatcagagaagttaggccagacataaaaatttatagttttgaagaagttgtcaagataggtaaaaaaagtaaagatgaggtcaaacttcatccacctgagccaaaagatttggcttgtatcatgtacacctcgggctcgatcagtgcaccaaaaggtgtagtattgactcattataatattgtttcgggtatcgctggtgtaggtcacaacgtctttggatggatcggctctacagaccgtgttttgtcgttcttgccattggctcatatttttgaactggtctttgaattcgaagccttttactggaacggtattcttgggtacggtagtgttaagactttgactaatacttcgactcgtaattgtaagggtgacctggttgagtttaagcctactattatgatcggtgtggctgccgtttgggaaactgtgagaaaagctattttggaaaagatcagcgatttaactcccgtactccaaaagattttttggtctgcctatagtatgaaagaaaagagtgtaccatgcaccgggtttttaagtcgtatggtcttcaagaaagtcagacaagccaccggtggtcatcttaagtatattatgaacggtgggtctgcgatcagtattgatgctcagaaattcttttctatcgtcctgtgtcctatgattatcggttacggccttactgaaacagttgcgaatgcttgtgttttggagcctgatcatttcgaatatggtatagttggtgatcttgttggatcggtcactgccaaattggtggatgttaaggacctaggttattatgcaaaaaacaatcaaggtgaattgcttctaaagggtgcgccggtctgttctgaatattataagaatccaatagaaacggcggtctctttcacttacgatggatggtttcgtactggtgatattgttgaatggactcccaagggacaacttaaaattattgatagaagaaagaatttggttaaaaccctaaatggtgaatatattgcattagaaaagttagaatctgtttacaggtcaaactcctatgtgaaaaatatctgtgtttatgccgatgaaagtagggttaaaccggtgggtattgtggtacccaacccaggacccctatctaaatttgctgtcaaattgcgtattatgaaaaagggtgaagacatcgaaaactatatccatgacaaagcattacgaaatgctgttttcaaagagatgatcgcaacagccaaatctcaaggtttggttggtattgaactattatgtggtattgttttctttgatgaagaatggacacctgaaaatggctttgtcacatctgctcaaaaattaaagagaagagaaatcttagccgctgttaaatcagaagtcgaaagggtttacaaagaaaattcttag

SEQ ID NO: 5610 - DNA, 2085 bp, Artificial Sequence
  Description of Artificial Sequence: Synthetic polynucleotide
atgtccgaacaacactctgtcgcagtcggtaaagctgctaatgagcacgagactgcccctaggagaaatgttagagtcaagaagagacccttaattagaccattgaactcttctgcatctacgctttatgaatttgccttagagtgtttcaacaagggtggaaaaagagatggtatggcttggagagatgtcatcgagattcatgagacaaagaaaaccattgtgagaaaggtagacggcaaggataaatctatagaaaagacatggttatattatgaaatgtctccatataaaatgatgacctaccaggaattgatctgggtgatgcacgatatgggccgtgggttagcaaaaataggcatcaagcccaatggagaacacaaattccacatcttcgcatctacttcccataaatggatgaagattttccttggttgcatatcccagggtatccccgtagtaaccgcgtatgatactttgggtgagagcggtttgattcactccatggttgaaaccgagtctgctgctattttcactgataatcaattattggctaaaatgatagtgcctttgcaatctgctaaagatatcaaatttcttatccataacgaacctatcgaccccaatgacagaagacaaaacggcaaactttacaaggctgctaaggatgccattaataagatcagagaagttaggccagacataaaaatttatagttttgaagaagttgtcaagataggtaaaaaaagtaaagatgaggtcaaacttcatccacctgagccaaaagatttggcttgtatcatgtacacctctggctccatcagtgcaccaaaaggtgtagtattgactcattataatattgtttctggtatcgctggtgtaggtcacaacgtctttggatggatcggctctacagaccgtgttttgagtttcttgccattggctcatatttttgaattggtctttgaattcgaagccttttactggaacggtattcttgggtacggtagtgttaagactttgactaatacttctactcgtaattgtaagggtgacttggttgagtttaagcctactattatgatcggtgtggctgccgtttgggaaactgtgagaaaagctattttggaaaagatcagcgatttaactcccgtactccaaaagattttttggtctgcctatagtatgaaagaaaagagtgtaccatgcaccgggtttttaagtcgtatggtcttcaagaaagtcagacaagccaccggtggtcatcttaagtatattatgaacggtgggtctgcgatcagtattgatgctcagaaattcttttctatcgtcttatgtcctatgattatcggttacggccttactgaaacagttgcgaatgcttgtgttttggagcctgatcatttcgaatatggtatagttggtgatcttgttggatctgtcactgccaaattggtggatgttaaggacttgggttattatgcaaaaaacaatcaaggtgaattgcttttgaagggtgcgccggtctgttctgaatattataagaatccaatagaaacggcggtctctttcacttacgatggatggtttcgtactggtgatattgttgaatggactcccaagggacaacttaaaattattgatagaagaaagaatttggttaaaaccttgaatggtgaatatattgcattagaaaagttagaatctgtttacaggtctaactcctatgtgaaaaatatctgtgtttatgccgatgaaagtagggttaaaccggtgggtattgtggtacccaacccaggacccttatctaaatttgctgtcaaattgcgtattatgaaaaagggtgaagacatcgaaaactatatccatgacaaagcattaagaaatgctgttttcaaagagatgatcgcaacagccaaatctcaaggtttggttggtattgaattattatgtggtattgttttctttgatgaagaatggacacctgaaaatggctttgtcacatctgctcaaaaattaaagagaagagaaatcttagccgctgttaaaagtgaagtcgaaagggtttacaaagaaaattcttga

SEQ ID NO: 5611 - DNA, 300 bp, Saccharomyces cerevisiae
atggtaaacgtgaaagtggagtttctaggtggacttgatgctatttttggaaaacaaagagtacataaaattaagatggacaaagaagatcctgtcacagtgggcgatttgattgaccacattgtatctactatgatcaataaccctaatgacgttagtatcttcatcgaagatgattctataagacccggtatcatcacattaatcaacgacaccgattgggagctcgaaggcgaaaaagactacatattggaagacggtgacatcatctcttttacttcaacattacatggtggttaa

SEQ ID NO: 5612 - DNA, 300 bp, Artificial Sequence
  Description of Artificial Sequence: Synthetic polynucleotide
atggtaaacgtgaaagtggagtttttaggtggacttgatgctatttttggaaaacaaagagtacataaaattaagatggacaaagaagatcctgtcacagtgggcgatttgattgaccacattgtatctactatgatcaataaccctaatgacgttagtatcttcatcgaagatgattctataagacccggtatcatcacattaatcaacgacaccgattgggagctcgaaggcgaaaaagactacatattggaagacggtgacatcatctcttttacttctacattacatggtggttga

SEQ ID NO: 5613 - DNA, 663 bp, Saccharomyces cerevisiae
atggaggaagaagaattaagtaaattgttggccaatgttaagatagatccgagcctaacatcaagaattagtcaaatagacagcttcaaactgtcggaattgatggttctaaagacagatattgagacacaactagaggcgtatttcagtgtgcttgagcagcaaggcatcggcatggactctgcgttggtgacgccagacgggtatcctcgttcggatgtcgatgtattgcaagtcactatgatcagaaagaatgttaatatgctgaagaatgatttaaatcaccttttgcaaagatcacacgtcttactaaaccagcactttgataatatgaacgttaagtcaaaccaagatgcaagaaggaataacgacgatcaagctattcagtataccatcccttttgcatttatcagtgaggtagtacccggtagcccttcagataaagcagacataaaggttgatgataagctgatttctattggtaatgtgcatgcggcaaaccactctaaacttcaaaacattcagatggttgtaatgaaaaatgaagacaggccacttcccgtccttctcttgagagaagggcaaatcctaaagacatcgctaacaccttcgagaaactggaatggtagaggtcttttgggttgtaggatacaagagctataa

SEQ ID NO: 5614 - DNA, 663 bp, Artificial Sequence
  Description of Artificial Sequence: Synthetic polynucleotide
atggaggaagaagaattaagtaaattgttggccaatgttaagatagatccgagcttaacatctagaattagtcaaatagacagcttcaaattatctgaattgatggttttgaagacagatattgagacacaattggaggcgtatttcagtgtgcttgagcagcaaggcatcggcatggactctgcgttggtgacgccagacgggtatcctcgttctgatgtcgatgtattgcaagtcactatgatcagaaagaatgttaatatgttgaagaatgatttaaatcaccttttgcaaagaagtcacgtcttattaaaccagcactttgataatatgaacgttaagtctaaccaagatgcaagaaggaataacgacgatcaagctattcagtataccatcccttttgcatttatcagtgaggtagtacccggtagcccttctgataaagcagacataaaggttgatgataagttgatttctattggtaatgtgcatgcggcaaaccactctaaacttcaaaacattcagatggttgtaatgaaaaatgaagacaggccacttcccgtccttctcttgagagaagggcaaatcttgaagacatctttaacaccttccagaaactggaatggtagaggtcttttgggttgtaggatacaagagctttga

SEQ ID NO: 5615 - DNA, 1122 bp, Saccharomyces cerevisiae
atgacacagactgataatcctgtccccaactgcggtttactgcccgagcagcagtattgctctgcagaccatgaagagccactgttgttgcatgaagaacaattgatattccctgatcattcctcccaactgtcctcagcagatatcatcgagcccatcaagatgaacagcagtactgagtcaattatagggacaacgctgcgaaagaaatgggtaccactatcctcaactcagatcacagctctttccggcgcatttgctggattcttatcaggtgtggcagtatgtcccctcgatgttgccaaaacgcgattgcaagcacaaggactacaaactaggttcgagaacccctactatagggggataatggggacattaagtactatagtaagagacgaaggcccgcggggcctctacaaagggctggtaccgattgtcctgggctacttcccaacctggatgatatacttctccgtgtatgaattcagcaaaaagttctttcacggcatcttcccacagtttgattttgttgctcagtcatgtgctgcaatcacggcaggcgctgcatctaccaccttgaccaacccaatctgggttgtgaagacaagacttatgctgcaatcaaacctcggtgagcaccccacacattacaaaggcactttcgatgcattcagaaagctattttatcaggaagggtttaaagcattatatgcggggctggtcccctcattattagggctatttcatgtggctatccatttccctatatacgaagatttgaaggtaagatttcactgctattctcgggagaacaacaccaactccatcaacttgcaacggttgatcatggcatcgtccgtctctaagatgattgcatcagcagtaacatatccgcacgaaattttacgaaccagaatgcaactgaaatcagatataccagattccattcaacgacgtctgttccccctcattaaagcaacttatgcacaagagggactaaagggattttattctggatttactactaacctagtacgaaccattccggcctcggcaatcactctagtgtcctttgagtatttcagaaaccgcctagaaaatattagcactatggtaatttaa

SEQ ID NO: 5616 - DNA, 1122 bp, Artificial Sequence
  Description of Artificial Sequence: Synthetic polynucleotide
atgacacagactgataatcctgtccccaactgcggtttattgcccgagcagcagtattgctctgcagaccatgaagagccattgttgttgcatgaagaacaattgatattccctgatcattcctcccaattatcctctgcagatatcatcgagcccatcaagatgaacagcagtactgagtctattatagggacaacgcttagaaagaaatgggtaccattgtccagcactcagatcacagctctttccggcgcatttgctggattcttatctggtgtggcagtatgtcccctcgatgttgccaaaacgagattgcaagcacaaggattacaaactaggttcgagaacccctactatagggggataatggggacattaagtactatagtaagagacgaaggcccgcgcggcctctacaaagggttggtaccgattgtccttggctacttcccaacctggatgatatacttctccgtgtatgaattcagcaaaaagttctttcacggcatcttcccacagtttgattttgttgctcagtcctgtgctgcaatcacggcaggcgctgcatctaccaccttgaccaacccaatctgggttgtgaagacaagacttatgttacaaagtaacctcggtgagcaccccacacattacaaaggcactttcgatgcattcagaaagttattttatcaggaagggtttaaagcattatatgcggggttagtcccctctttattagggttgtttcatgtggctatccatttccctatatacgaagatttgaaggtaagatttcactgctattctagagagaacaacaccaactccatcaacttgcaaagattgatcatggcatcttccgtctctaagatgattgcatctgcagtaacatatccgcacgaaattttaagaaccagaatgcaattgaaatctgatataccagattccattcaacgtcgtttattccccctcattaaagcaacttatgcacaagagggattgaagggattttattctggatttactactaacttggtaagaaccattccggcctctgcaatcactttggtgtcctttgagtatttcagaaaccgcttagaaaatattagcactatggtaatttga

SEQ ID NO: 5617 - DNA, 2106 bp, Saccharomyces cerevisiae
atgaaaatgaatctgaaaaggctcgtagttaccttcttctcatgcatcacctttctgctgaaattcactatagccgccgctgaaccaccagagggctttccagagcccttaaatccaacaaacttcaaagaagagctatctaaggggctgcatattattgacttctatagtccatactgtccgcactgcaaacatttagcacctgtttggatggaaacatgggaggagtttaaagaggagagcaaaacactgaacataacattttcacaggttaactgcatcgagagcgccgatttgtgtggagatgaaaatattgaatacttccctgaaattagactttataacccctcaggatacatcaaatcgttcactgaaacaccgaggaccaaagaatcattaattgcatttgcacgcagggagtctatggacccaaataacctcgatactgatctggattctgctaaaagtgagagccagtatctcgaaggctttgattttctcgagctgatcgctggtaaggcgactaggccacatttggtttccttctggccaacaaaagatatgaaaaatagcgatgattcactagaattcaaaaactgtgacaaatgccatgaattccaaaggacttggaagatcatttcaagacagttagccgtggatgatatcaacacgggccacgttaattgcgaatctaatccaacaatctgtgaagaactgggctttggcgacttggtgaaaataaccaaccacagagccgatagagaacccaaggtagcattagtcctacccaataaaacctcaaataatttgttcgactatcccaatggctactcagcgaagtcagatggctatgtagattttgccaggaggacttttacaaacagtaaatttcccaatataacagaaggggagctcgaaaaaaaagcaaacagagacattgattttctgcaagaaaggggacgagtaactaataatgatatccatttagttttttcatatgaccccgaaactgttgttattgaagattttgacattttggagtatttaatcgagcctttgtcaaaaattccaaacatatatttgcaccaaattgacaagaatctaataaatttgtcacgtaatctttttggaagaatgtatgaaaagatcaactacgacgccagccaaactcaaaaggtttttaacaaagaatactttactatgaatacggttacgcaactcccaacttttttcatgtttaaagatggtgatcccatatcctatgttttccccggatactccacaacagaaatgagaaatattgatgccattatggattgggtaaaaaagtattctaatcccttagttaccgaagttgactcttctaatttgaaaaaattaatttccttccaaaccaagagctacagtgatttagcaattcagttaataagtagcactgaccacaaacatatcaaaggaagcaacaagcttattaaaaacttgctcctcgcaagttgggagtatgaacatattcggatggaaaataacttcgaagaaattaatgagagaagggcaaggaaagcagacgggatcaagaaaataaaggaaaaaaaggctccggctaacaaaattgttgataaaatgcgtgaagagattccccatatggatcaaaaaaaattgttattaggatatttagatatttcaaaggagaagaatttttttagaaaatatggtattactggagaatataaaattggtgatgtgattatcattgataaatcaaataattactactacaataaagataattttggcaactccttgacttctaacaaccctcaattgctgagagaagcattcgtgtccttaaatattccatcaaaagctctatacagctctaagttgaaggggagattgataaattctccattccataatgtcctcagtttcctagacataatccacgggaacggcatgcccggttacttaattgttattgttttgtttatcgcaatactcaaaggtccatctatttacagaagatacaaagtaaggaaacactatagggcgaaaaggaacgctgtcggtatcctaggaaatatggagaaaaaaaaaaatcaagattaa

SEQ ID NO: 5618 - DNA, 2106 bp, Artificial Sequence
  Description of Artificial Sequence: Synthetic polynucleotide
atgaaaatgaatttgaaaaggctcgtagttaccttcttcagttgcatcacctttttattgaaattcactatagccgccgctgaaccaccagagggctttccagagcccttaaatccaacaaacttcaaagaagagctttctaaggggttgcatattattgacttctatagtccatactgtccgcactgcaaacatttagcacctgtttggatggaaacatgggaggagtttaaagaggagagcaaaacattgaacataacattttcccaggttaactgcatcgagagcgccgatttgtgtggagatgaaaatattgaatacttccctgaaattagactttataaccccagtggatacatcaaatctttcactgaaacaccgaggaccaaagaatctttaattgcatttgcacgcagggagtctatggacccaaataacctcgatactgatttggattctgctaaaagtgagagccagtatctcgaaggctttgattttctcgagttgatcgctggtaaggcgactaggccacatttggtttccttctggccaacaaaagatatgaaaaatagcgatgattctttggaattcaaaaactgtgacaaatgccatgaattccaaaggacttggaagatcatttctagacagttagccgtggatgatatcaacacgggccacgttaattgcgaatctaatccaacaatctgtgaagaattaggctttggcgacttggtgaaaataaccaaccacagagccgatagagaacccaaggtagcattagtcttgcccaataaaacctctaataatttgttcgactatcccaatggctactctgcgaagagtgatggctatgtagattttgccaggaggacttttacaaacagtaaatttcccaatataacagaaggggagctcgaaaaaaaagcaaacagagacattgattttttgcaagaaaggggaagagtaactaataatgatatccatttagttttttcttatgaccccgaaactgttgttattgaagattttgacattttggagtatttaatcgagcctttgagtaaaattccaaacatatatttgcaccaaattgacaagaatttgataaatttgtctcgtaatctttttggaagaatgtatgaaaagatcaactacgacgccagccaaactcaaaaggtttttaacaaagaatactttactatgaatacggttacgcaactcccaacttttttcatgtttaaagatggtgatcccatatcctatgttttccccggatactccacaacagaaatgagaaatattgatgccattatggattgggtaaaaaagtattctaatcccttagttaccgaagttgactcttctaatttgaaaaaattaatttccttccaaaccaagagctacagtgatttagcaattcagttaataagtagcactgaccacaaacatatcaaaggaagcaacaagcttattaaaaacttgctcctcgcaagttgggagtatgaacatattagaatggaaaataacttcgaagaaattaatgagagaagggcaaggaaagcagacgggatcaagaaaataaaggaaaaaaaggctccggctaacaaaattgttgataaaatgcgtgaagagattccccatatggatcaaaaaaaattgttattaggatatttagatatttccaaggagaagaatttttttagaaaatatggtattactggagaatataaaattggtgatgtgattatcattgataaatctaataattactactacaataaagataattttggcaactccttgacttctaacaaccctcaattgttaagagaagcattcgtgtccttaaatattccatctaaagctttgtacagctctaagttgaaggggagattgataaattctccattccataatgtcctcagtttcttggacataatccacgggaacggcatgcccggttacttaattgttattgttttgtttatcgcaatactcaaaggtccatctatttacagaagatacaaagtaaggaaacactatagggcgaaaaggaacgctgtcggtatcttgggaaatatggagaaaaaaaaaaatcaagattga

SEQ ID NO: 5619 - DNA, 429 bp, Saccharomyces cerevisiae
atgagttcaagatttgcagggggaaacgcttatcaacgtgatactggtagaacacagttattcggaccggctgatggatcaaatagtctcgatgacaatgtatcatcagcgctagggagcacagataaattagactactcccaaagtactttggcatctcttgaatctcaaagtgaggaacagatgggagctatgggtcagagaataaaagcactcaagtcattatcgttgaagatgggtgatgagattagaggcagcaatcaaactattgaccagcttggtgatactttccataacacttctgtaaaactcaaaaggacttttggaaacatgatggagatggccagaagatctgggatcagtataaaaacatggttaataatattttttatggtaggcgtgctatttttttgggtatggattacataa

SEQ ID NO: 5620 - DNA, 429 bp, Artificial Sequence
  Description of Artificial Sequence: Synthetic polynucleotide
atgagtagtagatttgcagggggaaacgcttatcaacgtgatactggtagaacacagttattcggaccggctgatggaagtaatagtctcgatgacaatgtatcttctgcgttggggagcacagataaattagactactcccaaagtactttggcatctcttgaatctcaaagtgaggaacagatgggagctatgggtcagagaataaaagcactcaagtctttatctttgaagatgggtgatgagattagaggcagcaatcaaactattgaccagcttggtgatactttccataacacttctgtaaaactcaaaaggacttttggaaacatgatggagatggccagaagatctgggatcagtataaaaacatggttaataatattttttatggtaggcgtgctttttttttgggtatggattacatga

SEQ ID NO: 5621 - DNA, 882 bp, Saccharomyces cerevisiae
atggaggaacaggagataggcgttcctgcggcctctttggcaggaataaaacatatcatattgatcctttccggaaaaggtggtgtcggtaaaagttcggtaacgacacagactgcgctgactctttgcagtatgggcttcaaagttggagttttagatattgatttaacagggccatccttaccgaggatgtttggcctagagaacgaatctatatatcaaggtcctgaaggttggcaacctgtgaaagtggagacaaactctactggctctcttagtgtaatatcattggggtttctactaggtgatagagggaacagcgtgatatggaggggtcctaagaagacttctatgataaaacaattcatctctgacgtcgcctggggtgaactggattacttactgatcgatacccctccgggaacgtcggatgaacatatatcgattgcagaggagctgagatattccaaaccagatggtggtattgtagtaactaccccacagagtgttgcaacagctgatgtcaaaaaagaaatcaatttctgcaagaaggtcgatttaaagatcctcggtataattgaaaacatgtcagggtttgtatgcccgcattgtgctgagtgtacaaatatcttttccagtgggggtggtaaaagattatcggagcaattttctgtcccataccttggtaacgttcctatagatccaaaatttgtagaaatgattgagaatcaagtttcaagtaaaaaaacgcttgtagaaatgtacagagaatcatctctttgtcccatttttgaagaaataatgaagaaactgaggaaacaagacactacaacccctgttgtggataaacacgagcaaccccagatagaatctccaaaataa

SEQ ID NO: 5622 - DNA, 882 bp, Artificial Sequence
  Description of Artificial Sequence: Synthetic polynucleotide
atggaggaacaggagataggcgttcctgcggcctctttggcaggaataaaacatatcatattgatcctttccggaaaaggtggtgtcggtaaaagttctgtaacgacacagactgcgttgactctttgcagtatgggcttcaaagttggagttttagatattgatttaacagggccatccttaccgaggatgtttggcttagagaacgaatctatatatcaaggtcctgaaggttggcaacctgtgaaagtggagacaaactctactggctctcttagtgtaatatctttggggtttttattgggtgatagagggaacagcgtgatatggaggggtcctaagaagacttctatgataaaacaattcatctctgacgtcgcctggggtgaattagattacttattgatcgatacccctccgggaacgtctgatgaacatatatctattgcagaggagttaagatattccaaaccagatggtggtattgtagtaactaccccacagagtgttgcaacagctgatgtcaaaaaagaaatcaatttctgcaagaaggtcgatttaaagatcctcggtataattgaaaacatgagtgggtttgtatgcccgcattgtgctgagtgtacaaatatcttttccagtgggggtggtaaaagattatctgagcaattttctgtcccataccttggtaacgttcctatagatccaaaatttgtagaaatgattgagaatcaagtttctagtaaaaaaacgcttgtagaaatgtacagagaaagctctctttgtcccatttttgaagaaataatgaagaaattgaggaaacaagacactacaacccctgttgtggataaacacgagcaaccccagatagaatctccaaaatga

SEQ ID NO: 5623 - DNA, 210 bp, Saccharomyces cerevisiae
atgactcgtgatacacccgaagatgtcagtactgcaggcgcaaaggatattttagatgttttgaacctactaaaaggaggagaagagaaaatctcggaagtcgaacttaagttggatgaaatggaaaagaaaatggactctctgttagttcagttagaagatctacacagggacaacaatgatttggcaaaaagttccagccaaaaatag

SEQ ID NO: 5624 - DNA, 210 bp, Artificial Sequence
  Description of Artificial Sequence: Synthetic polynucleotide
atgactcgtgatacacccgaagatgtcagtactgcaggcgcaaaggatattttagatgttttgaacttattgaaaggaggagaagagaaaatcagtgaagtcgaacttaagttggatgaaatggaaaagaaaatggactctttattagttcagttagaagatttacacagggacaacaatgatttggcaaaaagttccagccaaaaatga

SEQ ID NO: 5625 - DNA, 2841 bp, Saccharomyces cerevisiae
atgagactcttcatcggtagaagatcacggtcgattgtaatatcttccaacaactactgtttatccttccagcgtttgcgcagcataccaggtgccagttctcagcagcgtcaattaagtaaaactcctagcgtaacaatcaagtcctaccctgacacagatctttcaagtgatagtaactatctcgaagtcaaaagttgcatatttaatggattattagggctcgtttgtcttaatggtgatatatatgttgccgtcatatctggtgttcagaatgttgggtttcctcgatggaaactgatagatcatcaagttaggccttcggagagcatttataaagtattggatgttgacttttacagcttagaaaatgatgttttcgactacctcctctgcgagagatcagagcaaaactatgataaattgattcatgagcatccttgcggccccctgaaaaaactgtttagtgatggaacattctactattctagagatttcgacatctctaatatcgtgaaaaaccatggtttatcacataacttagaatataccgtagataatcaagatttatcatttatttggaatgctaacttagcaagtgaggtaatcaactggagaagcaagatttcaaatgaggagaaacaactttttgccaacgcagggttcttaacatttgtaattcggggttattgcaagacagcattaatagaagacggcccaaatacagcctctataaccattatttccagaatttcgactgagagcaagcaggatacgctagaattggagggtattagtgaagatgggagagtgtcgctatttgttgagacagaaattgtagtaaccacagaaaagtttattttttcttatactcaagtgaacggaagcattcctcttttttgggaatctgtagaaagtcaactgttgtatggaaaaaaaattaaggtaacaaaagattctattgaagctcagggagcttttgacaggcattttgataatttaacctcaaagtatggtgttgtgagtatcgttaatatcataaaacctaaaagcgaatcacaagaaaagttagcactgacgtacaaggattgtgctgaatcaaagggaataaaaataacaaatatagaatacagctcaagcgttctgacaaagtctccccacaaattactttatttattaaaacaggatatttacgagtttggagcgtttgcctatgatatctctaggggcatctactttgcaaaacaaacgggggtattaagaataagcgcatttgattcaattgaaaaacctaacacagttgaaaggttagtgagcaaggaggtacttgaattaaccacaaatgaaattgatgtatttgaattgacttccccattcttggacgcacatgataagctatggtcagaaaactattactggcttgatcgaacgtatactaagcacacgaagaattctggtaaatatacaaaggtttattcgaagttatttggttcccgagttagattatacgacccgctccatatctacatctctcagtatttaaagcaattaaggtcaaaatatacgtttgagaaagacatctcaatttttgcaggtacatttaatataagtggtaaaattccaaaagatgatataaaagattggatatttccaaaatcaatgtccaaggaggatgaaatggctgatctttatgttatcggattagaagaagtggtagaacttaccccaggtcatatgcttgctaccgatccatatgtccgacaattttgggagaagaagatattaacactattaaatgggcccggacgcaaaaaaaaatatatccgtttatggagtacacagttgggtggtattttactattattattcatgaatgaaacggaatattccaaggtaaagcatattgagggggatgttaaaaaaaccgggtttggaggaatggcttctaataaaggagctgtcgcggttagttttaaatactcagctacaagattttgcgtactagtatctcatttagcggcaggcttagaaaatgttgaacaaaggcataatgattataagacgattgcgaaaagcatacgattttctaaaggattacgaataaaggatcacgatgcaattatttggatgggcgatttcaattacagaatattgatgtcaaacgaagatgttagacgaaaaattgtttctaaagaatatgccagcctatttgaaaaggatcaacttaatcaacaaatgatcgcaggtgagtcttttccatatttccatgaaatggcgattgatttcccacctacctataaattcgacccaggaactaaaaactacgacacgagcgaaaaaatgagaataccagcatggactgataggattttaagtaggggagaagtactagaacagttagaatataaatgctgtgaagatatactattttccgatcatcggcccgtatatgccatatttagggctagagtgactgtagtggatgaacaaaaaaagactactttgggtacgcaaatctacgagaagattatggaaaggctagagggattggatgatgatgagaaaattgcagttttgagtgatgatgcatttgttatcgaaagttttgagggcagtgattcgatagctggccctacgcattctccgacaccaattcccgagcccaaaagaggtagaaagttaccaccacctagttcggatttaaaaaaatggtggattggaagtgggaagcaagttaaagtagttcttgacgtagacccggccgtttacatgattaatcctaaaagagatcccaatccattcgttgagaacgaagatgagccactttttatagaaaggtaa

SEQ ID NO: 5626 - DNA, 2841 bp, Artificial Sequence
  Description of Artificial Sequence: Synthetic polynucleotide
atgagactcttcatcggtagaagatctaggtctattgtaatatcttccaacaactactgtttatccttccagcgtttgcgcagcataccaggtgccagttctcagcagcgtcaattaagtaaaactcctagcgtaacaatcaagtcctaccctgacacagatctttccagtgatagtaactatctcgaagtcaaaagttgcatatttaatggattattagggctcgtttgtcttaatggtgatatatatgttgccgtcatatctggtgttcagaatgttgggtttcctcgttggaaattgatagatcatcaagttaggccttctgagagcatttataaagtattggatgttgacttttacagcttagaaaatgatgttttcgactacctcctctgcgagagaagtgagcaaaactatgataaattgattcatgagcatccttgcggccccttgaaaaaattatttagtgatggaacattctactattctagagatttcgacatctctaatatcgtgaaaaaccatggtttatctcataacttagaatataccgtagataatcaagatttatcttttatttggaatgctaacttagcaagtgaggtaatcaactggagaagcaagatttctaatgaggagaaacaactttttgccaacgcagggttcttaacatttgtaattagaggttattgcaagacagcattaatagaagacggcccaaatacagcctctataaccattatttccagaatttctactgagagcaagcaggatacgttagaattggagggtattagtgaagatgggagagtgtctttatttgttgagacagaaattgtagtaaccacagaaaagtttattttttcttatactcaagtgaacggaagcattcctcttttttgggaatctgtagaaagtcaattattgtatggaaaaaaaattaaggtaacaaaagattctattgaagctcagggagcttttgacaggcattttgataatttaacctccaagtatggtgttgtgagtatcgttaatatcataaaacctaaaagcgaatctcaagaaaagttagcattgacgtacaaggattgtgctgaatccaagggaataaaaataacaaatatagaatacagcagcagcgttttgacaaagtctccccacaaattactttatttattaaaacaggatatttacgagtttggagcgtttgcctatgatatctctaggggcatctactttgcaaaacaaacgggggtattaagaataagcgcatttgattctattgaaaaacctaacacagttgaaaggttagtgagcaaggaggtacttgaattaaccacaaatgaaattgatgtatttgaattgacttccccattcttggacgcacatgataagttatggtctgaaaactattactggcttgatagaacgtatactaagcacacgaagaattctggtaaatatacaaaggtttattccaagttatttggttccagagttagattatacgacccgctccatatctacatctctcagtatttaaagcaattaaggtccaaatatacgtttgagaaagacatctctatttttgcaggtacatttaatataagtggtaaaattccaaaagatgatataaaagattggatatttccaaaatctatgtccaaggaggatgaaatggctgatctttatgttatcggattagaagaagtggtagaacttaccccaggtcatatgcttgctaccgatccatatgtcagacaattttgggagaagaagatattaacattattaaatgggcccggacgcaaaaaaaaatatatccgtttatggagtacacagttgggtggtattttattattattattcatgaatgaaacggaatattccaaggtaaagcatattgagggggatgttaaaaaaaccgggtttggaggaatggcttctaataaaggagctgtcgcggttagttttaaatactctgctacaagattttgcgtattggtatctcatttagcggcaggcttagaaaatgttgaacaaaggcataatgattataagacgattgcgaaaagcataagattttctaaaggattaagaataaaggatcacgatgcaattatttggatgggcgatttcaattacagaatattgatgtccaacgaagatgttagaagaaaaattgtttctaaagaatatgccagcttgtttgaaaaggatcaacttaatcaacaaatgatcgcaggtgagtcttttccatatttccatgaaatggcgattgatttcccacctacctataaattcgacccaggaactaaaaactacgacacgagcgaaaaaatgagaataccagcatggactgataggattttaagtaggggagaagtattggaacagttagaatataaatgctgtgaagatatattgttttccgatcatcgtcccgtatatgccatatttagggctagagtgactgtagtggatgaacaaaaaaagactactttgggtacgcaaatctacgagaagattatggaaaggttagagggattggatgatgatgagaaaattgcagttttgagtgatgatgcatttgttatcgaaagttttgagggcagtgattctatagctggccctacgcattctccgacaccaattcccgagcccaaaagaggtagaaagttaccaccacctagttctgatttaaaaaaatggtggattggaagtgggaagcaagttaaagtagttcttgacgtagacccggccgtttacatgattaatcctaaaagagatcccaatccattcgttgagaacgaagatgagccactttttatagaaaggtga

SEQ ID NO: 5627 - DNA, 1542 bp, Saccharomyces cerevisiae
atggcagataaattaatggacaaaaattttgaagaactgtgctattcatgccgcactggtgatatggacaatgttgatagattgatttccacgggagtaaatgtgaatagtgttgacaagtttgacaattcgccactttttctggctagcctttgcgggcatgaagcagtcgtgaaacttcttctacagagaggagccgtctgtgatagagacagatatgaaggagctcgatgtatttatggagcattgaccgatactatcagagatacccttttaagttatgatatatccaaggctgtagatgtcaagcaaccctttgctactcatatctcatcgatgtataatgacgaaggcttccttaaaagagatatcacattcagagtttcgaatggaaaactgttcacagcgcataagttcttattatgtgcaaggagcgaaattctagcagaaaaaatggtgaatgagtgggcaaagcatgaaattgtttctcttgaagtgcgcccagatatatttgacatatttttgaaatttctttacttaattccgatcctgcaccaaattgaaccgggacaatatgaagaacttatagagctatctagtaaatttgatattgagttattgcccgaatttttagacaaagcaaggcataccgccgatcctacggaaaagtcgaggttaatgtcagattaccaatataagtttaccgaggttgcaagaagtcaacttttaatatttgtgaacaattgtatctttagatctactgttgatcttgctaatagtgaacgacgagttttttccttgatgaactgtccagcttatccggatgttcaacttatggtaaaaaaccgaaatggagccattcgaatatacccttgtcacctggctgttttgagccgcgcagaatatttcaaggtgatgttcacaaacaacttcaaggagaaagttacatatatcaaagccaagcacgttacaggaaagtataatagtatcattccacagctgacattacccaattgtgagtttgaggttgccgaaattattctccgctacttatatgcagataatacagacattccttggatgtatgccgtcgatgttttgttacttgccgatatacttttagaagaccgcttaaaaactatcgcttctacaattataacacaatcaaaagagtttattcagcaatacaatgtttttgacgtactctatttatcatgggaaataggagtggaacgcttagaacaatttgcagctaaatttatagctatacatttgcaagagttatataaagatccagagattaaaagggcaattatgttgagttcacaacgaatttctctccgccaggaaactgatactattgaactagtggatgacattaggtactatttgctccgaaaatattcttttgaaccggatgatgtggagctgttcgaaaaccaagacgatttagaatacctaaaacaagtagggtatttggagtacagaaaagatatgggtatgttagataatatcctagctgatctggaacttgatgtataa

SEQ ID NO: 5628 - DNA, 1542 bp, Artificial Sequence
  Description of Artificial Sequence: Synthetic polynucleotide
atggcagataaattaatggacaaaaattttgaagaattgtgctattcttgccgcactggtgatatggacaatgttgatagattgatttccacgggagtaaatgtgaatagtgttgacaagtttgacaattctccactttttttggctagcctttgcgggcatgaagcagtcgtgaaacttcttttacagagaggagccgtctgtgatagagacagatatgaaggagctcgttgtatttatggagcattgaccgatactatcagagatacccttttaagttatgatatatccaaggctgtagatgtcaagcaaccctttgctactcatatctcttctatgtataatgacgaaggcttccttaaaagagatatcacattcagagtttctaatggaaaattattcacagcgcataagttcttattatgtgcaaggagcgaaattttggcagaaaaaatggtgaatgagtgggcaaagcatgaaattgtttctcttgaagtgcgcccagatatatttgacatatttttgaaatttctttacttaattccgatcttgcaccaaattgaaccgggacaatatgaagaacttatagagctttctagtaaatttgatattgagttattgcccgaatttttagacaaagcaaggcataccgccgatcctacggaaaagtccaggttaatgagtgattaccaatataagtttaccgaggttgcaagaagtcaacttttaatatttgtgaacaattgtatctttagatctactgttgatcttgctaatagtgaaagaagagttttttccttgatgaactgtccagcttatccggatgttcaacttatggtaaaaaacagaaatggagccattagaatatacccttgtcacttggctgttttgagccgcgcagaatatttcaaggtgatgttcacaaacaacttcaaggagaaagttacatatatcaaagccaagcacgttacaggaaagtataatagtatcattccacagttgacattacccaattgtgagtttgaggttgccgaaattattctccgctacttatatgcagataatacagacattccttggatgtatgccgtcgatgttttgttacttgccgatatacttttagaagaccgcttaaaaactatcgcttctacaattataacacaaagtaaagagtttattcagcaatacaatgtttttgacgtactctatttatcttgggaaataggagtggaacgcttagaacaatttgcagctaaatttatagctatacatttgcaagagttatataaagatccagagattaaaagggcaattatgttgagttctcaaagaatttctctccgccaggaaactgatactattgaattagtggatgacattaggtactatttgctcagaaaatattcttttgaaccggatgatgtggagcttttcgaaaaccaagacgatttagaatacttgaaacaagtagggtatttggagtacagaaaagatatgggtatgttagataatatcttggctgatttggaacttgatgtatga

SEQ ID NO: 5629 - DNA, 753 bp, Saccharomyces cerevisiae
atgtcccaggaagagaaagtggatgctaaggcaaccttaaagactgaaatttcgaacaataaaaagaacgacaagcaagagctcgagctggatgaacttgtgggtaaactatctatcgagggcactccacaggtgtcgcaaaagctaagcaaggaggaaaaacacgctcatcaacttgaagctgactcgcgttctatctttgtcggtaacatcactccggatgtcaccccagagcaaatagaagatcatttcaaagactgtggccagataaaaagaataacacttctttatgataggaatacgggaacaccaaaaggctacggctatattgaatttgaaagtccggcatacagagaaaaagccctgcaattaaatggaggagaacttaaaggcaaaaaaattgctgtctccagaaaaagaactaacattccaggatttaataggcattacaactcgcaaaaccagtatttccaacaatggcaatggaattatcccttaatggcctaccccaatcccgataccttcccttattacccaccgtaccctccaaatcagtctccaaatcaaaatttcggatataataagaacaattattataggagtccttacaataacaagaatagaaccttccaaaaaaaacacttcaacagtgccaaagactctacaaaaaatattagatctacttcccaaaaacctgttgtcatgccgtctgacaacgttaaaagttctacccaagaaaaagattcgaaataa

SEQ ID NO: 5630 - DNA, 753 bp, Artificial Sequence
  Description of Artificial Sequence: Synthetic polynucleotide
atgtcccaggaagagaaagtggatgctaaggcaaccttaaagactgaaatttccaacaataaaaagaacgacaagcaagagctcgagttagatgaacttgtgggtaaattatctatcgagggcactccacaggtgagtcaaaagttgagcaaggaggaaaaacacgctcatcaacttgaagctgactctcgttctatctttgtcggtaacatcactccggatgtcaccccagagcaaatagaagatcatttcaaagactgtggccagataaaaagaataacacttctttatgataggaatacgggaacaccaaaaggctacggctatattgaatttgaaagtccggcatacagagaaaaagccttgcaattaaatggaggagaacttaaaggcaaaaaaattgctgtctccagaaaaagaactaacattccaggatttaataggcattacaactctcaaaaccagtatttccaacaatggcaatggaattatcccttaatggcctaccccaatcccgataccttcccttattacccaccgtaccctccaaatcagtctccaaatcaaaatttcggatataataagaacaattattataggagtccttacaataacaagaatagaaccttccaaaaaaaacacttcaacagtgccaaagactctacaaaaaatattagatctacttcccaaaaacctgttgtcatgccgtctgacaacgttaaaagttctacccaagaaaaagattctaaatga

SEQ ID NO: 5631 - DNA, 2982 bp, Saccharomyces cerevisiae
atggctagtgcagatgattactttagtgatttcgaagatgacgagctggataaactgtatgaaaaggctatcaataaatctgtgaaggaaactataacgagacgtgctgtaccagttcaaaaagaccttcatgataacgttttacctgggcagaaaactgtgtacgaagaaattcaaagagatgtcagttttggacccactcatcatgagcttgattacgatgctttgtcgttctacgtgtaccctacaaattacgaggtaagggattatcagtatacaattgttcacaaatcactgtttcaaaatacgttatgcgccatcccaacgggtatgggtaaaacgttcattgccagtacagtaatgttaaattattttcgttggaccaaaaaagccaaaataatctttactgctccaacaagacctttggtagcccagcaaattaaggcatgcttaggtataacaggaataccttcggatcaaactgctatattactcgataaaagcaggaaaaatagagaagaaatttgggccaataagagagttttctttgccacaccgcaagtagtggagaatgacttgaagaggggtgtattggatcctaaggatattgtatgtcttgtcatcgatgaagctcacagagctactggctcctctgcgtatacaaatgtggtaaaattcatagataggttcaattcatcatacagattattagcattgaccgctacaccagcctctgacctggaaggtgtccaagaagtggttaataacttagatatttccaagattgaaattaggactgaagaaagcatggatatcgtgaaatatatgaagaaaagaaaaaaggaaaaaattgaagtgccccttttgttggaaattgaagacataatcgaacaattaggtatggccgtcaaaccagtgcttcaacaggcaattgaactcggtatatatgaggaatgtgacccttcacaaataaacgccttcaaagccatgcaacaaagccaaaaaattattgctaaccctactatacctgaaggaattaagtggaggaacttctttattttacagttattgaacaatgtgggtcaaatgctaaagagattaaaaatttatggaataaggacatttttcaattacttccagaataaatgtacagaattcactacgaaatataatcttaaaaaatctactaataaaattgcagctgagttttattaccatccgattttgaaaaacatcaaaaatcaatgcgaaaattatttaagtgatccaaagtttgtcggtcatgggaagttacaatgtgttagagatgaactaatggacttttttcagaaaaggggttccgactcgagggttattatttttacagaattaagagaaagcgcacttgaaattgtgaagttcatagactcggtagctgacgatcaaatcaggcctcatatttttattggacaagctcgtgcaaaagaaggttttgatgaggtcaaatacacaagaaaacatgcgccaaagggaaggaagaaggtagagagattgcataggcaagagcaagagaaatttttggaagctgaacgaactaagagagcggcgaatgataaacttgaaagaagtgccagacgaacggggagctctgaagaggctcagattagcggaatgaaccaaaaaatgcaaaaagaggttatccataatttcaaaaagggtgaatataatgttctcgtttgtacatcaattggagaagaaggtttggatatcggagaagttgatttaataatctgttatgatactacaagtagtccaatcaaaaatattcagcgtatgggtagaacaggcagaaaacgagatggtaagatagtactactgtttagcagtaatgaatcatacaaattcgagcgtgctatggaagactattcaaccctgcaagcgcttatatccaagcaatgcattgactataaaaaatcagatcggataatccctgaagacattattccggaatgtcacgagacattgatcacgattaatgatgaaaacgaaataattaatgaaatggaagatgttgacgaagttattcgttatgcgactcagtgtatgatgggcaaaaaggtgaagccaaaaaaagccataacaaagaagaagagagttcaggaaaataaaaaaccgaagaagttctttatgcctgataatgttgagaccagtattgttagtgcaagcactttaattaataagttcttggtgaatgaaagtggcgggaaacaactagtaacgagtaatgaaaacccaagtaagaagcggaagatttttaaagctttggataatctggagaatgattcaaccgaggaagcttcctcctcattagaaactgaagatgaagaagtcagtgatgataataatgttttcattgcggaagggcagaatggatgccaaaaagatttggaaactgccattattcgcactggcgaaagtcttaccacactcaagccacttcataattttgaacgccctaatatggctttatttgtgaatgattgtggtcttccaactaaaatcgagaaaaatgtgaaagacatccgaggaaatcaacacaaccttgaaaaagaaaagagctgtactgttgacaagaataacatggtattgagtttggacgattggaattttttcagaaaccgctatatcccagaaggtgtttccttcgatgtggagcccaattttgtacaatacaccaaaggggtaaaagttccgcattgtcacaaagtttcaaaaatcattacgttatttaacgacgagagtaatgataataagaagaggacaattgatatgaactatactaaatgtttggcgagaggcatgttacgagacgaaaaaaaatttgtaaaagttaacgataaaagtcaagtcgataacaacagtgtcaaccatgattcatcccaatcttttaccttatcgaacgcagaattagatgacatactgggctcagattctgatttttga

SEQ ID NO: 5632 - DNA, 2982 bp, Artificial Sequence
  Description of Artificial Sequence: Synthetic polynucleotide
atggctagtgcagatgattactttagtgatttcgaagatgacgagttagataaactttatgaaaaggctatcaataaatctgtgaaggaaactataacgagacgtgctgtaccagttcaaaaagaccttcatgataacgttttacctgggcagaaaactgtgtacgaagaaattcaaagagatgtcagttttggacccactcatcatgagcttgattacgatgctttgagtttctacgtgtaccctacaaattacgaggtaagggattatcagtatacaattgttcacaaatctttatttcaaaatacgttatgcgccatcccaacgggtatgggtaaaacgttcattgccagtacagtaatgttaaattattttcgttggaccaaaaaagccaaaataatctttactgctccaacaagacctttggtagcccagcaaattaaggcatgcttaggtataacaggaataccttctgatcaaactgctatattactcgataaaagcaggaaaaatagagaagaaatttgggccaataagagagttttctttgccacaccgcaagtagtggagaatgacttgaagaggggtgtattggatcctaaggatattgtatgtcttgtcatcgatgaagctcacagagctactggctcctctgcgtatacaaatgtggtaaaattcatagataggttcaattcttcctacagattattagcattgaccgctacaccagcctctgacttggaaggtgtccaagaagtggttaataacttagatatttccaagattgaaattaggactgaagaaagcatggatatcgtgaaatatatgaagaaaagaaaaaaggaaaaaattgaagtgccccttttgttggaaattgaagacataatcgaacaattaggtatggccgtcaaaccagtgcttcaacaggcaattgaactcggtatatatgaggaatgtgacccttctcaaataaacgccttcaaagccatgcaacaaagccaaaaaattattgctaaccctactatacctgaaggaattaagtggaggaacttctttattttacagttattgaacaatgtgggtcaaatgttgaagagattaaaaatttatggaataaggacatttttcaattacttccagaataaatgtacagaattcactacgaaatataatcttaaaaaatctactaataaaattgcagctgagttttattaccatccgattttgaaaaacatcaaaaatcaatgcgaaaattatttaagtgatccaaagtttgtcggtcatgggaagttacaatgtgttagagatgaattgatggacttttttcagaaaaggggttccgacagcagggttattatttttacagaattaagagaaagcgcacttgaaattgtgaagttcatagactctgtagctgacgatcaaatcaggcctcatatttttattggacaagctcgtgcaaaagaaggttttgatgaggtcaaatacacaagaaaacatgcgccaaagggaaggaagaaggtagagagattgcataggcaagagcaagagaaatttttggaagctgaaagaactaagagagcggcgaatgataaacttgaaagaagtgccagaagaacggggagctctgaagaggctcagattagcggaatgaaccaaaaaatgcaaaaagaggttatccataatttcaaaaagggtgaatataatgttctcgtttgtacatccattggagaagaaggtttggatatcggagaagttgatttaataatctgttatgatactacaagtagtccaatcaaaaatattcagcgtatgggtagaacaggcagaaaaagagatggtaagatagtattgttatttagcagtaatgaatcttacaaattcgagcgtgctatggaagactattctaccttacaagcgcttatatccaagcaatgcattgactataaaaaatctgatagaataatccctgaagacattattccggaatgtcacgagacattgatcacgattaatgatgaaaacgaaataattaatgaaatggaagatgttgacgaagttattcgttatgcgactcagtgtatgatgggcaaaaaggtgaagccaaaaaaagccataacaaagaagaagagagttcaggaaaataaaaaaccgaagaagttctttatgcctgataatgttgagaccagtattgttagtgcaagcactttaattaataagttcttggtgaatgaaagtggcgggaaacaattggtaacgagtaatgaaaacccaagtaagaagagaaagatttttaaagctttggataatttggagaatgattctaccgaggaagcttcctcctctttagaaactgaagatgaagaagtcagtgatgataataatgttttcattgcggaagggcagaatggatgccaaaaagatttggaaactgccattattcgcactggcgaaagtcttaccacactcaagccacttcataattttgaacgccctaatatggctttatttgtgaatgattgtggtcttccaactaaaatcgagaaaaatgtgaaagacatcagaggaaatcaacacaaccttgaaaaagaaaagagctgtactgttgacaagaataacatggtattgagtttggacgattggaattttttcagaaaccgctatatcccagaaggtgtttccttcgatgtggagcccaattttgtacaatacaccaaaggggtaaaagttccgcattgtcacaaagtttccaaaatcattacgttatttaacgacgagagtaatgataataagaagaggacaattgatatgaactatactaaatgtttggcgagaggcatgttaagagacgaaaaaaaatttgtaaaagttaacgataaaagtcaagtcgataacaacagtgtcaaccatgattcttcccaatcttttaccttatctaacgcagaattagatgacatattgggcagtgattctgatttttga

SEQ ID NO: 5633 - DNA, 2040 bp, Saccharomyces cerevisiae
atgccatcggaagttacgccaaaagtacctgagaggccctcaaggaggaagacatctgagctgtttccgttatccggctctgaatcaggagatattaaagctaatagcgagccaccaacaccagcaggaacgcccaatgtaccaacacgtagacccatacttaaagcaaagacgatgacttcgtttgagagtggtatggatcaagagagtttgcccaaggtaccattgcagaggccagttagacgctccactactgaagaactaaataatgtaatgaataacaccagtaaggagttagaggagattgaaagtttgatttcaaagcacaatatacacaatgtttccaggaaaaaaagtccaacttctgtggaagagggaaaggtggccgccattcatcaaaacgggcaaagaagtgcatcagataacaaaacttctacaaatccctccccactcgaaaaaaatgagcacgagggtgctgagggcaatgagtctgctatttcaccttctaatttagttaacaagtctaataatgaagtgacagagcatagtgactccgaagaccttactgaaaagcaaaaggtacatgctgccctagataatgaggcaggggatagaagccattttgaagaaaagctcattcctggagatatgaaagtacaggtagatgttagtaaggacgtagaagaaggcagcctcaatgctctgcctccatctggaatcacagaatcagacgacaaagctgaaaagttcactaaacatcctgaatctagtttagaagagctacagaagcatcaagaacaacaggaagaaaaaattttccaaaatccaaccgatgaagaaagtactacctctttgaatgagaaacaagaaggcaaggacaacatggaagtgaattctcagccgcaaggaccttctgatactgaaacagttatagcagcaactagctcaaacgttccttcacaaattgcaagtgaagaggaaaatgacgttccagtgattccaaggagtaggcctaagaaggattttgaagcacacgtacaaaaagaggagttgcctaacacacaagagaagcgagtatcagaagagtgtgattcgaccctaattagtaccgaagaggaaagtaaaatcccaaaaattccctctgaaagaccaaagagacgtgccccacctccggttcccaaaaaaccttcttcaagaattgcggcctttcaagaaatgttacaaaaacaacagcaacaagatctgcataataatggtaattcttcagctactaccgcttcagcagatattgctaaaaaacacacagattcttctattactagcgataccacgaaggcagattttacgagcaaattgaatggactgtttgcgctacctggtatggtgaaccctggacagcttccaccttccttggagaagaagttgtcctccccggatactgaatctaagctaggaccccaggaccaatcacaggcaaaaacgggacctctgggcggaactagaagaggtagaggacctcgtgggcgtaaattaccttctaaagtagctagcgtagagaagattgaagaagatgacaacactaataaaatagaaatatttaacaattggaatgtttcctcttccttctctaaggaaaaagtcttaatagatactactcctggtgagcaagcagaaagggccttggatgaaaagtcaaagagcattcccgaggaacaacgagaacaatctccaaataagatggaggctgctctttgtccttttgagctggacgaaaaggaaaagttacctgctaatgctgagtcggatcctctttctcagttgccacagacgaacgccgtaggtaatagaaaagccataagtgaggaatctctgtccccatcggaggccatcgccaacagagatcaaaacgatacgacagaaatacaggaacagcagatggaggaccaaatggaggttgatatggaaagagaactctcaggtggctacgaagacgttgattctgccttacattcagaagaagcgtcttttcactccctttag

SEQ ID NO: 5634 - DNA, 2040 bp, Artificial Sequence
  Description of Artificial Sequence: Synthetic polynucleotide
atgccatctgaagttacgccaaaagtacctgagaggccctctaggaggaagacatctgagttatttccgttatccggctctgaatctggagatattaaagctaatagcgagccaccaacaccagcaggaacgcccaatgtaccaacacgtagacccatacttaaagcaaagacgatgacttcttttgagagtggtatggatcaagagagtttgcccaaggtaccattgcagaggccagttagacgctccactactgaagaattgaataatgtaatgaataacaccagtaaggagttagaggagattgaaagtttgatttccaagcacaatatacacaatgtttccaggaaaaaaagtccaacttctgtggaagagggaaaggtggccgccattcatcaaaacgggcaaagaagtgcatctgataacaaaacttctacaaatccctccccactcgaaaaaaatgagcacgagggtgctgagggcaatgagtctgctatttctccttctaatttagttaacaagtctaataatgaagtgacagagcatagtgactccgaagaccttactgaaaagcaaaaggtacatgctgccttggataatgaggcaggggatagaagccattttgaagaaaagctcattcctggagatatgaaagtacaggtagatgttagtaaggacgtagaagaaggcagcctcaatgctttacctccatctggaatcacagaaagtgacgacaaagctgaaaagttcactaaacatcctgaatctagtttagaagagttacagaagcatcaagaacaacaggaagaaaaaattttccaaaatccaaccgatgaagaaagtactacctctttgaatgagaaacaagaaggcaaggacaacatggaagtgaattctcagccgcaaggaccttctgatactgaaacagttatagcagcaactagcagtaacgttccttctcaaattgcaagtgaagaggaaaatgacgttccagtgattccaaggagtaggcctaagaaggattttgaagcacacgtacaaaaagaggagttgcctaacacacaagagaagagagtatctgaagagtgtgattctaccttgattagtaccgaagaggaaagtaaaatcccaaaaattccctctgaaagaccaaagagacgtgccccacctccggttcccaaaaaaccttcttctagaattgcggcctttcaagaaatgttacaaaaacaacagcaacaagatttgcataataatggtaattcttctgctactaccgcttctgcagatattgctaaaaaacacacagattcttctattactagcgataccacgaaggcagattttacgagcaaattgaatggattatttgcgttacctggtatggtgaaccctggacagcttccaccttccttggagaagaagttgtcctccccggatactgaatctaagttgggaccccaggaccaatctcaggcaaaaacgggacctttgggcggaactagaagaggtagaggacctcgtgggcgtaaattaccttctaaagtagctagcgtagagaagattgaagaagatgacaacactaataaaatagaaatatttaacaattggaatgtttcctcttccttctctaaggaaaaagtcttaatagatactactcctggtgagcaagcagaaagggccttggatgaaaagtccaagagcattcccgaggaacaaagagaacaatctccaaataagatggaggctgctctttgtccttttgagttggacgaaaaggaaaagttacctgctaatgctgagtctgatcctctttctcagttgccacagacgaacgccgtaggtaatagaaaagccataagtgaggaatctttatccccaagtgaggccatcgccaacagagatcaaaacgatacgacagaaatacaggaacagcagatggaggaccaaatggaggttgatatggaaagagaactctctggtggctacgaagacgttgattctgccttacattctgaagaagcgtcttttcactccctttga

SEQ ID NO: 5635 - DNA, 1299 bp, Saccharomyces cerevisiae
atggttgttgatactgagtattacgatttgttaggtgtgtctaccactgcatcttccattgaaataaaaaaggcctatagaaagaaatctattcaagagcatcctgataagaatcccaatgaccccacggctaccgaaaggtttcaagcaatatccgaagcttatcaagttttaggtgacgatgatcttcgcgcaaagtatgataagtatggaagaaaagaagctattcctcagggcggctttgaagatgcagctgaacagttctctgtcatctttggtggagatgcgtttgcctcatatattggcgaactgatgctattaaagaacctacagaaaactgaggagctaaatgctgaagacgaagctgaaaaggagaaggagaatgtggaaacaatggaagaatcacctgcagacggtaagacgaatggcaccactaacgctgttgatgcagcattgggcaatactaacgaaaaagatgacaaaaataaggcgaggacaacttctggtaatttaactgtacacgatggaaacaagaaaaatgagcaggtaggagcagaagctaagaagaagaagacaaaattagagcagtttgaggaagaacaagaggtagaaaagcaaaaaagagtagaccaattaagcaaaacattgattgaaagattatcgatattaacagaaagtgtctatgatgatgcatgtaaagattcctttaaaaaaaagttcgaagaggaagccaatcttttaaagatggaatcatttggtctggacatattacacacaataggcgacgtttactacgaaaaagctgaaatttttcttgcatcccagaacctgttcggaatgggtggtatatttcattctatgaaggctaaagggggagtatttatggatacactaagaactgtttcggcagccatagacgctcagaatactatgaaggagcttgaaaaaatgaaagaagctagcacgaataatgagcctttgtttgacaaagacggaaatgagcaaattaagccaaccactgaggaactggcgcagcaagagcagctattgatgggcaaagtattgtcggctgcttggcatggttctaaatatgaaataacatccactttacgtggcgtttgtaaaaaagtactagaagatgactcggtaagtaagaaaacgcttatcagaagagctgaagcaatgaaactattgggtgaagtctttaagaaaactttcagaaccaaagtcgaacaagaagaggcacagatctttgaagaacttgtagcagaagctacaaaaaagaagagacatacatga

SEQ ID NO: 5636 - DNA, 1299 bp, Artificial Sequence
  Description of Artificial Sequence: Synthetic polynucleotide
atggttgttgatactgagtattacgatttgttaggtgtgtctaccactgcatcttccattgaaataaaaaaggcctatagaaagaaatctattcaagagcatcctgataagaatcccaatgaccccacggctaccgaaaggtttcaagcaatatccgaagcttatcaagttttaggtgacgatgatcttcgcgcaaagtatgataagtatggaagaaaagaagctattcctcagggcggctttgaagatgcagctgaacagttctctgtcatctttggtggagatgcgtttgcctcttatattggcgaattgatgcttttaaagaacttacagaaaactgaggagttgaatgctgaagacgaagctgaaaaggagaaggagaatgtggaaacaatggaagaatctcctgcagacggtaagacgaatggcaccactaacgctgttgatgcagcattgggcaatactaacgaaaaagatgacaaaaataaggcgaggacaacttctggtaatttaactgtacacgatggaaacaagaaaaatgagcaggtaggagcagaagctaagaagaagaagacaaaattagagcagtttgaggaagaacaagaggtagaaaagcaaaaaagagtagaccaattaagcaaaacattgattgaaagattatctatattaacagaaagtgtctatgatgatgcatgtaaagattcctttaaaaaaaagttcgaagaggaagccaatcttttaaagatggaaagttttggtttggacatattacacacaataggcgacgtttactacgaaaaagctgaaatttttcttgcatcccagaacttgttcggaatgggtggtatatttcattctatgaaggctaaagggggagtatttatggatacattaagaactgtttctgcagccatagacgctcagaatactatgaaggagcttgaaaaaatgaaagaagctagcacgaataatgagcctttgtttgacaaagacggaaatgagcaaattaagccaaccactgaggaattggcgcagcaagagcagttattgatgggcaaagtattgtctgctgcttggcatggttctaaatatgaaataacatccactttacgtggcgtttgtaaaaaagtattggaagatgactctgtaagtaagaaaacgcttatcagaagagctgaagcaatgaaacttttgggtgaagtctttaagaaaactttcagaaccaaagtcgaacaagaagaggcacagatctttgaagaacttgtagcagaagctacaaaaaagaagagacatacatga

SEQ ID NO: 5637 - DNA, 447 bp, Saccharomyces cerevisiae
atgaacaaaattcagcaaatcaacgataaagaactacaaagtggaattcttagcccgcatcaatcatggcataatgaatataaggataatgcttatatatatatcggaaatctcaaccgagaattaacagaaggtgacatattgacagtcttttctgaatatggagtccctgtagatgtaattcttagcagggatgaaaacacaggagaatcgcaaggttttgcatatttgaaatatgaggatcaacggtcaacgattctagcagtcgataatttaaatggatttaaaattggcggtagagccctcaaaattgatcatactttttataggccaaaaaggagtttacaaaaatactatgaagctgtaaaggaagaattggatcgagatatagtttcgaagaacaatgctgagaaactcattttggctaaaaaggaccaaccaaattaa

SEQ ID NO: 5638 - DNA, 447 bp, Artificial Sequence
  Description of Artificial Sequence: Synthetic polynucleotide
atgaacaaaattcagcaaatcaacgataaagaattacaaagtggaattcttagcccgcatcaaagttggcataatgaatataaggataatgcttatatatatatcggaaatctcaacagagaattaacagaaggtgacatattgacagtcttttctgaatatggagtccctgtagatgtaattcttagcagggatgaaaacacaggagaatctcaaggttttgcatatttgaaatatgaggatcaaagatctacgattttggcagtcgataatttaaatggatttaaaattggcggtagagccctcaaaattgatcatactttttataggccaaaaaggagtttacaaaaatactatgaagctgtaaaggaagaattggatagagatatagtttccaagaacaatgctgagaaactcattttggctaaaaaggaccaaccaaattga

SEQ ID NO: 5639 - DNA, 4443 bp, Saccharomyces cerevisiae
atgtataacccgtaccagcaacagggcatgggttaccagcagcaacagcagcaacagcagcaacaaccaaatggattctacccgcagcagcagcaaggtcagtcttcaaaccagccccaaggccagcctcaaccacaacagcaaatggcgtttaaccagcctcaggctaccggaattggtgggatgcctcaaagttttggtaattctttctcaagtatgccacagcagccccaaacgggttacaataataatggaaataatggtagtgtatatggtaatggtaattttggccaacaaccccagcagcaacaacagcaggcgaaaccgcagcatacgggatacgtaccaaattccagtatgcctatgatgaatactactggcaccatgcctccacctaatccggctcaacagcctcagctacaatccatacaaccccaaggaacaggctattaccaagctgctaatactgcaaatgtacactcagtacaacctttgcaatctcaagggacaggatattatgtgtctacacccaatttgatctcttctaatcaaacccagcagccccttcaggcccagggcactggttattatcaatctcaacctcaacaggtgccacctcctcagcaagcacagtccttgcaacctttgaagccgcagcaaacaggattttaccttcaaccgcaaaaccaagctcccttagaaccattaaagcccaccgcaactggctttgtcaactcatttgccaacaacggtctaaacaatgatatcaaaatccctgccattagattgtcgtttattactgcccaagatcaggcaaaatttgagactctattcagatcaattgttaccaatggttcgaatactgtttccggtgctaattgtaggaaaattttgatgagatccggtttgccaccttctcaactcgcaagaatttggacgctttgtgatacatcaaaagcaggtgagttactgtttcctgaatttgcattagcaatgcatttgatcaatgatgtcttacaaggtgacactatcccttacgaattggattctaagacaaaaaacgaagtttcaagttttattgacgccattaatttaagcattgcaaaccaggattcttccgcaaacgatgccccaaaaactccctttgatgaattcattacagcgggcgtacaaaatttgcaacctcaaccaacaggatatatgcctcaaactagttttggtatcccattacagtctcaaattactggaggcggtgttgcctcggcgttgaatcctcaatccacaggatttatggcaccaaccactttcaacatgtcaatgaataccggaactcccggattgaacccccaaattactggaggagcacctgcctctatgcaacccaacattactggcaatgctttgcaacctcagacaactggtatgatgccacagacaactggtatgatgccacagacaactggtatgatgccacagacttcatttggcgttaatttaggacctcagttgaccggcggtgctttgcaatctcagtataccggaggatatggttccgttatgccccagcaaagcggtcctgcaagtatgcccaatttgtcctttaatcaacaaggattacaatctcagttaaccgggttgcaaccccaaccaacgggttttctaccaccatctaactttagtgctaccatgccgttgactgcccaaaagacaggatttggtaataacgaaatttataccaaatccaactttaataataacttaattgataactcaagtcaagacaaaatttccacggaggaaaaatctttgttttataaaatttttgaaacttttgatactcaaaacaaaggtttgttagattcccccactgctgtggagatttttagaaaatctggcttaaatcgtgcagatttggagcaaatttggaacctttgtgatataaacaacaccggccaattgaataaacaagaatttgcactaggtatgcacttggtttacggtaaattaaacgggaagccaatccccaatgtcctaccttcaagtttaattccctccagcacaaaacttttagacaacttaaagaaccaattaaagacagagccaacgaccacaaaagaaaaaccttcgtttggtaaaatcgatgccttgagctacaaaaataatgatgatgatgttttgccgaactatagaaatcgtaggaaggtttactctgcgaaaaatgaagagcaatcttctttttcttcaccatctgctaaatctgttaatcattctagcagcacccttcaaaccgatgacatttcggtagataagactgttgaaaagaagacagcgaaaccaaaatatgctgggttttcaagagaaataaatctgaaaaatattgcttcactggaaaatgagatcaaaaatatcagcaatcctgaaaactgttatgacagttctattccatcagatttgacaagccgctttgatgccatcatcgccaaacttccaaacctattcaatgaaatttctacaattgataatgagattaccaatgcaaaaattcagttgtatagaaaaaaaaatccttcttcgataattggatctggtccaaatggtgaaataactgaaaatgataggaagaaagctaagagtagggctttgttgagagcaaggatgtctgctctaacaggaaaatcaacggaatcggaggattcactttccatggaagatgaacagcaaagtgctgaaatcaagagaatccagcaggaaaatggtaagaaccaagaaatcattaaagacataaggtcatctatatcagatatttctgcatccttgaagtctactatgacaggatcgaatatgatatccaatcaagaatttgaaagatgggaatttggcatagggttagaagatggtgttcgtgaatttttggatgatctgaagtcaaattcaaataaatcagtgactgagtcatctccctttgtgccttcctcaacaccaacccctgtagatgaccgttcctcgtcgccttcttattctcagttcaaaactgctgaagaaagagcagcttatctgaaagaacaggcaaaaaagagaatgaaggaaaaattagctaaatttgataagaataggcgaaatgttactcaaagttccagatcgattagcagtgaaaactctcgagaacagccacaacagattgctggttcttccaatttagttgaacctagagcaactccattccaagaagaaaaatatgtggaagtcgctcaaccaactcaacctgttcaatcaacacaacctgttcaaccaactcaacctgttcagccaactcaacctgttcagccaactcaacctgttcagccaactcaacctgttcaaccaactcaacctgttcagaatgtatataatgcaaagcaagaatccgatgatgaagatgaagatgatgaagaaaagcgtttacaagaggagctaaaacgattgaaacttaaaaaaaaggctgataaagaaaaaagacttgcagctttacgtaagcaaattgaggatgctcaaaatgaaagtgacgaagaggagacaaacggaaaagacaactttggcggccatgtgaacgttcctcaggccgctccagtggcaccatctgcagctttttcgcaaaattctactaatgctcctcgctcggtacacgctgctgttacccctgccgcaggtaagaacagtactggtctgccttccacgacaatgggccataatccatacttcaaggatgcatcagctagctctacatctactttcgatgctcgcgctgcagaaatgcaaagaagaatccaaagaggattggatgaggacgaggatgatggatggtctgatgaagacgagagtaataaccgcgtagctgtagataataaggttgaagaagcaaagattggtcatcctgatcatgcacgtgctccacctgttactgctgctcccttgccgtctgttacccctgttccacctgctgtccctgtccctcaggcgaatacctctaatgaaaagagtagtcctattccaatagctccgataccaccttctgttactcaggagccacccgtcccgttggctccccctttgcctgctgttgatggctttcaagaacctccaattccctcagcacctgcaatagctactgccgtgcaaaaatcgggttcttccaccccagctttagctggaggcgttttgcctccacccccacctttaccaactcaacaagcttccacttcagaacctattatcgctcacgttgataactacaatggtgctgaaaaaggcacgggcgcatatggatccgattctgatgatgacgttttatcgattcctgaatcagttggtacagatgaagaggaagaaggggcacaaccagtttctactgcaggtatcccatcaattccacctgcaggtattcctccacccccaccccttccatga

SEQ ID NO: 5640 - DNA, 4443 bp, Artificial Sequence
  Description of Artificial Sequence: Synthetic polynucleotide
atgtataacccgtaccagcaacagggcatgggttaccagcagcaacagcagcaacagcagcaacaaccaaatggattctacccgcagcagcagcaaggtcagtcttccaaccagccccaaggccagcctcaaccacaacagcaaatggcgtttaaccagcctcaggctaccggaattggtgggatgcctcaaagttttggtaattctttctctagtatgccacagcagccccaaacgggttacaataataatggaaataatggtagtgtatatggtaatggtaattttggccaacaaccccagcagcaacaacagcaggcgaaaccgcagcatacgggatacgtaccaaattccagtatgcctatgatgaatactactggcaccatgcctccacctaatccggctcaacagcctcagttacaatccatacaaccccaaggaacaggctattaccaagctgctaatactgcaaatgtacactctgtacaacctttgcaatctcaagggacaggatattatgtgtctacacccaatttgatctcttctaatcaaacccagcagccccttcaggcccagggcactggttattatcaatctcaacctcaacaggtgccacctcctcagcaagcacagtccttgcaacctttgaagccgcagcaaacaggattttaccttcaaccgcaaaaccaagctcccttagaaccattaaagcccaccgcaactggctttgtcaactcttttgccaacaacggtttgaacaatgatatcaaaatccctgccattagattgagttttattactgcccaagatcaggcaaaatttgagactttattcagatctattgttaccaatggtagtaatactgtttccggtgctaattgtaggaaaattttgatgagatccggtttgccaccttctcaactcgcaagaatttggacgctttgtgatacaagtaaagcaggtgagttactttttcctgaatttgcattagcaatgcatttgatcaatgatgtcttacaaggtgacactatcccttacgaattggattctaagacaaaaaacgaagtttctagttttattgacgccattaatttaagcattgcaaaccaggattcttccgcaaacgatgccccaaaaactccctttgatgaattcattacagcgggcgtacaaaatttgcaacctcaaccaacaggatatatgcctcaaactagttttggtatcccattacagtctcaaattactggaggcggtgttgcctctgcgttgaatcctcaatccacaggatttatggcaccaaccactttcaacatgtccatgaataccggaactcccggattgaacccccaaattactggaggagcacctgcctctatgcaacccaacattactggcaatgctttgcaacctcagacaactggtatgatgccacagacaactggtatgatgccacagacaactggtatgatgccacagacttcttttggcgttaatttaggacctcagttgaccggcggtgctttgcaatctcagtataccggaggatatggttccgttatgccccagcaaagcggtcctgcaagtatgcccaatttgtcctttaatcaacaaggattacaatctcagttaaccgggttgcaaccccaaccaacgggttttttaccaccatctaactttagtgctaccatgccgttgactgcccaaaagacaggatttggtaataacgaaatttataccaaatccaactttaataataacttaattgataacagtagtcaagacaaaatttccacggaggaaaaatctttgttttataaaatttttgaaacttttgatactcaaaacaaaggtttgttagattcccccactgctgtggagatttttagaaaatctggcttaaatcgtgcagatttggagcaaatttggaacctttgtgatataaacaacaccggccaattgaataaacaagaatttgcattgggtatgcacttggtttacggtaaattaaacgggaagccaatccccaatgtcttaccttctagtttaattccctccagcacaaaacttttagacaacttaaagaaccaattaaagacagagccaacgaccacaaaagaaaaaccttcttttggtaaaatcgatgccttgagctacaaaaataatgatgatgatgttttgccgaactatagaaatcgtaggaaggtttactctgcgaaaaatgaagagcaatcttctttttcttctccatctgctaaatctgttaatcattctagcagcacccttcaaaccgatgacattagtgtagataagactgttgaaaagaagacagcgaaaccaaaatatgctgggttttccagagaaataaatttgaaaaatattgcttctttggaaaatgagatcaaaaatatcagcaatcctgaaaactgttatgacagttctattccaagtgatttgacaagccgctttgatgccatcatcgccaaacttccaaacttgttcaatgaaatttctacaattgataatgagattaccaatgcaaaaattcagttgtatagaaaaaaaaatccttcttctataattggatctggtccaaatggtgaaataactgaaaatgataggaagaaagctaagagtagggctttgttgagagcaaggatgtctgctttaacaggaaaatctacggaaagtgaggattctctttccatggaagatgaacagcaaagtgctgaaatcaagagaatccagcaggaaaatggtaagaaccaagaaatcattaaagacataaggtcttctatatctgatatttctgcatccttgaagtctactatgacaggaagtaatatgatatccaatcaagaatttgaaagatgggaatttggcatagggttagaagatggtgttcgtgaatttttggatgatttgaagagcaatagtaataaatctgtgactgagtcttctccctttgtgccttcctctacaccaacccctgtagatgaccgttcctcttctccttcttattctcagttcaaaactgctgaagaaagagcagcttatttgaaagaacaggcaaaaaagagaatgaaggaaaaattagctaaatttgataagaataggagaaatgttactcaaagttccagatctattagcagtgaaaactctagagaacagccacaacagattgctggttcttccaatttagttgaacctagagcaactccattccaagaagaaaaatatgtggaagtcgctcaaccaactcaacctgttcaaagtacacaacctgttcaaccaactcaacctgttcagccaactcaacctgttcagccaactcaacctgttcagccaactcaacctgttcaaccaactcaacctgttcagaatgtatataatgcaaagcaagaatccgatgatgaagatgaagatgatgaagaaaagcgtttacaagaggagttgaaaagattgaaacttaaaaaaaaggctgataaagaaaaaagacttgcagctttacgtaagcaaattgaggatgctcaaaatgaaagtgacgaagaggagacaaacggaaaagacaactttggcggccatgtgaacgttcctcaggccgctccagtggcaccatctgcagctttttctcaaaattctactaatgctcctcgcagcgtacacgctgctgttacccctgccgcaggtaagaacagtactggtttgccttccacgacaatgggccataatccatacttcaaggatgcatctgctagctctacatctactttcgatgctcgcgctgcagaaatgcaaagaagaatccaaagaggattggatgaggacgaggatgatggatggtctgatgaagacgagagtaataaccgcgtagctgtagataataaggttgaagaagcaaagattggtcatcctgatcatgcacgtgctccacctgttactgctgctcccttgccgtctgttacccctgttccacctgctgtccctgtccctcaggcgaatacctctaatgaaaagagtagtcctattccaatagctccgataccaccttctgttactcaggagccacccgtcccgttggctccccctttgcctgctgttgatggctttcaagaacctccaattccctctgcacctgcaatagctactgccgtgcaaaaatctggttcttccaccccagctttagctggaggcgttttgcctccacccccacctttaccaactcaacaagcttccacttctgaacctattatcgctcacgttgataactacaatggtgctgaaaaaggcacgggcgcatatggatccgattctgatgatgacgttttatccattcctgaatctgttggtacagatgaagaggaagaaggggcacaaccagtttctactgcaggtatcccatctattccacctgcaggtattcctccacccccaccccttccatga

SEQ ID NO: 5641 - DNA, 2295 bp, Saccharomyces cerevisiae
atgcctgccaaaatacacatttctgcagacggtcagttttgcgataaagatggcaacgagatccaattgcgtggtgtcaatttggatccgtcagttaaaatccctgcaaagccattcctatccacccacgctcccatagaaaatgacacgtttttcgaggatgctgataaagtcagtttcatcaatcaccccttagttcttgatgatatcgaacagcatatcatcagattgaaatcactgggttacaataccattcgtttacccttcacctgggaatctcttgaacatgctggtccaggacagtacgattttgactatatggattatatcgtcgaggtactaaccaggattaacagcgtacaacaaggtatgtacatttatttggaccctcaccaagacgtctggtctaggtttagcggtggatctggagcaccgctatggaccttatactgtgcagggtttcaacctgcaaacttcctggccaccgatgctgcaatcttacataattattatattgaccccaaaacgggcagggaagttggcaaagatgaagagtcctaccctaagatggtttggcctacaaactacttcaaactggcgtgtcaaacaatgtttacgttattctttggtgggaaacaatatgctcctaagtgcacaattaatggagaaaacatacaggattacttgcaaggaaggtttaatgatgcaatcatgacactgtgcgcaagaattaaagaaaaggctcctgagttgtttgagagcaactgcattattggattagagtctatgaacgagccaaactgtggttacattggtgaaacaaatctcgatgtgattccgaaagagagaaatttgaaattgggcaaaacgccaacggcatttcaaagctttatgctgggtgaaggtattgagtgcacaatagatcaatataaaaggacattttttggattttctaagggaaaaccgtgcacaatcaatcccaaaggcaaaaaagcttggctgagtgcagaggaaagagatgcgatagatgcgaagtataattgggaaaggaaccctgaatggaaaccagacacttgcatttggaaactccatggtgtttgggagattcagaatggtaaacgccctgttttactcaaaccaaattactttagccaacctgatgcaacggtatttataaacaatcattttgttgactattacactggaatttataacaagtttagggaattcgatcaagaattgtttattataatccaaccgccggtaatgaagccaccacccaatttacaaaattctaaaatattggacaataggacgatttgtgcatgtcatttttatgatggtatgacactaatgtataagacatggaataaacgaattggcatagacacctatggactagtaaacaaaaaatactcaaatcctgcctttgctgtagtgcttggcgaaaacaatatacggaaatgcattaggaagcaattatcagaaatgcaaaaggacgctaaatccatgcttggaaaaaaagtacctgtattcttcaccgaaattggtattccatttgacatggacgacaagaaagcatatattacaaatgactattcttcacagaccgctgcattggatgctcttggatttgcattagaaggaagtaatctttcgtacaccttatggtgttattgcagtattaattcacatatatggggtgacaattggaacaatgaagatttttcgatttggtccccggatgacaaaccactctatcacgatacccgagcaaaaactcctactcctgagccatctccagcctctactgtggcttcggtatccacttctacatctaaatcgggttcttcacaaccaccaagtttcataaaaccagataatcatttagatttggatagtccctcgtgcactttaaagagcgacttgtcagggttcagagctcttgatgctataatgagaccattccccatacaaattcacggaagatttgagtttgctgagtttaacttatgtaataaatcctaccttttgaaattagttggtaaaacgacacctgaacagataactgtccctacatatatttttataccacggcaccattttacaccaagccggttgtcaattcgttcatcatcaggtcattatacctataacactgactaccaggttcttgaatggtttcacgagcctggccatcagttcattgaaatttgcgcaaaatcgaagtcaaggcccaacacccctggaagtgacacttcgaatgacttaccagcggaatgcgttatcagctaa

SEQ ID NO: 5642 - DNA, 2295 bp, Artificial Sequence
  Description of Artificial Sequence: Synthetic polynucleotide
atgcctgccaaaatacacatttctgcagacggtcagttttgcgataaagatggcaacgagatccaattgcgtggtgtcaatttggatccgtctgttaaaatccctgcaaagccattcttatccacccacgctcccatagaaaatgacacgtttttcgaggatgctgataaagtcagtttcatcaatcaccccttagttcttgatgatatcgaacagcatatcatcagattgaaatctttgggttacaataccattcgtttacccttcacctgggaatctcttgaacatgctggtccaggacagtacgattttgactatatggattatatcgtcgaggtattaaccaggattaacagcgtacaacaaggtatgtacatttatttggaccctcaccaagacgtctggtctaggtttagcggtggatctggagcaccgttatggaccttatactgtgcagggtttcaacctgcaaacttcttggccaccgatgctgcaatcttacataattattatattgaccccaaaacgggcagggaagttggcaaagatgaagagtcctaccctaagatggtttggcctacaaactacttcaaattagcgtgtcaaacaatgtttacgttattctttggtgggaaacaatatgctcctaagtgcacaattaatggagaaaacatacaggattacttgcaaggaaggtttaatgatgcaatcatgacattgtgcgcaagaattaaagaaaaggctcctgagttgtttgagagcaactgcattattggattagagtctatgaacgagccaaactgtggttacattggtgaaacaaatctcgatgtgattccgaaagagagaaatttgaaattgggcaaaacgccaacggcatttcaaagctttatgttgggtgaaggtattgagtgcacaatagatcaatataaaaggacattttttggattttctaagggaaaaccgtgcacaatcaatcccaaaggcaaaaaagcttggttgagtgcagaggaaagagatgcgatagatgcgaagtataattgggaaaggaaccctgaatggaaaccagacacttgcatttggaaactccatggtgtttgggagattcagaatggtaaacgccctgttttactcaaaccaaattactttagccaacctgatgcaacggtatttataaacaatcattttgttgactattacactggaatttataacaagtttagggaattcgatcaagaattgtttattataatccaaccgccggtaatgaagccaccacccaatttacaaaattctaaaatattggacaataggacgatttgtgcatgtcatttttatgatggtatgacattgatgtataagacatggaataaaagaattggcatagacacctatggattagtaaacaaaaaatactctaatcctgcctttgctgtagtgcttggcgaaaacaatataagaaaatgcattaggaagcaattatctgaaatgcaaaaggacgctaaatccatgcttggaaaaaaagtacctgtattcttcaccgaaattggtattccatttgacatggacgacaagaaagcatatattacaaatgactattcttctcagaccgctgcattggatgctcttggatttgcattagaaggaagtaatctttcttacaccttatggtgttattgcagtattaattctcatatatggggtgacaattggaacaatgaagatttttctatttggtccccggatgacaaaccactctatcacgataccagagcaaaaactcctactcctgagccatctccagcctctactgtggcttctgtatccacttctacatctaaatctggttcttctcaaccaccaagtttcataaaaccagataatcatttagatttggatagtcccagttgcactttaaagagcgacttgagcgggttcagagctcttgatgctataatgagaccattccccatacaaattcacggaagatttgagtttgctgagtttaacttatgtaataaatcctaccttttgaaattagttggtaaaacgacacctgaacagataactgtccctacatatatttttataccaagacaccattttacaccaagcagattgtctattcgttcttcttctggtcattatacctataacactgactaccaggttcttgaatggtttcacgagcctggccatcagttcattgaaatttgcgcaaaatccaagtccaggcccaacacccctggaagtgacacttccaatgacttaccagcggaatgcgttatcagctga

SEQ ID NO: 5643 - DNA, 1230 bp, Saccharomyces cerevisiae
atgaccaattcagtaaagactaatgggccaagctcctcagacatggagtactactataagtcgctctatccattcaaacacattttcaactggctgaatcattcgcccaaaccttctagggatatgattaacagagaattcgctatggcgttcaggtcaggtgcttacaaaaggtataattcttttaactctgtgcaagatttcaaagcacaaatagaaaaagccaacccagacagatttgaaatcggtgccatatataacaaaccgccaagagaacgtgatactctattaaaaagcgaattgaaagctttagagaaggagttggtgtttgatattgatatggatgattacgatgccttcagaacgtgttgctccggagcccaagtttgctctaagtgctggaaatttatatctttggcaatgaaaattacgaacacggccctaagagaggattttggttataaggacttcatctgggtattttcaggtagacgtggtgctcattgttgggtaagcgacaaacgggcacgggctttgacggatgtacaacgaagaaacgttttagattatgtcaacgtgattagagacagaaatactgacaagcgattggctttgaagaggccttatcaccctcatcttgctcgttctttggagcaattgaaacctttctttgtcagcattatgctcgaagagcaaaatccttgggaagatgaccaacatgctatccaaactttattgcctgcattatatgataaacaattgattgattcattaaagaagtattggctggacaatccaaggaggtcaagcaaagagaagtggaatgatatagatcagatagctacatcgctcttcaaaggccccaagcaagactctcacataattaagttacgtgaatgtaaggaagatctcgtattgatgactctttatccgaagctggatgtggaagttacaaagcaaacaattcatttgttaaaggcccctttttgtattcatcctgctacggggaatgtctgtgtgcctattgatgaatcctttgcacctgaaaaagcacctaagctaattgatcttcaaacagaaatggagaaaaataatgatgtttcattaacagctttacaaccttttatcaatcagttccaagcatatgtgagttctcttttgaaaaatgaactgggttcagtgaaaagagaacgtgaagatgatgatgaaccggcttctttagatttctga

SEQ ID NO: 5644 - DNA, 1230 bp, Artificial Sequence
  Description of Artificial Sequence: Synthetic polynucleotide
atgaccaattctgtaaagactaatgggccaagctccagtgacatggagtactactataagtctctctatccattcaaacacattttcaactggttaaatcattctcccaaaccttctagggatatgattaacagagaattcgctatggcgttcaggtctggtgcttacaaaaggtataattcttttaactctgtgcaagatttcaaagcacaaatagaaaaagccaacccagacagatttgaaatcggtgccatatataacaaaccgccaagagaacgtgatactttattaaaaagcgaattgaaagctttagagaaggagttggtgtttgatattgatatggatgattacgatgccttcagaacgtgttgctccggagcccaagtttgctctaagtgctggaaatttatatctttggcaatgaaaattacgaacacggccttgagagaggattttggttataaggacttcatctgggtattttctggtagacgtggtgctcattgttgggtaagcgacaaaagagcaagagctttgacggatgtacaaagaagaaacgttttagattatgtcaacgtgattagagacagaaatactgacaagagattggctttgaagaggccttatcaccctcatcttgctcgttctttggagcaattgaaacctttctttgtcagcattatgctcgaagagcaaaatccttgggaagatgaccaacatgctatccaaactttattgcctgcattatatgataaacaattgattgattctttaaagaagtattggttagacaatccaaggaggagcagcaaagagaagtggaatgatatagatcagatagctacatctctcttcaaaggccccaagcaagactctcacataattaagttacgtgaatgtaaggaagatctcgtattgatgactctttatccgaagttggatgtggaagttacaaagcaaacaattcatttgttaaaggcccctttttgtattcatcctgctacggggaatgtctgtgtgcctattgatgaatcctttgcacctgaaaaagcacctaagttgattgatcttcaaacagaaatggagaaaaataatgatgtttctttaacagctttacaaccttttatcaatcagttccaagcatatgtgagttctcttttgaaaaatgaattgggttctgtgaaaagagaacgtgaagatgatgatgaaccggcttctttagatttctga

SEQ ID NO: 5645 - DNA, 336 bp, Saccharomyces cerevisiae
atggttgaaccagcaaggaaaaagcagaggattgatcgcgatactcatcacactgtggctgaaccagtaacggaagctaaaaatacgctgtacgtgagccagcttaatgaaaaaattaatatgcaacgactgcgagtaaacctttttttgctctttgctacgtttggagaggtactgaaggttagcatgaatttcaagaaacagcggggccaagcctttatcaccatgagaaccatcgaccaggccagtctggcccagatttcattaaacggcgagcgattctttggtaagcctttgaaagttgagttcagcaagagtgaaactaaaacactatga

SEQ ID NO: 5646 - DNA, 336 bp, Artificial Sequence
  Description of Artificial Sequence: Synthetic polynucleotide
atggttgaaccagcaaggaaaaagcagaggattgatcgcgatactcatcacactgtggctgaaccagtaacggaagctaaaaatacgttgtacgtgagccagcttaatgaaaaaattaatatgcaaagattaagagtaaacctttttttgctctttgctacgtttggagaggtattgaaggttagcatgaatttcaagaaacagagaggccaagcctttatcaccatgagaaccatcgaccaggccagtttggcccagatttctttaaacggcgagagattctttggtaagcctttgaaagttgagttcagcaagagtgaaactaaaacattgtga

SEQ ID NO: 5647 - DNA, 1731 bp, Saccharomyces cerevisiae
atgagtctggaacccacacaaacggtctccggtacgccgccgatgctgcatcaaagaacacacaaacaagtatacccattgcggatggaaactatcccaatattggaatccgactccaaggctactctacaaagcaacgagcccacccagaaagatgaggaggagaccgaatattttgagaataaacaatccgtgtcgaatttgagccccgatttgaaattcaaacgacacaagaataaacatatccaggggttccctactctgggcgaaaggctggataacctgcaagatataaaaaaggccaagagagtggagaatttcaattcttctgcgccaattgctgacgacaatcatagtggagatgcgactgcaaatgcgactgcaaatgcgactgcaaatgcgactgcgaatgttaatgcaagtgcaatgcccgctccatatatgccttattactattactaccatccgatgaatgcaccaactcctgcaatgataccatatcctggatcaccaatgcattcgattatgcccaactcctcattacagcccttttattcgcaacccactgctgcaggcggtcccgatatgactactccccaaaatatatcttcatcacaacaattgctgccagctccgcaattgtttccgtacggatcattccatcaacaacaacttcagcaaccacactacattcaacgaacaagggaaaggaaaaaatcaatcggaagtcagagaggtagaagattgtctatgttagcatctcaagctaatgggggaagcactattatatctccgcacaaggatattcctgaagaggatttttacaccgtggttggaaatgcgtcttttggtaaaaatttacaaatacgacagcttttcaactggtgtttaatgagatctctgcataaattggagttgaaggctaaaaaccaagaggaagaaggggaacttgaacatctgaccaaaaaatccaagctcgaatcaacaaaggcagaaactgattatgtggatcccaaacgtctggctatggtgataataaaagagtttgtcgatgatcttaaaaaagatcatattgcgatagattgggaagatgaggaaaaatatgaggatgaagatgaggagaagattctggataatactgaaaactacgatgacacggaactgcgacaactgtttcaggaaaacgacgacgacgacgacgacgacgatgaggtggactactcggaaatacagaggtctagacgtaaatttagtgaaaggagaaaagccctaccgaaagaaccaaaaaaactattacctaatagcaaaaacgtggaaaacacaaagaatcttagcattttaacgagcaaggtgaacgcgatcaaaaatgaagtgaaagaatgggcagtcactttagacacttcgagaccagatcttgaatggcaagaattgacttcattctcatcacaaccactggaaccgttgtcggatacagaagagccagaccttgcgattgcagatgttgagacaaagttagaaacaaaagtcgatgagctaaggtaccagtcgcatatattaaactcgcactcactagccttaaacgaaataacaaattcaaaagtgaataaattgaacatagaaacaatgagaaagatctcaagcgaaacggacgatgaccactcacaagtgattaatcctcaacagctgttgaagggattaagtttatctttcagtaaaaaactggatttatga

SEQ ID NO: 5648 - DNA, 1731 bp, Artificial Sequence
  Description of Artificial Sequence: Synthetic polynucleotide
atgagtttagaacccacacaaacggtctccggtacgccgccgatgttgcatcaaagaacacacaaacaagtatacccattgagaatggaaactatcccaatattggaatccgactccaaggctactttacaaagcaacgagcccacccagaaagatgaggaggagaccgaatattttgagaataaacaatccgtgagtaatttgagccccgatttgaaattcaaaagacacaagaataaacatatccaggggttccctactttgggcgaaaggttagataacttacaagatataaaaaaggccaagagagtggagaatttcaattcttctgcgccaattgctgacgacaatcatagtggagatgcgactgcaaatgcgactgcaaatgcgactgcaaatgcgactgcgaatgttaatgcaagtgcaatgcccgctccatatatgccttattactattactaccatccgatgaatgcaccaactcctgcaatgataccatatcctggatctccaatgcattctattatgcccaactcctctttacagcccttttattctcaacccactgctgcaggcggtcccgatatgactactccccaaaatatatcttcttctcaacaattgttaccagctccgcaattgtttccgtacggaagtttccatcaacaacaacttcagcaaccacactacattcaaagaacaagggaaaggaaaaaatctatcggaagtcagagaggtagaagattgtctatgttagcatctcaagctaatgggggaagcactattatatctccgcacaaggatattcctgaagaggatttttacaccgtggttggaaatgcgtcttttggtaaaaatttacaaataagacagcttttcaactggtgtttaatgagatctttgcataaattggagttgaaggctaaaaaccaagaggaagaaggggaacttgaacatttgaccaaaaaatccaagctcgaatctacaaaggcagaaactgattatgtggatcccaaacgtttggctatggtgataataaaagagtttgtcgatgatcttaaaaaagatcatattgcgatagattgggaagatgaggaaaaatatgaggatgaagatgaggagaagattttagataatactgaaaactacgatgacacggaattaagacaattatttcaggaaaacgacgacgacgacgacgacgacgatgaggtggactactctgaaatacagaggtctagacgtaaatttagtgaaaggagaaaagccttaccgaaagaaccaaaaaaattattacctaatagcaaaaacgtggaaaacacaaagaatcttagcattttaacgagcaaggtgaacgcgatcaaaaatgaagtgaaagaatgggcagtcactttagacacttccagaccagatcttgaatggcaagaattgacttctttctcttctcaaccattggaaccgttgagtgatacagaagagccagaccttgcgattgcagatgttgagacaaagttagaaacaaaagtcgatgagttgaggtaccagtctcatatattaaactctcactctttggccttaaacgaaataacaaattctaaagtgaataaattgaacatagaaacaatgagaaagatcagtagcgaaacggacgatgaccactctcaagtgattaatcctcaacagttattgaagggattaagtttatctttcagtaaaaaattggatttatga

SEQ ID NO: 5649 - DNA, 960 bp, Saccharomyces cerevisiae
atgatggggtttgaatggggttttaaacccagcagtaaaataacacagagtacagtcagttcacaaggcacaggcaatgtaatgattccaactgctggagtgaaacaaaaaaggcggtatgccaacgaggagcaagaagaggaagaactacctcgtaacaagaatgtgatgaaatatgggggcgtctccaagaggaggcctcagccaggatcgctcatcagagggcagcctctgcccttgcaacgaggcatggaactaatgaacaagaaccaattacagcagttgttggtggatttgatgacaaaacatccagaaatacaacaaagcgtacatacgagagtcatcggattagacttcagtatacaaaagtgtctggacatgttgaaacaaaaatcagaagccgtttaccagagcataccttacaataggtcttatgagagtaataaattagatgactatgctttcgtgagaatgaaacctcaaattctggagttcttaaactgtttggtggatttcatactggataacattccaccacgtttggaaaatttgcacgcatcattaaaattcttagacatttgcacggaattagttatcaaattgcccagatttgaattagctagtaataattactactacgataaatgcattgaacaattgtctcacgtatggtgtacgcttattgaacatgttgcccgtgacaggataattttattagcagataatagctccgtctggaaaagtcatatgacaagattacaggtatacaatgaacattcaaatgggttattggaacgcccactccagctgttcaaatctttagatatgggtagcccttcagcagcatcgtcatcaacattatcacttcaagaaagtattatttaccaccacgataccatgacagcaaacgaaaacaataacaatagtggtagcgctgctactgattcgccctttaactaa

SEQ ID NO: 5650 - DNA, 960 bp, Artificial Sequence
  Description of Artificial Sequence: Synthetic polynucleotide
atgatggggtttgaatggggttttaaacccagcagtaaaataacacagagtacagtcagttctcaaggcacaggcaatgtaatgattccaactgctggagtgaaacaaaaaaggagatatgccaacgaggagcaagaagaggaagaattacctcgtaacaagaatgtgatgaaatatgggggcgtctccaagaggaggcctcagccaggatctctcatcagagggcagcctttgcccttgcaaagaggcatggaattgatgaacaagaaccaattacagcagttgttggtggatttgatgacaaaacatccagaaatacaacaaagcgtacatacgagagtcatcggattagacttcagtatacaaaagtgtttggacatgttgaaacaaaaaagtgaagccgtttaccagagcataccttacaataggtcttatgagagtaataaattagatgactatgctttcgtgagaatgaaacctcaaattttagagttcttaaactgtttggtggatttcatattggataacattccaccacgtttggaaaatttgcacgcatctttaaaattcttagacatttgcacggaattagttatcaaattgcccagatttgaattagctagtaataattactactacgataaatgcattgaacaattgtctcacgtatggtgtacgcttattgaacatgttgcccgtgacaggataattttattagcagataatagctccgtctggaaaagtcatatgacaagattacaggtatacaatgaacattctaatgggttattggaacgcccactccagttattcaaatctttagatatgggtagcccttctgcagcatcttcttctacattatctcttcaagaaagtattatttaccaccacgataccatgacagcaaacgaaaacaataacaatagtggtagcgctgctactgattctccctttaactga

SEQ ID NO: 5651 - DNA, 1296 bp, Saccharomyces cerevisiae
atggaacctcaagaagagtttataactaccgaagaagttgagcaggagattgtgcccactgtggaggtcgaacaagacgttcccgttgatattgaaggagagaatgacgacgatgatgaaatgatgaatgatgatgaggaagctttggaggtcgacatgtccaacaactcgcttacctatttcgataagcacacagactccgtgtttgccattggccatcatcctaacctgccgctagtatgtaccggtgggggtgataacttggcacatctttggacatcacattcacagccacccaagtttgctggcactctaaccggttatggcgaatctgtgatttcatgttctttcacttctgaagggggcttcttggtcactgccgatatgtcggggaaggttcttgtacacatgggtcaaaaaggtggcgctcagtggaagttggcatcgcaaatgcaagaagtcgaagagattgtttggctgaaaactcatcccactatagcaaggacgtttgcgtttggtgcaactgatggatctgtttggtgctaccagattaatgagcaggatggttctttggaacagttaatgtctggttttgtacaccagcaagattgctctatgggtgaattcattaacaccgacaagggtgaaaatacgctggaattagtcacttgttctttggatagcactattgtggcatggaattgcttcactggccaacaattatttaagatcacacaggcagaaatcaagggattagaagctccatggatttccctatcattagctccggaaactttgaccaagggtaactcgggtgtcgtggcatgtgggtccaacaatggtcttctggcagtaattaattgtaacaatggcggtgcgattttacatttatctacagtgattgaactaaagccagaacaagacgaattagatgcctccattgaatccatttcttggtcatccaaattctcccttatggccattggccttgtctgcggtgaaatactcttatatgatacaagtgcatggagagtaagacacaagtttgttctcgaagattctgttacaaaacttatgtttgataatgatgacttattcgcatcgtgtatcaatggtaaggtttaccagtttaatgcaagaactggccaagagaagtttgtttgtgtgggccataatatgggggttcttgattttatattactgcatcctgtggcaaataccggcaccgagcagaagagaaaagtaataactgcaggtgatgaaggtgtatctctggtgttcgaggtaccaaactga

SEQ ID NO: 5652 - DNA, 1296 bp, Artificial Sequence
  Description of Artificial Sequence: Synthetic polynucleotide
atggaacctcaagaagagtttataactaccgaagaagttgagcaggagattgtgcccactgtggaggtcgaacaagacgttcccgttgatattgaaggagagaatgacgacgatgatgaaatgatgaatgatgatgaggaagctttggaggtcgacatgtccaacaactctcttacctatttcgataagcacacagactccgtgtttgccattggccatcatcctaacttaccgttagtatgtaccggtgggggtgataacttggcacatctttggacatctcattctcagccacccaagtttgctggcactttgaccggttatggcgaatctgtgattagttgttctttcacttctgaagggggcttcttggtcactgccgatatgagtgggaaggttcttgtacacatgggtcaaaaaggtggcgctcagtggaagttggcatctcaaatgcaagaagtcgaagagattgtttggttgaaaactcatcccactatagcaaggacgtttgcgtttggtgcaactgatggatctgtttggtgctaccagattaatgagcaggatggttctttggaacagttaatgtctggttttgtacaccagcaagattgctctatgggtgaattcattaacaccgacaagggtgaaaatacgttagaattagtcacttgttctttggatagcactattgtggcatggaattgcttcactggccaacaattatttaagatcacacaggcagaaatcaagggattagaagctccatggatttccttatctttagctccggaaactttgaccaagggtaacagtggtgtcgtggcatgtgggtccaacaatggtcttttagcagtaattaattgtaacaatggcggtgcgattttacatttatctacagtgattgaattgaagccagaacaagacgaattagatgcctccattgaatccatttcttggtcttccaaattctcccttatggccattggccttgtctgcggtgaaatactcttatatgatacaagtgcatggagagtaagacacaagtttgttctcgaagattctgttacaaaacttatgtttgataatgatgacttattcgcatcttgtatcaatggtaaggtttaccagtttaatgcaagaactggccaagagaagtttgtttgtgtgggccataatatgggggttcttgattttatattattacatcctgtggcaaataccggcaccgagcagaagagaaaagtaataactgcaggtgatgaaggtgtatctttggtgttcgaggtaccaaactga

SEQ ID NO: 5653 - DNA, 366 bp, Saccharomyces cerevisiae
atgtccactaagttgcctattgtgatttcaaacggaacagccttcaaaaaagtccccgttcaattgctgttgaatagcggatcagaggcacaacatggcctccctaggaacgctgactctcagcctgctcgaccaagaacgggcattactaggacatgtgggcaatgtggagagattaagacttcattacaatggagggagggccctaacggtgctgcttgcctgtgtaatgcttgtgggttgttttttagaaaattgattctgcgcttcggtagagcagctgctaaaagatacatggagcaaattaaaggtaccgggactaagagaaggatccccaaagaacttaccggaactgtcagattctga

SEQ ID NO: 5654 - DNA, 366 bp, Artificial Sequence
  Description of Artificial Sequence: Synthetic polynucleotide
atgtccactaagttgcctattgtgatttccaacggaacagccttcaaaaaagtccccgttcaattgttgttgaatagcggatctgaggcacaacatggcctccctaggaacgctgactctcagcctgctagaccaagaacgggcattactaggacatgtgggcaatgtggagagattaagacttctttacaatggagggagggccctaacggtgctgcttgcttgtgtaatgcttgtgggttgttttttagaaaattgattttgcgcttcggtagagcagctgctaaaagatacatggagcaaattaaaggtaccgggactaagagaaggatccccaaagaacttaccggaactgtcagattctga

SEQ ID NO: 5655 - DNA, 729 bp, Saccharomyces cerevisiae
atgttgcatttggaagatgacaatggacgacaaaggtcagtgatagcgaatttgcagaaattcgtttattgctgcctgtacttgaggtttatcaaagatggatcattattcttgatcctcctggggtggataatttcatcgctctgtgatttcattcaggaattgacactcaggtacctgaagaagaactatttagaggtgggccgcgacaatgatcaggaagatgatgaaagtcttgccatcagagggttagaaacacctattgtaagaatgataataaacaaagccatacgatattaccaaggcctaatacttctagaaacagcgtactgtatagtataccacattaggctagacgtatcgagagacatatgttccaaaccgtacggatttgtgataatgcttttgataagggaatttacttgtccggtacccacagcgtttcctagcaagctacttctggtactactcgatattttattacttttctgccagattgtaataataaacggctcactgagctcgagtcttcagaacgtgaaacttattgtcaaggagttgaatgcagaagaagagggcgcactcaacattctcaaacttaatacctggcacatggatgcaaccggaccggaactcatagtactcaagaatcatgacaagtcgattcctcaacaggcagacggggatgacgctacagagatcactcctctactgaatatcgccgaataa

SEQ ID NO: 5656 - DNA, 729 bp, Artificial Sequence
  Description of Artificial Sequence: Synthetic polynucleotide
atgttgcatttggaagatgacaatggaagacaaaggtctgtgatagcgaatttgcagaaattcgtttattgctgcttatacttgaggtttatcaaagatggatctttattcttgatcctcttagggtggataatttcttctctctgtgatttcattcaggaattgacactcaggtacttgaagaagaactatttagaggtgggccgcgacaatgatcaggaagatgatgaaagtcttgccatcagagggttagaaacacctattgtaagaatgataataaacaaagccataagatattaccaaggcttgatacttttagaaacagcgtactgtatagtataccacattaggttggacgtatctagagacatatgttccaaaccgtacggatttgtgataatgcttttgataagggaatttacttgtccggtacccacagcgtttcctagcaagcttcttttggtattactcgatattttattacttttctgccagattgtaataataaacggctctttaagcagtagtcttcagaacgtgaaacttattgtcaaggagttgaatgcagaagaagagggcgcactcaacattctcaaacttaatacctggcacatggatgcaaccggaccggaactcatagtactcaagaatcatgacaagtctattcctcaacaggcagacggggatgacgctacagagatcactcctttattgaatatcgccgaatga

SEQ ID NO: 5657 - DNA, 435 bp, Saccharomyces cerevisiae
atgggcaagaaagcacacggaggaaagatgaaacctgagatcgacgaaaatggtactctgctagtaccgccaccaaggacgattgcgaaccaggaccatttccatagattaaactacctctaccaaatatccgcttaccaaacaagagcaagacagaaagcaagaacagacgcacatacgcctttggcacgcaattatatcaaatcaatggacctaattagtaagaaaaccaagacatcactgcttcctacgataaagagaacaatttgtaaaaaatgccatcggttgttatggaccccaaaaaaactggaaatcacatccgacggagcgctttcggtaatgtgtgggtgcggtaccgttaaacgttttaatattggcgccgatcctaattacaggacctactcggagcgggagggtaatctactaaattcttag

SEQ ID NO: 5658 - DNA, 435 bp, Artificial Sequence
  Description of Artificial Sequence: Synthetic polynucleotide
atgggcaagaaagcacacggaggaaagatgaaacctgagatcgacgaaaatggtactttattggtaccgccaccaaggacgattgcgaaccaggaccatttccatagattaaactacctctaccaaatatccgcttaccaaacaagagcaagacagaaagcaagaacagacgcacatacgcctttggcacgcaattatatcaaatctatggacttgattagtaagaaaaccaagacatctttacttcctacgataaagagaacaatttgtaaaaaatgccatagattgttatggaccccaaaaaaattagaaatcacatccgacggagcgctttctgtaatgtgtgggtgcggtaccgttaaacgttttaatattggcgccgatcctaattacaggacctactctgagagagagggtaatttattgaattcttga

SEQ ID NO: 5659 - DNA, 798 bp, Saccharomyces cerevisiae
atgagtggcacgaggtgtttgctaggcgtcggactaccagttgatgtgactgctacggaaactttgactcatgatgaacaaggaccaggtgtagagccaggaccgtgttcgcgaggaagttctatagatggtctgctgccctcgttgctcggtccacatgatgatgtggatgacgattcggcggcttttcacaagtacatgacactatcgcgagatggcgcaggcgccatccatgctccgtcattagtcgaagacgcctcaaggaacgacgacgacgacgatgatgaagacgacgacgacagttccatgtcgcgagacctatccaaggctctagatatgtcatcgtcatcatcgtccagcccgcgcgttcaaagtcggcggcaccgtagttctgtgagcgcaatatctgcaatcttacaccaaggaaaatctggccgcgaagacataactggaagccttagcgttccggcagaacaagaaaaactcagttttcttgccaaagcctcgagtattttctttcgaaggaacagtatgcccagagacaaacatacgcattcagtatgtcccgctagccgcccagattccgagagatttatcgtcacatctgcagccgcgcagtctttacgccgccaacaacaactggaagacgctcagtacgctcgagttattacaaactttcgtactataggatggtgctctcccagcgagatagagtctgtggaatataaacggtccttgatcaatgcggagtgggacgaaaagatctcgcttttgtctcacgcgcaatgctataaataa

SEQ ID NO: 5660 - DNA, 798 bp, Artificial Sequence
  Description of Artificial Sequence: Synthetic polynucleotide
atgagtggcacgaggtgtttgttgggcgtcggattaccagttgatgtgactgctacggaaactttgactcatgatgaacaaggaccaggtgtagagccaggaccgtgttctagaggaagttctatagatggtttattgccctctttgctcggtccacatgatgatgtggatgacgattctgcggcttttcacaagtacatgacattaagtagagatggcgcaggcgccatccatgctccgtctttagtcgaagacgcctctaggaacgacgacgacgacgatgatgaagacgacgacgacagttccatgtctagagacttatccaaggctttagatatgtcttcttcttcttcttccagcccgcgcgttcaaagtaggaggcaccgtagttctgtgagcgcaatatctgcaatcttacaccaaggaaaatctggccgcgaagacataactggaagccttagcgttccggcagaacaagaaaaactcagttttcttgccaaagcctccagtattttctttagaaggaacagtatgcccagagacaaacatacgcattctgtatgtcccgctagccgcccagattccgagagatttatcgtcacatctgcagccgcgcagtctttacgccgccaacaacaattggaagacgctcagtacgctcgtgttattacaaactttcgtactataggatggtgctctcccagcgagatagagtctgtggaatataaaagatccttgatcaatgcggagtgggacgaaaagatctctcttttgtctcacgcgcaatgctataaatga

SEQ ID NO: 5661 - DNA, 564 bp, Saccharomyces cerevisiae
atgagtgcgaaacaagggtgggaaaagaaatcaacaaacattgacattgcaagcaggaagggtatgaacgtgaacaatctttcggaacatctacagaacctgatatcaagcgattcagagctgggctcgcgcttgctatcattgctgctggttagcagtggcaacgcggaggagctcattagcatgataaataatggccaggatgtctcgcagtttaagaagctccgcgagccgagaaaggggaaggttgccgcaacaacagcagttgttgtaaaagaagaggaagctcccgtgagcacttctaacgaactggataagattaagcaagagcggagaagaaagaacacagaggcgtcgcagcggttccgcattcgcaagaaacaaaagaattttgagaacatgaataagctgcagaacttaaacacgcaaatcaacaaacttcgcgatcgtatagagcaattgaacaaggaaaatgagttttggaaagcaaagctcaatgacattaacgagattaagtctttgaaattgttgaatgacattaagagacggaacatgggcaggtag

SEQ ID NO: 5662 - DNA, 564 bp, Artificial Sequence
  Description of Artificial Sequence: Synthetic polynucleotide
atgagtgcgaaacaagggtgggaaaagaaatctacaaacattgacattgcaagcaggaagggtatgaacgtgaacaatctttctgaacatttacagaacttgatatctagcgattctgagttgggctctcgcttgttatctttgttgttggttagcagtggcaacgcggaggagctcattagcatgataaataatggccaggatgtctcccagtttaagaagctccgcgagccgagaaaggggaaggttgccgcaacaacagcagttgttgtaaaagaagaggaagctcccgtgagcacttctaacgaattagataagattaagcaagagagaagaagaaagaacacagaggcgtctcagagattccgcattcgcaagaaacaaaagaattttgagaacatgaataagttacagaacttaaacacgcaaatcaacaaacttcgcgatcgtatagagcaattgaacaaggaaaatgagttttggaaagcaaagctcaatgacattaacgagattaagtctttgaaattgttgaatgacattaagagaagaaacatgggcaggtga

SEQ ID NO: 5663 - DNA, 738 bp, Saccharomyces cerevisiae
atggctctacctctgataaaacctaaggagtctgaggaaagccacctcgctcttttgtccaagatccacgtgtccaaaaattggaaactgcctccaaggttgccccatagagcagctcagcggaggaaaagagttcatcgacttcacgaagattacgaaactgaagaaaatgatgaggagctacagaagaaaaaacggcagaatagagacgcccaaagggcctacagagaacgcaaaaacaacaagttgcaagtgctggaggaaaccatagagtcactgagtaaggtcgttaaaaactacgaaacgaaactaaaccgcctccaaaatgaacttcaagcgaaagaatcggaaaatcatgcccttaaacagaaattggagacccttactctgaaacaagcctctgtgcctgctcaggaccctatcctgcagaatttgatcgagaatttcaaaccaatgaaggcgatacctattaagtacaataccgctatcaagcgccaccagcactcgacagaactgcctagctctgtcaaatgcggcttttgtaacgacaacactacttgcgtttgtaaagaactggaaacagatcaccgtaaaagtgacgacggtgtggccacagaacagaaggatatgtcgatgccacatgcagagtgcaataataaagataaccccaatgggctctgtagtaattgtactaatatcgacaaatcatgtatcgacatccggtccatcatccactga

SEQ ID NO: 5664 - DNA, 738 bp, Artificial Sequence
  Description of Artificial Sequence: Synthetic polynucleotide
atggctttacctttgataaaacctaaggagtctgaggaaagccacctcgctcttttgtccaagatccacgtgtccaaaaattggaaattacctccaaggttgccccatagagcagctcagagaaggaaaagagttcatagacttcacgaagattacgaaactgaagaaaatgatgaggagttacagaagaaaaaaagacagaatagagacgcccaaagggcctacagagaacgcaaaaacaacaagttgcaagtgttggaggaaaccatagagtctttgagtaaggtcgttaaaaactacgaaacgaaattgaaccgcctccaaaatgaacttcaagcgaaagaaagtgaaaatcatgcccttaaacagaaattggagacccttactttgaaacaagcctctgtgcctgctcaggaccctatcttacagaatttgatcgagaatttcaaaccaatgaaggcgatacctattaagtacaataccgctatcaagcgccaccagcactctacagaattacctagctctgtcaaatgcggcttttgtaacgacaacactacttgcgtttgtaaagaattggaaacagatcaccgtaaaagtgacgacggtgtggccacagaacagaaggatatgtccatgccacatgcagagtgcaataataaagataaccccaatgggctctgtagtaattgtactaatatcgacaaaagttgtatcgacatcagatccatcatccactga

SEQ ID NO: 5665 - DNA, 138 bp, Saccharomyces cerevisiae
atgcctagtgattatacttcccattacccagtaatacttatcaaaaaaaaaaaaaaaaaaattgcaggaatgtataggcatagtaagcggtaccttgagataatgtccaccgcttcagctcaattcgtcggaaactaa

SEQ ID NO: 5666 - DNA, 138 bp, Artificial Sequence
  Description of Artificial Sequence: Synthetic polynucleotide
atgcctagtgattatacttcccattacccagtaatacttatcaaaaaaaaaaaaaaaaaaattgcaggaatgtataggcatagtaagagataccttgagataatgtccaccgcttctgctcaattcgtcggaaactga

SEQ ID NO: 5667 - DNA, 4104 bp, Saccharomyces cerevisiae
atgcaaagaccatttctactcgcttatttggtcctttcgcttctatttaactcggctttgggttttccaactgcactagttccaagaggatcctccgaaggaactagctgtaattctatcgttaatggctgtcccaacttagacttcaattggcacatggaccagcaaaatatcatgcagtatactttggatgtgacttccgtttcttgggttcaagacaacacataccaaatcactattcatgtcaaaggtaaagaaaatattgacctgaagtatctatggtctttgaaaatcattggtgtcactggtccaaaaggtaccgtccaactatacggttacaacgaaaatacctatttgattgacaacccaactgatttcacagccacttttgaagtttatgccacacaagatgtcaacagctgtcaggtgtggatgcctaacttccaaattcaattcgagtatttgcaaggtagtgccgctcaatatgcaagctcctggcaatggggaactacatcttttgatttgtctactggttgtaacaactatgacaatcaaggccactctcaaacggatttcccaggcttctattggaacatagattgtgacaataattgtggcggtacgaagtcatctaccactacatctagcacttccgagtcatctaccactacatctagcacttccgagtcatctaccactacatctagcacttccgagtcatctaccactacatctagcacttccgagtcatctacatcatcatcaaccaccgctcctgctacaccaaccactacctcatgcactaaggaaaagcctacacccccaaccactacctcatgcacaaaggaaaagcctacacctcctcatcacgacaccactccatgtacaaagaagaaaactaccacatctaagacatgcactaagaagactactactccagtaccaaccccatcaagctctactactgaaagttcttctgctccagtaccaactccatccagctctactactgaaagctcttctgctccagtaaccagctctaccactgaaagctcttctgctccagtaccaaccccatcaagctctactactgaaagctcttctgctccagtaaccagctctaccactgaaagctcttctgctccagtaaccagctctaccactgaaagctcttctgctccagtaccaactccatccagctctactactgaaagctcttctgctccagtaaccagctctaccactgaaagctcttctgctccagtaaccagctctaccactgaaagctcttctgctccagtaaccagctctaccactgaaagctcttctgctccagtaaccagctctaccactgaaagctcttctgctccagtaccaactccatccagctctactactgaaagctcttctgctccagtaaccagctctaccactgaaagctcttctgctccagtaccaactccatccagctctactactgaaagctcttctgctccagtaaccagctctaccactgaaagctcttctgctccagtaccaactccatccagctctactactgaaagctcttctgctccagctccaaccccatcaagctccaccactgaaagctcttctgctccagtaaccagctctaccactgaaagctcttctgctccagtaccaactccatccagctctactactgaaagctcttctactccagtaaccagctccaccactgaaagctcttctgctccagtgccaactccatcaagctctactactgaaagctcttctgctccagtaccaactccatcaagctctactactgaaagctcttctgctccagctccaaccccatcaagctctactactgaaagctcttctgctccagtaaccagctctaccactgaaagctcttctgctccagtaccaactccatccagctctactactgaaagctcttctgctccagtaccaaccccatccagctctactactgaaagctcttctgctccagtaccaactccatccagctctactactgaaagctcttctgctccagtaaccagctctaccactgaaagctcttctgctccagtaaccagctctaccactgaaagctcttctgctccagtaccaactccatccagctctactactgaaagctcttctgctccagtaccaactccatccagctctactactgaaagctcttctgctccagtaccaactccatccagctctactactgaaagctcttctgctccagtaaccagctctaccactgaaagctcttctgctccagtaccaactccatccagctctactactgaaagctcttctgctccagtgccaactccatccagctctactaccgaaagctcttctgctccagtaccaaccccatcaagctctactactgaaagctctgtagcaccagtaccaaccccatcttcctctagcaacatcacttcctccgctccatcttcaaccccattcagctctagcactgaaagctcttctgttccagtaccaaccccatcaagctctactactgaaagctcttctgctccagtatccagctccaccactgaaagctctgtagcaccagtaccaaccccatcttcctctagcaacatcacttcctccgctccatcttcaattccattcagctctactactgaaagcttttctactggcactactgtcactccatcatcatccaaataccctggcagtcaaacagaaacctctgtttcttctacaaccgaaactaccattgttccaactaaaactacgacttctgtcactacaccatcaacaaccactattaccactacggtttgctctacaggaacaaactctgccggtgaaactacctctggatgctctccaaagaccgttacaactactgttccaactacaactacgacttctgtcactacatcatcaacaaccactattactactacagtttgctctacaggaacaaactctgccggtgaaactacctctggatgctctccaaagaccattacaactactgttccatgttcaaccagtccaagcgaaaccgcctcggaatcaacaaccacttcacctaccacacctgtaactacagttgtctcaaccaccgtcgttactactgagtattctactagtacaaaaccaggtggtgaaattacaactacatttgtcaccaaaaacattccaaccacttacctaaccacaattgctccaactccatcagtcactacggttaccaatttcaccccaaccactattactactacggtttgctctacaggtacaaactctgccggtgaaactacctctggatgctctccaaagactgtcacaaccactgttccttgttcaactggtactggcgaatacactactgaagctaccacccttgttacaacagctgtcacaaccaccgttgttaccactgaatcctctacgggtactaactccgctggtaagacgacaactggttacacaacaaagtctgtaccaaccacctatgtaaccactttggctccaagtgcaccagtaactcctgccactaatgccgtaccaactacaataaccactactgaatgttctgctgctacaaacgctgccggtgaaactacatctgtatgctctgctaagactatcgtaagttctgcaagcgcaggcgaaaacactgcaccttcggctaccacccctgtcacgacggctattccaaccacagttattaccactgagtcatctgttggtactaactccgctggcgaaacaacaactggttacacaaccaagtccatcccaaccacttacataaccactttgattccaggttcaaatggtgccaagaattacgaaactgtggccacagcaaccaaccctatttcaatcaagactacatcccaactagctacaacagcttctgcttctagcgtggctcccgttgtcacatctccatctctaactggtccactacaatctgcttctggttctgcagtcgctacatactctgttccttctatctcgagtacttaccaaggtgctgctaatatcaaggttcttggaaactttatgtggttgctactcgctcttccagttgtattctaa

SEQ ID NO: 5668 - DNA, 4104 bp, Artificial Sequence
  Description of Artificial Sequence: Synthetic polynucleotide
atgcaaagaccatttttactcgcttatttggtcctttctcttttatttaactctgctttgggttttccaactgcattggttccaagaggatcctccgaaggaactagctgtaattctatcgttaatggctgtcccaacttagacttcaattggcacatggaccagcaaaatatcatgcagtatactttggatgtgacttccgtttcttgggttcaagacaacacataccaaatcactattcatgtcaaaggtaaagaaaatattgacttgaagtatttatggtctttgaaaatcattggtgtcactggtccaaaaggtaccgtccaattgtacggttacaacgaaaatacctatttgattgacaacccaactgatttcacagccacttttgaagtttatgccacacaagatgtcaacagctgtcaggtgtggatgcctaacttccaaattcaattcgagtatttgcaaggtagtgccgctcaatatgcaagctcctggcaatggggaactacatcttttgatttgtctactggttgtaacaactatgacaatcaaggccactctcaaacggatttcccaggcttctattggaacatagattgtgacaataattgtggcggtacgaagtcttctaccactacatctagcacttccgagtcttctaccactacatctagcacttccgagtcttctaccactacatctagcacttccgagtcttctaccactacatctagcacttccgagtcttctacatcttcttccaccaccgctcctgctacaccaaccactaccagctgcactaaggaaaagcctacacccccaaccactaccagctgcacaaaggaaaagcctacacctcctcatcacgacaccactccatgtacaaagaagaaaactaccacatctaagacatgcactaagaagactactactccagtaccaaccccatccagctctactactgaaagttcttctgctccagtaccaactccatccagctctactactgaaagctcttctgctccagtaaccagctctaccactgaaagctcttctgctccagtaccaaccccatccagctctactactgaaagctcttctgctccagtaaccagctctaccactgaaagctcttctgctccagtaaccagctctaccactgaaagctcttctgctccagtaccaactccatccagctctactactgaaagctcttctgctccagtaaccagctctaccactgaaagctcttctgctccagtaaccagctctaccactgaaagctcttctgctccagtaaccagctctaccactgaaagctcttctgctccagtaaccagctctaccactgaaagctcttctgctccagtaccaactccatccagctctactactgaaagctcttctgctccagtaaccagctctaccactgaaagctcttctgctccagtaccaactccatccagctctactactgaaagctcttctgctccagtaaccagctctaccactgaaagctcttctgctccagtaccaactccatccagctctactactgaaagctcttctgctccagctccaaccccatccagctccaccactgaaagctcttctgctccagtaaccagctctaccactgaaagctcttctgctccagtaccaactccatccagctctactactgaaagctcttctactccagtaaccagctccaccactgaaagctcttctgctccagtgccaactccatccagctctactactgaaagctcttctgctccagtaccaactccatccagctctactactgaaagctcttctgctccagctccaaccccatccagctctactactgaaagctcttctgctccagtaaccagctctaccactgaaagctcttctgctccagtaccaactccatccagctctactactgaaagctcttctgctccagtaccaaccccatccagctctactactgaaagctcttctgctccagtaccaactccatccagctctactactgaaagctcttctgctccagtaaccagctctaccactgaaagctcttctgctccagtaaccagctctaccactgaaagctcttctgctccagtaccaactccatccagctctactactgaaagctcttctgctccagtaccaactccatccagctctactactgaaagctcttctgctccagtaccaactccatccagctctactactgaaagctcttctgctccagtaaccagctctaccactgaaagctcttctgctccagtaccaactccatccagctctactactgaaagctcttctgctccagtgccaactccatccagctctactaccgaaagctcttctgctccagtaccaaccccatccagctctactactgaaagctctgtagcaccagtaccaaccccatcttcctctagcaacatcacttcctccgctccatcttccaccccattcagctctagcactgaaagctcttctgttccagtaccaaccccatccagctctactactgaaagctcttctgctccagtatccagctccaccactgaaagctctgtagcaccagtaccaaccccatcttcctctagcaacatcacttcctccgctccatcttccattccattcagctctactactgaaagcttttctactggcactactgtcactccatcttcttccaaataccctggcagtcaaacagaaacctctgtttcttctacaaccgaaactaccattgttccaactaaaactacgacttctgtcactacaccatctacaaccactattaccactacggtttgctctacaggaacaaactctgccggtgaaactacctctggatgctctccaaagaccgttacaactactgttccaactacaactacgacttctgtcactacatcttctacaaccactattactactacagtttgctctacaggaacaaactctgccggtgaaactacctctggatgctctccaaagaccattacaactactgttccatgttctaccagtccaagcgaaaccgccagtgaatctacaaccacttctcctaccacacctgtaactacagttgtctccaccaccgtcgttactactgagtattctactagtacaaaaccaggtggtgaaattacaactacatttgtcaccaaaaacattccaaccacttacttgaccacaattgctccaactccaagtgtcactacggttaccaatttcaccccaaccactattactactacggtttgctctacaggtacaaactctgccggtgaaactacctctggatgctctccaaagactgtcacaaccactgttccttgttccactggtactggcgaatacactactgaagctaccacccttgttacaacagctgtcacaaccaccgttgttaccactgaatcctctacgggtactaactccgctggtaagacgacaactggttacacaacaaagtctgtaccaaccacctatgtaaccactttggctccaagtgcaccagtaactcctgccactaatgccgtaccaactacaataaccactactgaatgttctgctgctacaaacgctgccggtgaaactacatctgtatgctctgctaagactatcgtaagttctgcaagcgcaggcgaaaacactgcaccttctgctaccacccctgtcacgacggctattccaaccacagttattaccactgagtcttctgttggtactaactccgctggcgaaacaacaactggttacacaaccaagtccatcccaaccacttacataaccactttgattccaggtagtaatggtgccaagaattacgaaactgtggccacagcaaccaaccctatttccatcaagactacatcccaattggctacaacagcttctgcttctagcgtggctcccgttgtcacatctccatctttgactggtccattgcaatctgcttctggttctgcagtcgctacatactctgttccttctatctccagtacttaccaaggtgctgctaatatcaaggttcttggaaactttatgtggttgttgctcgctcttccagttgtattctga

SEQ ID NO: 5669 - DNA, 303 bp, Saccharomyces cerevisiae
atgacattctttcttaaaagaaaaattagcttttttttgtcaggcattgcacaaacttttttatttctgcctatactcttaaacagatcagtcattcatgttgtctttttaacggtcgtactgggacatcgcataccttgggattccgtaattaggtgcaacaatacgggcacaactcattctgcggtatcttcacggacagaacttctattgcctatcggtggtgtgattaacaattggaagcgcagagcttggaatggattttcaattcaatggatttggaggtattcgtttgtttactaa

SEQ ID NO: 5670 - DNA, 303 bp, Artificial Sequence
  Description of Artificial Sequence: Synthetic polynucleotide
atgacattctttcttaaaagaaaaattagcttttttttgagcggcattgcacaaacttttttatttttacctatactcttaaacagatctgtcattcatgttgtctttttaacggtcgtattgggacatcgcataccttgggattccgtaattaggtgcaacaatacgggcacaactcattctgcggtatcttccaggacagaacttttattgcctatcggtggtgtgattaacaattggaagcgcagagcttggaatggattttctattcaatggatttggaggtattcttttgtttactga

SEQ ID NO: 5671 - DNA, 1092 bp, Saccharomyces cerevisiae
atgtctccgaagaatataacaaggtcggtgatcccggctatagatttgtattgccgcaaagcaaattttaaaactctaaaatcattgtcgatgatcctaggtagtaaaaaagaatggtatgacactaaaaaggcgccattgagaacctttttggtctctcgatgtggcattttcgagcagttgaggggtcgtctcgttgaagatggcaaagtcaacttgtttagtgttttcctgacaaacgactcattttctttttgcaagatgaccgttgatgataagttcaacactagcttggtcgattggcaaaaaataccctttgacagtacatttgcaactgacagaagacagaatatcagtttactacctgttgatacactgtttgcaactgaaaagatcatatcgattcttggtgtatctcctaatatgacgaatcttgtttctatagaaagagagcgatcagacctggtggattttaattgtaaactgcaatcaaacatcctagaacacctactatacgcgaaatgccaaggagtgtacgtaacttctaccaatgaaaaagctcgtttgcttgcagctgtctgcaatcctgaattcattgacaccttctggtgcgaattgactcccataagagtctcattaaaggaaaacccttccatttctgtacctcgagaatatcagatgtacgatccggtggtacgtgccactataaaggaggttgtcaccaagcgattactgcgatccgccttcgataatgacatcgacccgctaatgtgtcttcatttggataaaggctggaaacttaaattccccatactatcctcgacaacgggcctaaacttctccctgaaggattgtctttccctggacacaggaaaagatgcatctgatatgacagaggtgtttctcgctactatggagtcgagtaaagttcttcgtacgtatagcaacctcgttgacattgtgatgaaggacaatggtaggttggactcaggcgtcctaaagcaattcaacgactacgttaagcaagaaaagctcaatctacaacattttcaggccggttcctcaaagtttctcaaaggcgcaaagatataa

SEQ ID NO: 5672 - DNA, 1092 bp, Artificial Sequence
  Description of Artificial Sequence: Synthetic polynucleotide
atgtctccgaagaatataacaaggtctgtgatcccggctatagatttgtattgccgcaaagcaaattttaaaactttgaaatctttgtccatgatcttgggtagtaaaaaagaatggtatgacactaaaaaggcgccattgagaacctttttggtctctcgttgtggcattttcgagcagttgaggggtcgtctcgttgaagatggcaaagtcaacttgtttagtgttttcttaacaaacgactctttttctttttgcaagatgaccgttgatgataagttcaacactagcttggtcgattggcaaaaaataccctttgacagtacatttgcaactgacagaagacagaatatcagtttattgcctgttgatacattatttgcaactgaaaagatcatatctattcttggtgtatctcctaatatgacgaatcttgtttctatagaaagagagagaagtgacttggtggattttaattgtaaattacaaagtaacatcttggaacacttattgtacgcgaaatgccaaggagtgtacgtaacttctaccaatgaaaaagctcgtttgcttgcagctgtctgcaatcctgaattcattgacaccttctggtgcgaattgactcccataagagtctctttaaaggaaaacccttccatttctgtacctagagaatatcagatgtacgatccggtggtacgtgccactataaaggaggttgtcaccaagagattacttcgttccgccttcgataatgacatcgacccgttaatgtgtcttcatttggataaaggctggaaacttaaattccccatattatcctctacaacgggcttgaacttctccttgaaggattgtctttccttggacacaggaaaagatgcatctgatatgacagaggtgtttctcgctactatggagagcagtaaagttcttcgtacgtatagcaacctcgttgacattgtgatgaaggacaatggtaggttggacagtggcgtcttgaagcaattcaacgactacgttaagcaagaaaagctcaatttacaacattttcaggccggttcctccaagtttctcaaaggcgcaaagatatga

SEQ ID NO: 5673 - DNA, 213 bp, Saccharomyces cerevisiae
atgtcattctctgtcagctgcaagactcccaagaccacgaagctgctggtatcttctatttcagagagcgctgttgctcttattattattaccatacgtatacttttttccattggcaaaagcgatttcaaaaaaataatctccaaggaaataaatggtgcagaaacaatatactacagaaatataccggaaagtaaaccccaagggagttag

SEQ ID NO: 5674 - DNA, 213 bp, Artificial Sequence
  Description of Artificial Sequence: Synthetic polynucleotide
atgagtttctctgtcagctgcaagactcccaagaccacgaagttattggtatcttctatttctgagagcgctgttgctcttattattattaccatacgtatacttttttccattggcaaaagcgatttcaaaaaaataatctccaaggaaataaatggtgcagaaacaatatactacagaaatataccggaaagtaaaccccaagggagttga

SEQ ID NO: 5675 - DNA, 504 bp, Saccharomyces cerevisiae
atgaatctaagatttgaattgcagaaactattgaacgtttgctttttgtttgcatctgcttacatgttctggcaaggcttagccattgctactaatagcgcttctccgatcgtggtggtgctttcaggctccatggaaccagctttccaaaggggtgatatccttttcctatggaatagaaatactttcaaccaagtaggtgatgtcgtggtgtatgaggtcgaagggaaacaaatccccattgtgcatagagttttgaggcaacataacaatcacgcggacaagcaattcctcctgaccaaaggtgacaataacgccggcaatgatatctcactatatgctaataagaaaatttacttgaacaagtcaaaggagattgtagggaccgtcaagggctactttccacaactagggtacattacgatttggattagcgagaacaaatatgccaagtttgcattgttaggtatgttggggttgagtgctctgctggggggcgagtag

SEQ ID NO: 5676 - DNA, 504 bp, Artificial Sequence
  Description of Artificial Sequence: Synthetic polynucleotide
atgaatttaagatttgaattgcagaaacttttgaacgtttgctttttgtttgcatctgcttacatgttctggcaaggcttagccattgctactaatagcgcttctccgatcgtggtggtgctttctggctccatggaaccagctttccaaaggggtgatatccttttcttatggaatagaaatactttcaaccaagtaggtgatgtcgtggtgtatgaggtcgaagggaaacaaatccccattgtgcatagagttttgaggcaacataacaatcacgcggacaagcaattcctcttgaccaaaggtgacaataacgccggcaatgatatctctttgtatgctaataagaaaatttacttgaacaagtccaaggagattgtagggaccgtcaagggctactttccacaattagggtacattacgatttggattagcgagaacaaatatgccaagtttgcattgttaggtatgttggggttgagtgctttattagggggcgagtga

SEQ ID NO: 5677 - DNA, 2913 bp, Saccharomyces cerevisiae
atggaccctcaccaatcaccagctgataatgccgcatcgcctacgaagagcgtgaaggcaaccactaaaaattcgtccacgaataataatgtcaatagcaacaacagcaataataacagtaaccatgatatactgaattttaatgataactatactaccattctgcaacatttggcaaacgaccatcctaatatactgagggagaaaggaggatcacaacaacaacagcatcagcagcagcaacaacagcaacaacagcagcaacaacagcagcaacaacagagcctggatacccttttgcaccattatcaaagtttactctccaagagtgataatgcaatagcctttgatgacaatgttagtaacagcgcagatcataatggcagtaatagcaacaataataacaacaataatgacatatctagtcccggtaatctgatgggatcttgcaatcaatgtagattaaagaaaacaaagtgcaactattttcccgacctaggcaactgtctcgaatgtgaaacgtcaagaactaaatgcaccttcagtattgctccaaattatttgaaaagaacgtcctctggggcaaacaataacatgccaacctcttcaaactccaaacgaatgaaaaattttgaagactattcgaatcgcttacccagtagcatgctctatagacatcaacagcagcagcaacagcaacagcagcaacagcgtatacaataccccagatcctcttttttcgtcggtccggcctcagttttcgatttgaacttgaccaagcatgtaagactagataatgttgaccaaatacagctatcaaaaactttatcattaagaaaggtgtctcctaccgcacagtttattcttcaggacgattttgacacgacccttcatagtaagcaagaatacgaagttgatttggtcgaaaatctggtacatccgcacggtcaccttttagtagagattttcttcaaattgattcatccttttcttccaattttacacgaacgtgtatttttggaaaagtattctagatcttatagagaactcactgcgcctttactggcatccatttactcactggcattacaatattgggattttcatcctgcacttttggggttccctaaacccgatgtaactgctcaactaaacaatatcgcattggaaacattttatgctcgagttggaaggccaaaattgagcattatacaaacaggccttttgattttgcaatgccgtagtgaatgtcataacaactgggtcctctgctccagcgtagtggcccttgcagaggaattggggctcggggttgaatgtaatgattggaaacttcccaaatgggaaaaagatttgagaaagagattagcgtgggcagtttggttgatggataaatggtgtgcattaaacgaaggtagacaatcccatttaattttaggtaggaactggatgatcaagctattaaactttgatgattttcctctgaattcgcccactattttaaattccttgcaaaatgaccagtcggggtcttcaccctcgtcatcaaatgatgtgaaaaaccatcagatagcatttggtaacttgcccatatttaacataaaccccactttagaagatttcaagaatggaacgcttatgtttcaacaaatggtttccttgagtataattcttggggaaatcatggacacattttacactcagggatccatgacaataaacaaaagcattgaacaggtattgaaactggcaaagccgttgcaactgaaattaagagaatggtaccattccctacccaagaatttgtcaatgagttatgccacgccacaaaaattgaactcaaattcaactttaactctagcttattttgccacggaaattacgttacataggaaaattatctgtgccttgaatcctcaaactccaaaggaactggttcaagtatgcaggactgctgcaagaaccaggcttgtagcagcaattgaatttataagagatctaaaaaacgaacatattaatgctttttggtataactgctcaactggaaatctgatgctaattggaacatttgctgccctgctgtatgtgacttcagctacgaaggaagaggctatgattttcagagattatgttagaaattatacctgggtattgaagataggttccaaatactttgataaactatcgaatgctttgaataatatgcatttactatttgcacaaattcctggtcttctgaccgatgaaccggtggtcgtgagccctaactctaacatcaattccgttaacccacaaaggtcaggtgtacaatcgcaaatcccaatacaatttaacgtgggatcacctgccatgaccgagcaaggatctcctttaaaccagtggaagaatttgccccaggaaatcttgcaacaactaaactcctttcccaacggtacgaccagtacaacaacgccagtaaaccccacttccagacaaacacaactagaatcgcagggaagtccagccataaatagtgctaataataatagcaacaacacgcctttaccatttgcgccaaataagtcttctaaaaaaacttcacaatcttcaccaaatgttacgccctctcatatgagcagacaccccccctctaatacatcttcaccaagagtcaattccagcacaaatgtcaactctaatacacaaatgaatgcttctcccttgacctcaattaacgaaaccagacaagagtcaggtgacgctgcagatgaaaaaacagcaggaagagaaagaaccgccaacgaggaatcatcaacggaactcaaggacgataatccaaactcgaaccaggaaacaagcgcaactggtaaccaaactataaaaatgaatgatgataaaaatgtaacaattaacacaagggaaacccctctgtaa

SEQ ID NO: 5678 - DNA, 2913 bp, Artificial Sequence
  Description of Artificial Sequence: Synthetic polynucleotide
atggaccctcaccaatctccagctgataatgccgcatctcctacgaagagcgtgaaggcaaccactaaaaattcttccacgaataataatgtcaatagcaacaacagcaataataacagtaaccatgatatattgaattttaatgataactatactaccattttacaacatttggcaaacgaccatcctaatatattaagggagaaaggaggatctcaacaacaacagcatcagcagcagcaacaacagcaacaacagcagcaacaacagcagcaacaacagagcttagatacccttttgcaccattatcaaagtttactctccaagagtgataatgcaatagcctttgatgacaatgttagtaacagcgcagatcataatggcagtaatagcaacaataataacaacaataatgacatatctagtcccggtaatttaatgggatcttgcaatcaatgtagattaaagaaaacaaagtgcaactattttcccgacttgggcaactgtctcgaatgtgaaacgtccagaactaaatgcaccttcagtattgctccaaattatttgaaaagaacgtcctctggggcaaacaataacatgccaacctcttccaactccaaaagaatgaaaaattttgaagactattctaatcgcttacccagtagcatgctctatagacatcaacagcagcagcaacagcaacagcagcaacagcgtatacaataccccagatcctcttttttcgtcggtccggcctctgttttcgatttgaacttgaccaagcatgtaagattagataatgttgaccaaatacagttatccaaaactttatctttaagaaaggtgtctcctaccgcacagtttattcttcaggacgattttgacacgacccttcatagtaagcaagaatacgaagttgatttggtcgaaaatttggtacatccgcacggtcaccttttagtagagattttcttcaaattgattcatccttttcttccaattttacacgaacgtgtatttttggaaaagtattctagatcttatagagaactcactgcgcctttattggcatccatttactctttggcattacaatattgggattttcatcctgcacttttggggttccctaaacccgatgtaactgctcaattgaacaatatcgcattggaaacattttatgctcgtgttggaaggccaaaattgagcattatacaaacaggccttttgattttgcaatgccgtagtgaatgtcataacaactgggtcctctgctccagcgtagtggcccttgcagaggaattggggctcggggttgaatgtaatgattggaaacttcccaaatgggaaaaagatttgagaaagagattagcgtgggcagtttggttgatggataaatggtgtgcattaaacgaaggtagacaatcccatttaattttaggtaggaactggatgatcaagcttttaaactttgatgattttcctttaaattctcccactattttaaattccttgcaaaatgaccagagcgggtcttctccctcttcttccaatgatgtgaaaaaccatcagatagcatttggtaacttgcccatatttaacataaaccccactttagaagatttcaagaatggaacgcttatgtttcaacaaatggtttccttgagtataattcttggggaaatcatggacacattttacactcagggatccatgacaataaacaaaagcattgaacaggtattgaaattggcaaagccgttgcaattgaaattaagagaatggtaccattccttgcccaagaatttgtccatgagttatgccacgccacaaaaattgaacagtaattctactttaactttggcttattttgccacggaaattacgttacataggaaaattatctgtgccttgaatcctcaaactccaaaggaattggttcaagtatgcaggactgctgcaagaaccaggcttgtagcagcaattgaatttataagagatttgaaaaacgaacatattaatgctttttggtataactgctctactggaaatttaatgttgattggaacatttgctgccttattatatgtgactagtgctacgaaggaagaggctatgattttcagagattatgttagaaattatacctgggtattgaagataggttccaaatactttgataaattatccaatgctttgaataatatgcatttactttttgcacaaattcctggtcttttaaccgatgaaccggtggtcgtgagccctaactctaacatcaattccgttaacccacaaaggtctggtgtacaatctcaaatcccaatacaatttaacgtgggatctcctgccatgaccgagcaaggatctcctttaaaccagtggaagaatttgccccaggaaatcttgcaacaattgaactcctttcccaacggtacgaccagtacaacaacgccagtaaaccccacttccagacaaacacaattggaatctcagggaagtccagccataaatagtgctaataataatagcaacaacacgcctttaccatttgcgccaaataagtcttctaaaaaaacttctcaatcttctccaaatgttacgccctctcatatgagcagacaccccccctctaatacatcttctccaagagtcaattccagcacaaatgtcaactctaatacacaaatgaatgcttctcccttgacctctattaacgaaaccagacaagagtctggtgacgctgcagatgaaaaaacagcaggaagagaaagaaccgccaacgaggaatcttctacggaactcaaggacgataatccaaactccaaccaggaaacaagcgcaactggtaaccaaactataaaaatgaatgatgataaaaatgtaacaattaacacaagggaaacccctttatga

SEQ ID NO: 5679 - DNA, 651 bp, Saccharomyces cerevisiae
atgtttatggcaagacaagtgttaagaaatggtctatttttaaggagccttgctcccataaagataaccgctagaactgttgcatcagcaaatgcgggcattaagagaaagtcaagatttgataaaacaatgatcaaacctttacttttggtaatgatatttgggtcgatattaaacgcagtaatagccgagaaaaggaacattattgatatggaaaggaaatataagctaaaacttgataaattgaaagagctgatacggagggttcatgataataatggaaaggtagacttcgacgcagatgatgaattgaaacttgtgaatttgcgtttaggaatcgtcggcaagaacgcaactgggatgaaggaagatgagactgatattgtggttcctaaggaagagtcattggaagagatctggcaaagtataatagacgaggcaaaaaaagaagtaatcgaaaaaactccagatgctggcgttaagaacaaagaagggattgtcactgatttgaatgttctaaaagatttagaaaagtcgaaaaaagaagatgaaaaggtttacctaagtggtgatgtccatatgatgatgaaccaaccaggtgatttgaatgaaatcgccaaagaacatgataaaatcccaaaatttctatag

SEQ ID NO: 5680 - DNA, 651 bp, Artificial Sequence
  Description of Artificial Sequence: Synthetic polynucleotide
atgtttatggcaagacaagtgttaagaaatggtttatttttaaggagccttgctcccataaagataaccgctagaactgttgcatctgcaaatgcgggcattaagagaaagtctagatttgataaaacaatgatcaaacctttacttttggtaatgatatttgggtccatattaaacgcagtaatagccgagaaaaggaacattattgatatggaaaggaaatataagttgaaacttgataaattgaaagagttgataagaagggttcatgataataatggaaaggtagacttcgacgcagatgatgaattgaaacttgtgaatttgcgtttaggaatcgtcggcaagaacgcaactgggatgaaggaagatgagactgatattgtggttcctaaggaagagtctttggaagagatctggcaaagtataatagacgaggcaaaaaaagaagtaatcgaaaaaactccagatgctggcgttaagaacaaagaagggattgtcactgatttgaatgttttgaaagatttagaaaagagtaaaaaagaagatgaaaaggtttacttgagtggtgatgtccatatgatgatgaaccaaccaggtgatttgaatgaaatcgccaaagaacatgataaaatcccaaaatttttatga

SEQ ID NO: 5681 - DNA, 1107 bp, Saccharomyces cerevisiae
atggcaagagcgttgagggatatatcattattcaatgatataagaaaggatcaaaattcggcaggagccaagcatgagagatataacatgagagatctccgaagtaagaagaaccagcatgtaaatggcatagatgattatgaagatgattcgcttgacagatttataagaaggaagaaatccagagttgtgaaatacattccatcattgtcagcgtataatgtgttcaatgaatttccttactatcctacgtcagccagtcagttactagacggcaaattagacgaatttctaatgctgtcagaacaatacaaaagtagattacccaaaatacgcaagctaggatggaatagattcaaaccaataggcattaataaaactatgtacgaattagaaatgctaaggtctcgagcacgagctcaaaacgcggaagggaacaatgaggaagacttcaggcagcacgattctagagaagaggatccaagaaacaatggctctataggacgcgtgatactgcctcatattctacaggaaaatgaagaatatgatactggtgagggtgttacaggattgcatagcatgccaaatgacagtatggccatacttgcgaataacagtgctaataattcgcaaaatgaggaagtatcagaggaggatgaaatatcatacgattatgatgcagagttcgatcatgttgtagatgaggatgataatgaggagggagaagtgccgggggaaggtgtggaaggtatagaagttcagagagagagaattgtgccggatgacttattaatgagacccacttcactgtcacgctccctacaacagtttgtggaagaggctcatcatttagatagaaacccatatgatattgacagtgataacgacggagaagattcaaaggtagaactggacatgaatccggattttgaagatgacgtgggaagagagcatgattataatagcgaatacagccaagagccgacttcttatggtgggattacacctgatctagcgagtaattggaggaattggactagggagaggataactagtttagatgaattaatggagagacgagccaggcagcaacgaggtcaagattag

SEQ ID NO: 5682 - DNA, 1107 bp, Artificial Sequence
  Description of Artificial Sequence: Synthetic polynucleotide
atggcaagagcgttgagggatatatctttattcaatgatataagaaaggatcaaaattctgcaggagccaagcatgagagatataacatgagagatctcagaagtaagaagaaccagcatgtaaatggcatagatgattatgaagatgattctcttgacagatttataagaaggaagaaatccagagttgtgaaatacattccatctttgagtgcgtataatgtgttcaatgaatttccttactatcctacgagtgccagtcagttattagacggcaaattagacgaatttttgatgctttctgaacaatacaaaagtagattacccaaaatacgcaagttgggatggaatagattcaaaccaataggcattaataaaactatgtacgaattagaaatgttaaggtctagagcaagagctcaaaacgcggaagggaacaatgaggaagacttcaggcagcacgattctagagaagaggatccaagaaacaatggctctataggacgcgtgatattacctcatattttacaggaaaatgaagaatatgatactggtgagggtgttacaggattgcatagcatgccaaatgacagtatggccatacttgcgaataacagtgctaataattctcaaaatgaggaagtatctgaggaggatgaaatatcttacgattatgatgcagagttcgatcatgttgtagatgaggatgataatgaggagggagaagtgccgggggaaggtgtggaaggtatagaagttcagagagagagaattgtgccggatgacttattaatgagacccacttctttatctcgctccttacaacagtttgtggaagaggctcatcatttagatagaaacccatatgatattgacagtgataacgacggagaagattctaaggtagaattagacatgaatccggattttgaagatgacgtgggaagagagcatgattataatagcgaatacagccaagagccgacttcttatggtgggattacacctgatttggcgagtaattggaggaattggactagggagaggataactagtttagatgaattaatggagagaagagccaggcagcaaagaggtcaagattga

SEQ ID NO: 5683 - DNA, 1095 bp, Saccharomyces cerevisiae
atggctggaaatgcaaactcagtagacgaggaagttaccaggatattaggaggcatatatcttggcggaatccgtccaattattgaccacagaccattgggtgcagaatttaacattactcatattctttctgttatcaaattccaggtcattccagagtatctaataaggaaaggttacacgctaaaaaacatacccatcgatgatgatgatgtgactgatgtgctgcaatacttcgatgaaacgaaccgattcattgatcaatgcttgttccccaatgaagttgagtattcgcccagattagtagatttcaagaagaaaccacaacgtggtgctgtttttgctcattgtcaagcaggactctcgagatctgtaaccttcatagtagcctacctaatgtatcgttatggattgtcactatcaatggctatgcacgctgtcaagaggaagaaaccgagtgttgagccaaacgagaatttcatggaacaattacatctctttgagaaaatgggtggagattttgtcgatttcgacaacccagcctataagcagtggaagctgaagcaatctatcaagttagatccatcgggcagcgaattggtctccaattctggaatgtttaaagattcggagtcgtcgcaagacttggataaattaactgaagctgagaagagcaaggtcaccgcagtgagatgtaagaagtgcagaaccaaattggcgttatctacatctttcatcgcgcatgacccaccaagtaaggaatcatcagagggacacttcatcaagagggccgccaactcccatcgtattattgatattcaagagtcacaagcaaattgctctcattttttcatcgaacctttaaaatggatgcaacctgaactacaaggcaagcaagagttagaagggaagttttcatgtccaggctgttcaagtaaagttggcggttacaactggaaaggatctaggtgcagttgtggtaagtgggtcatccccgctatccacctgcaaactagtaaagtggatcaatttcccttacaatccactgctttgcccaacatggttaattttgaatccgagaaagtaaatagataa

SEQ ID NO: 5684 - DNA, 1095 bp, Artificial Sequence
  Description of Artificial Sequence: Synthetic polynucleotide
atggctggaaatgcaaactctgtagacgaggaagttaccaggatattaggaggcatatatcttggcggaatccgtccaattattgaccacagaccattgggtgcagaatttaacattactcatattctttctgttatcaaattccaggtcattccagagtatttgataaggaaaggttacacgttgaaaaacatacccatcgatgatgatgatgtgactgatgtgttgcaatacttcgatgaaacgaacagattcattgatcaatgcttgttccccaatgaagttgagtattctcccagattagtagatttcaagaagaaaccacaacgtggtgctgtttttgctcattgtcaagcaggactcagcagatctgtaaccttcatagtagcctacttgatgtatcgttatggattgtccttatctatggctatgcacgctgtcaagaggaagaaaccgagtgttgagccaaacgagaatttcatggaacaattacatctctttgagaaaatgggtggagattttgtcgatttcgacaacccagcctataagcagtggaagttgaagcaatctatcaagttagatccaagtggcagcgaattggtctccaattctggaatgtttaaagattctgagagttctcaagacttggataaattaactgaagctgagaagagcaaggtcaccgcagtgagatgtaagaagtgcagaaccaaattggcgttatctacatctttcatcgcgcatgacccaccaagtaaggaatcttctgagggacacttcatcaagagggccgccaactcccatcgtattattgatattcaagagtctcaagcaaattgctctcattttttcatcgaacctttaaaatggatgcaacctgaattacaaggcaagcaagagttagaagggaagttttcttgtccaggctgtagtagtaaagttggcggttacaactggaaaggatctaggtgcagttgtggtaagtgggtcatccccgctatccacttgcaaactagtaaagtggatcaatttcccttacaatccactgctttgcccaacatggttaattttgaatccgagaaagtaaatagatga

SEQ ID NO: 5685 - DNA, 1383 bp, Saccharomyces cerevisiae
atgcctatcaatgccatcacttccgaccatgtcattatcaatggtgcaaataaacctgcgactattgtgtattcgaccgaatcaggcacgattctggatgttttagaaggctccgtggttatggagaaaactgagataaccaaatatgaaatacatacgctggagaacgtatctccatgtacaattctgcctggacttgtggactctcatgttcacttgaacgagcccggtaggactagctgggaaggattcgaaactggaactcaagctgctattagtggcggggtcacaacggtggttgatatgccgctaaatgctattcctcccacaacaaatgtggagaatttccgaattaaattggaagctgctgagggccaaatgtggtgcgatgttgggttttggggtggactggtaccacacaacttgccagacttaattccgcttgtcaaagctggcgttcgcgggttcaaaggattcttgcttgattctggtgtggaagaattccctccaattggcaaagaatatatagaagaagccttgaaggtcttagccgaggaggataccatgatgatgtttcatgctgagttgcccaaggcacatgaggaccaacagcaacccgagcaaagccatcgtgaatattcttcgtttttgtcctcgaggccggattctttcgaaatagacgccatcaatttgattctcgaatgcttgagagccagaaatggaccagttcctcctgtacatatagttcatctggcatcaatgaaagcaattcccttgatcagaaaggcacgtgcgtcagggctaccagtcacaacagagacttgtttccactatttgtgtattgctgcagagcagatcccagacggagccacctactttaaatgttgtccacccatccgctctgagtctaatcgccaaggcctatgggacgctttgcgtgaaggtgttataggctcagtagtgagcgaccattcgccatgcacccctgagttgaagaacttgcaaaaaggtgactttttcgattcttggggaggaatcgcttccgtcggactaggtttgccattgatgtttacccaaggctgctctttggtcgatatcgttacatggtgctgtaaaaatacatcccatcaggtaggactatctcaccaaaaaggcactatagctcccgggtacgatgctgatttggtggtatttgatactgcaagtaaacataaaataagtaattcaagtgtctacttcaaaaacaaattgactgcctacaacgggatgacggtcaagggcacagttttgaaaaccatattaagaggccaggtggtatatacgaatgccaacggagtctcgaaaacaccattgggtcaaactttgcttgattctagacgttaa

SEQ ID NO: 5686 - DNA, 1383 bp, Artificial Sequence
  Description of Artificial Sequence: Synthetic polynucleotide
atgcctatcaatgccatcacttccgaccatgtcattatcaatggtgcaaataaacctgcgactattgtgtattctaccgaaagtggcacgattttagatgttttagaaggctccgtggttatggagaaaactgagataaccaaatatgaaatacatacgttggagaacgtatctccatgtacaattttacctggacttgtggactctcatgttcacttgaacgagcccggtaggactagctgggaaggattcgaaactggaactcaagctgctattagtggcggggtcacaacggtggttgatatgccgttaaatgctattcctcccacaacaaatgtggagaatttcagaattaaattggaagctgctgagggccaaatgtggtgcgatgttgggttttggggtggattagtaccacacaacttgccagacttaattccgcttgtcaaagctggcgttcgcgggttcaaaggattcttgcttgattctggtgtggaagaattccctccaattggcaaagaatatatagaagaagccttgaaggtcttagccgaggaggataccatgatgatgtttcatgctgagttgcccaaggcacatgaggaccaacagcaacccgagcaaagccatcgtgaatattcttcttttttgtccagcaggccggattctttcgaaatagacgccatcaatttgattctcgaatgcttgagagccagaaatggaccagttcctcctgtacatatagttcatttagcatctatgaaagcaattcccttgatcagaaaggcacgtgcgtctgggttaccagtcacaacagagacttgtttccactatttgtgtattgctgcagagcagatcccagacggagccacctactttaaatgttgtccacccatccgctctgagtctaatcgccaaggcttatgggacgctttgcgtgaaggtgttataggctctgtagtgagcgaccattctccatgcacccctgagttgaagaacttgcaaaaaggtgactttttcgattcttggggaggaatcgcttccgtcggattaggtttgccattgatgtttacccaaggctgctctttggtcgatatcgttacatggtgctgtaaaaatacatcccatcaggtaggattatctcaccaaaaaggcactatagctcccgggtacgatgctgatttggtggtatttgatactgcaagtaaacataaaataagtaatagtagtgtctacttcaaaaacaaattgactgcctacaacgggatgacggtcaagggcacagttttgaaaaccatattaagaggccaggtggtatatacgaatgccaacggagtctccaaaacaccattgggtcaaactttgcttgattctagacgttga

SEQ ID NO: 5687 - DNA, 1908 bp, Saccharomyces cerevisiae
atggctaacgacgctctaagtgctattttcagtaatccttcgaggaaaggtgtccaaccctccacatctattgtgtcatatacaaacaatgaagatgatattatagatgtggaaaatgggaagttcaacaagaacaagaatatcaacactaatgtgtatgtggacaactcctcaatagaggagagcgaagtcgtgcccttgcccgaaacaaagtccatctggagtaaaatatactacgatttcattgtgttagacaagacaactttgaatgtttcgttgaaagagtcgttcttgtataacagagacttgaaaccggttgaagaagaaagaaggtgttggtcctggttcaattacttatatttctggctggcagactgtttcaatattaacacatggcaaatagctggtacaggtctacaactaggtctgaattggtggcaatgttggcttacagtttggatcggctacacttttgcaggtatcttcgtagtattgaactcgagatttggttccgcatatcacttatctttccctattactgttagggcctcatttggtatattcttttctatgtggccgattataaatcgtgtcgtgatggctatagtatggtatgccgtgcaagcctggttaggtgcaacgcccgtggcactgatgctaaaatctatttttggcaagaatctggaagatagaatcccaaaccattttggttctccaaatagcactacttttgaattcatgtgtttctttatattttgggtggtcagtataccatttgtcctagtggctcctcataaaatcaggcatttattcacagtaaaagcagctttgatccccttcgcagcctttggatttttaatctgggctttgaagaaatcgcacggtaaaattgagttggggacgctgaatgattattcacctcatggttccgaattttcatggatattcgttagatccctaatggcctgtgttgctaactttgccgctttgattatcaacgcccctgacttcggtagatttgccaaaaatcctcaagcgtctttgtggccacaattggttgccatcccattgttcttcgccataacatgtttgatcggtatcattgttactgcggccggttatcacttatatggggttaactattggtcaccactggatgtacttggtcaatttttggagaccacttacaccagaggtactagggctggtgtgttcttgatttcttttgtatttgccttagctcaactgggtacaaacatttctgccaactctctggcatgtggtgctgatatgacggctttgtttccaagatatattaatattagaagaggttctttattctgtgtggcaatggctctatgtatctgtccatggaacttaatggccagttcaagtaagttcaccagcgctttgggtgcttatgcaattttcctttccagtattgctggtgtcatttgcgcggattatttcgtagtaagaagaggatatgtgaaattaacacatttattcctggcacagaagggttccttttacatgtttggaaacaaatttggtgccaattggagggcctttgttgcgtatatttgcggtatcgctccaaatttaccaggttttataggtgatgttggagctccaaaaattacggtttcagagggtgcaatgaggttatactatttaggttatccggtaggtttctttattagtgcggtgatatacctcatattatgttacttttttcctgtccctggtactcccgtaaccaattttctgacagagaaaggatggttccaaagatgggcttatgttgaggacttcgagcaagattggaagaatgagttacgtagggatgacctctgcgatgacacagtcagtatctatgatggcaccgaggaaaagatagtttactaa

SEQ ID NO: 5688 - DNA, 1908 bp, Artificial Sequence
  Description of Artificial Sequence: Synthetic polynucleotide
atggctaacgacgctttaagtgctattttcagtaatccttctaggaaaggtgtccaaccctccacatctattgtgtcttatacaaacaatgaagatgatattatagatgtggaaaatgggaagttcaacaagaacaagaatatcaacactaatgtgtatgtggacaactcctccatagaggagagcgaagtcgtgcccttgcccgaaacaaagtccatctggagtaaaatatactacgatttcattgtgttagacaagacaactttgaatgtttctttgaaagagagtttcttgtataacagagacttgaaaccggttgaagaagaaagaaggtgttggtcctggttcaattacttatatttctggttggcagactgtttcaatattaacacatggcaaatagctggtacaggtttacaattgggtttgaattggtggcaatgttggcttacagtttggatcggctacacttttgcaggtatcttcgtagtattgaactctagatttggttccgcatatcacttatctttccctattactgttagggcctcttttggtatattcttttctatgtggccgattataaatcgtgtcgtgatggctatagtatggtatgccgtgcaagcctggttaggtgcaacgcccgtggcattaatgttgaaatctatttttggcaagaatttggaagatagaatcccaaaccattttggttctccaaatagcactacttttgaattcatgtgtttctttatattttgggtggtcagtataccatttgtcttggtggctcctcataaaatcaggcatttattcacagtaaaagcagctttgatccccttcgcagcctttggatttttaatctgggctttgaagaaatctcacggtaaaattgagttggggacgttgaatgattattctcctcatggttccgaattttcttggatattcgttagatccttgatggcctgtgttgctaactttgccgctttgattatcaacgcccctgacttcggtagatttgccaaaaatcctcaagcgtctttgtggccacaattggttgccatcccattgttcttcgccataacatgtttgatcggtatcattgttactgcggccggttatcacttatatggggttaactattggtctccattagatgtacttggtcaatttttggagaccacttacaccagaggtactagggctggtgtgttcttgatttcttttgtatttgccttagctcaattgggtacaaacatttctgccaactctttggcatgtggtgctgatatgacggctttgtttccaagatatattaatattagaagaggttctttattctgtgtggcaatggctctttgtatctgtccatggaacttaatggccagtagtagtaagttcaccagcgctttgggtgcttatgcaattttcctttccagtattgctggtgtcatttgcgcggattatttcgtagtaagaagaggatatgtgaaattaacacatttattcttggcacagaagggttccttttacatgtttggaaacaaatttggtgccaattggagggcctttgttgcgtatatttgcggtatcgctccaaatttaccaggttttataggtgatgttggagctccaaaaattacggtttctgagggtgcaatgaggttatactatttaggttatccggtaggtttctttattagtgcggtgatatacctcatattatgttacttttttcctgtccctggtactcccgtaaccaattttttaacagagaaaggatggttccaaagatgggcttatgttgaggacttcgagcaagattggaagaatgagttacgtagggatgacctctgcgatgacacagtcagtatctatgatggcaccgaggaaaagatagtttactga

SEQ ID NO: 5689 - DNA, 1032 bp, Saccharomyces cerevisiae
atgaagttttttagtttggcagatgaggcagaatttaagtcaataatcatttcaaaaaacaaagcagtagatgttataggatctaagttaggtggtcaagtggtttctttttcagatgaatggtttgcttctgctgaaaatttaattcagccaactgctcctataagggatcctaccagatttgttcattcaggcgcatggtacgacggctgggaaacacgaagacataatgagatggaatacgattgggttatcatcaagatgggagtcgctgctgcccatattattggtggtgaaattgacactgcgtttttcaatggtaatcatgcaccatttgtatcaatagaggcgctctatgacgagggcgaagaaggtaatatagtggaagatgactcgcgttgggttgagattgttgagaaatttgagtgtggtccttcgcaaaggcatcttttcgttagaggcaacggccttactaaagaaaggtttactcacatcaagctgaagatgtaccccgatggaggaatcgccagatttagattatacggaagagttgttcctccagaactcaaaacgaaggatcatataattgacttggcttatgtttgcaatggtgctgtcgctttaaagtattctgaccaacacttcggttcagttgataatttgctactgccaggtcgaggtcatgatatgtcggacggctgggaaaccaaaagatcgagacaaccaggtcatactgattgggcggtaattcaactgggcagggagtcttctttcattgagaagattattgttgatacggcacacttcagggggaacttccctcagttcattaccgtggaaggttgcttgaaggagtcagaatcaagtgagaacactggtgaaggaacatgggtagagctagttggtaagtcaaagacggggcctgacaaagaacatgtgtatgaaatacgtaagagtataagagtctcccatgtcaaattaacgattattccagatggaggagtgaaaagaataagagtttgggggtactga

SEQ ID NO: 5690 - DNA, 1032 bp, Artificial Sequence
  Description of Artificial Sequence: Synthetic polynucleotide
atgaagttttttagtttggcagatgaggcagaatttaagagtataatcatttccaaaaacaaagcagtagatgttataggatctaagttaggtggtcaagtggtttctttttctgatgaatggtttgcttctgctgaaaatttaattcagccaactgctcctataagggatcctaccagatttgttcattctggcgcatggtacgacggctgggaaacaagaagacataatgagatggaatacgattgggttatcatcaagatgggagtcgctgctgcccatattattggtggtgaaattgacactgcgtttttcaatggtaatcatgcaccatttgtatctatagaggcgctctatgacgagggcgaagaaggtaatatagtggaagatgactctcgttgggttgagattgttgagaaatttgagtgtggtccttctcaaaggcatcttttcgttagaggcaacggccttactaaagaaaggtttactcacatcaagttgaagatgtaccccgatggaggaatcgccagatttagattatacggaagagttgttcctccagaactcaaaacgaaggatcatataattgacttggcttatgtttgcaatggtgctgtcgctttaaagtattctgaccaacacttcggttctgttgataatttgttgttaccaggtagaggtcatgatatgtctgacggctgggaaaccaaaagatctagacaaccaggtcatactgattgggcggtaattcaattaggcagggagtcttctttcattgagaagattattgttgatacggcacacttcagggggaacttccctcagttcattaccgtggaaggttgcttgaaggagagtgaaagtagtgagaacactggtgaaggaacatgggtagagttagttggtaagtccaagacggggcctgacaaagaacatgtgtatgaaatacgtaagagtataagagtctcccatgtcaaattaacgattattccagatggaggagtgaaaagaataagagtttgggggtactga

SEQ ID NO: 5691 - DNA, 735 bp, Saccharomyces cerevisiae
atggaaacaagaatacttgttgtgaatcctaatagttcgaagtcaatgacggtgtccttgcgggaaaccattgaaaagactttttcaatggaatcatgtaaaatcagttatttcacagggccagacacgtcgccaccacaaattgatgggcaggaaacaagtattaaaagtatggaggcctgtcttcccctcttaattgatgaccaggagtcggtatattactttcagaaattcaacgggatattaattgcctgtttttcagatcatcctttggtagcaaagataaaggatagagctgctaaagaaaaagcagatgtttctattgttgggttattagatagtagtattaattattgcaatttggttggaaagaagttctctattattacttcaaataaagaatggattccaatattgaataactctgtggaatcgaaattcttgacagggaatacagttaacaaaaatttatggaaaggtacggtatctactgatttacaggtcctcgacctacatagtccagaaaatttccagcagatagcagaaattatatatcgcgaaaatattaaaaagcttgattcagacattgtaatattaggttgtgcaggattctcgggtttgcaaaataaactggcgaaaacattccaaagggatggcacgctgtttctggacacgattgagatcggtttacagattctaatcactatgataagatttgtcaactcacaaaaataa

SEQ ID NO: 5692 - DNA, 735 bp, Artificial Sequence
  Description of Artificial Sequence: Synthetic polynucleotide
atggaaacaagaatacttgttgtgaatcctaatagttccaagtctatgacggtgtccttgagagaaaccattgaaaagactttttccatggaaagttgtaaaatcagttatttcacagggccagacacgtctccaccacaaattgatgggcaggaaacaagtattaaaagtatggaggcctgtcttcccctcttaattgatgaccaggagagtgtatattactttcagaaattcaacgggatattaattgcctgtttttctgatcatcctttggtagcaaagataaaggatagagctgctaaagaaaaagcagatgtttctattgttgggttattagatagtagtattaattattgcaatttggttggaaagaagttctctattattacttccaataaagaatggattccaatattgaataactctgtggaaagtaaattcttgacagggaatacagttaacaaaaatttatggaaaggtacggtatctactgatttacaggtcctcgacttgcatagtccagaaaatttccagcagatagcagaaattatatatcgcgaaaatattaaaaagcttgattctgacattgtaatattaggttgtgcaggattctctggtttgcaaaataaattagcgaaaacattccaaagggatggcacgttgtttttggacacgattgagatcggtttacagattttgatcactatgataagatttgtcaactctcaaaaatga

SEQ ID NO: 5693 - DNA, 1665 bp, Saccharomyces cerevisiae
atggtgaagataagcttggacaacactgctctatacgcagacatcgacacgactcctcaatttgaaccttccaaaactactgtagctgatattttaacaaaagatgccttagagttcattgttttgctgcatagaactttcaattcaacacggaaacagcttttagccaacagaagcaatttacaatcaaagttagactctggtgaataccgatttgatttcttgccggaaaccgaacaaatcaggaacgatcctacatggcaaggtgctatcccagcccctggtttgatcaacagatccagcgagattactgggccaccattgagaaatatgttagtcaacgctttgaatgctgaagtaacgacatatatgactgatttcgaggactcttcatctccaacttgggagaacatgatttacggacaagttaatctttatgatgccattagaaatcaaatcgatttcaagacaccaagaaaggagtacaggttgaaggatgacatttcaagactgcccactttaattgtcagacctcgtggctggcacatggtggagaagcacctttacatagatgatgaaccgattagtgcttccatcttcgattttggtttatatttttaccataacgctaaagagttagttaaaattggtaaaggaccttatttttacttaccaaagatggagcaccatatggaggtaaaactatggaatgacatattctgtgttgcacaagattttattggaatgccccgcggtaccattagggccactgttctgattgaaactttgccagcggccttccaaatggaggagattatctatcaaataagagaacattcaagcggtttgaactgtggtcgttgggactacatattttcgaccattaaaaaactgagaaacttgcctgaacacgttttgccaaatagggatctagtgactatgacttcaccttttatggatgcttatgtgaaaagattgatcaatacatgtcaccgtagaggggtccatgcgatgggtggtatggctgcccaaatccccataaaagatgatccaaaggctaatgaagctgcaatgaacaaagttcgtaatgacaaaattagagaaatgaagaatgggcatgatgggtcatgggtagcacacccagcattggcaccgatttgtaatgaagttttcagtaacatgggtacagcaaatcaaatatattttgtcccggatgtacatgttacatcatctgatttattgaatacgaagattcaagatgctcaagtcactactgagggaatcagagtaaacttggatattggcctacaatatatggaggcttggttaaggggatctggttgtgtcccaattaatcatttgatggaagatgccgctactgcggaagtatcacgttgtcaattgtaccagtgggttaaacatggtgttgtcttaagtgataccggtgacaaagtaactccagaattgaccgctaagatattaaatgaagagactgcaaaattggcttcagcaagtccgctgggtgaaaagaacaagtttgccttggcagccaagtattttttgcctgaagtcactggtaaaatctttagcgacttcttgaccactttattgtatgatgaaattattaagccaagtgccaaaccagttgacttaagtaaattatag

SEQ ID NO: 5694 - DNA, 1665 bp, Artificial Sequence
  Description of Artificial Sequence: Synthetic polynucleotide
atggtgaagataagcttggacaacactgctttgtacgcagacatcgacacgactcctcaatttgaaccttccaaaactactgtagctgatattttaacaaaagatgccttagagttcattgttttgttgcatagaactttcaattctacaagaaaacagcttttagccaacagaagcaatttacaatccaagttagactctggtgaatacagatttgatttcttgccggaaaccgaacaaatcaggaacgatcctacatggcaaggtgctatcccagcccctggtttgatcaacagatccagcgagattactgggccaccattgagaaatatgttagtcaacgctttgaatgctgaagtaacgacatatatgactgatttcgaggactcttcttctccaacttgggagaacatgatttacggacaagttaatctttatgatgccattagaaatcaaatcgatttcaagacaccaagaaaggagtacaggttgaaggatgacatttctagattacccactttaattgtcagacctcgtggctggcacatggtggagaagcacctttacatagatgatgaaccgattagtgcttccatcttcgattttggtttatatttttaccataacgctaaagagttagttaaaattggtaaaggaccttatttttacttaccaaagatggagcaccatatggaggtaaaattatggaatgacatattctgtgttgcacaagattttattggaatgccccgcggtaccattagggccactgttttgattgaaactttgccagcggccttccaaatggaggagattatctatcaaataagagaacattctagcggtttgaactgtggtcgttgggactacatattttccaccattaaaaaattgagaaacttgcctgaacacgttttgccaaatagggatttggtgactatgacttctccttttatggatgcttatgtgaaaagattgatcaatacatgtcaccgtagaggggtccatgcgatgggtggtatggctgcccaaatccccataaaagatgatccaaaggctaatgaagctgcaatgaacaaagttcgtaatgacaaaattagagaaatgaagaatgggcatgatgggtcctgggtagcacacccagcattggcaccgatttgtaatgaagttttcagtaacatgggtacagcaaatcaaatatattttgtcccggatgtacatgttacatcttctgatttattgaatacgaagattcaagatgctcaagtcactactgagggaatcagagtaaacttggatattggcttacaatatatggaggcttggttaaggggatctggttgtgtcccaattaatcatttgatggaagatgccgctactgcggaagtatcccgttgtcaattgtaccagtgggttaaacatggtgttgtcttaagtgataccggtgacaaagtaactccagaattgaccgctaagatattaaatgaagagactgcaaaattggcttctgcaagtccgttgggtgaaaagaacaagtttgccttggcagccaagtattttttgcctgaagtcactggtaaaatctttagcgacttcttgaccactttattgtatgatgaaattattaagccaagtgccaaaccagttgacttaagtaaattatga

SEQ ID NO: 5695 - DNA, 588 bp, Saccharomyces cerevisiae
atggtgaccgtggtggcggagacattgacgaaagagtccttcgaggagtatgggacgataatttcgccagatgaagagatttcaaggatgcaaaaccttgaaaaaggtgcaaaccagggaacagcgatcaaattgcttcaagtaagccaggtagagaataaatctaccagtaaagttcccaattggaacctattccgttgctttccacagccgcacctgaatagagtattcactcaaggctccaatcaggcgatttctcattctatcaaagtcctcgaaaagcatccgtgtagtacgcagacgtttgtgcctatggggagaacgtcagcggaagtagcatacttggtagtagtcgctaaagaaattggaaataagccagacttgtctacgttgagggcttttacatgtttgggtaatcaggccgttacctatggcttaggtacctggcatgcgcccatgatagtacttggcaaggaagaacatttggatttttcagtcttaatctacgaaagtctggaccctgacaggcccgagaaggactgtgtggaagaacactacagcgatggcgacgtttgtattatcatctaa

SEQ ID NO: 5696 - DNA, 588 bp, Artificial Sequence
  Description of Artificial Sequence: Synthetic polynucleotide
atggtgaccgtggtggcggagacattgacgaaagagtccttcgaggagtatgggacgataatttctccagatgaagagatttctaggatgcaaaaccttgaaaaaggtgcaaaccagggaacagcgatcaaattgcttcaagtaagccaggtagagaataaatctaccagtaaagttcccaattggaacttgttccgttgctttccacagccgcacttgaatagagtattcactcaaggctccaatcaggcgatttctcattctatcaaagtcctcgaaaagcatccgtgtagtacgcagacgtttgtgcctatggggagaacgtctgcggaagtagcatacttggtagtagtcgctaaagaaattggaaataagccagacttgtctacgttgagggcttttacatgtttgggtaatcaggccgttacctatggcttaggtacctggcatgcgcccatgatagtacttggcaaggaagaacatttggatttttctgtcttaatctacgaaagtttggaccctgacaggcccgagaaggactgtgtggaagaacactacagcgatggcgacgtttgtattatcatctga

SEQ ID NO: 5697 - DNA, 3342 bp, Saccharomyces cerevisiae
atgcagcagaacagtgagttcttaacggaaacacctggaagcgaccctcatatatctcaattgcacgcgaatagcgtaatggaatcacagctcttggacgatttcctcctgaacgggtctcccatgtaccaggatgatagcatggcgcatattaatattgatgagggtgctaatttccaaaattttatcaagacagatgagggtgattcgcccaacctgttgtctttcgaaggtatcggtaacaatactcatgtcaaccaaaacgtgtccactccactggaggaggaaatggaaagtaacagagccttgaaggaggaagaagaggacgagcatgaaaataaggtttttaatgaaaaaaatataggcaaccctgctcatgacgagattgtatttggaagaaaggagacgattcaatctgtttacataaatcctttagattaccttaaagtgaacgcagcgcagctacctttggatgtagaggtctcaggtttgccacaagtatctagagtggaaaatcaactgaaactgaaagtgaaaattacgtctgaaacaccactaaaccaaagcatgctttacttgcctagcgattccatttcaagagaaaagttttatttaaaaaaaaatatcgaggatttttcagaagacttcaagaaaaatcttctgtacatcaatgcgtttgttctatgtgcggtcagcaacagaacgacaaatgtttgtaccaagtgtgttaagcgagaacaaagaagagccgctagaaggaaatcaggtattgcagacaatttactctggtgtaataatattaatagaaggttagtcgtgttcaataacaaacaggttttccccataatgaaaactttcgataatgttaaggagtttgaattaactaccaggctagtttgttattgcaggcaccataaggcaaataatggctttgtcatattattcactataacagattggcaaaatagactgttgggtaagtttacgacaacacctattatgatcacggatagaaaaccagcaaatatggataccaccaagtttaataacactactacctcgtccagaaggcagctaacggaagaagaatctaccacagaatattattcaacggataacaaccaattgagcaaagacgaaaatatgccatttcaatatacttatcaacacaacccatatgataatgacagtcaaatgaataatattccactgaaagacaaaaacgtaccattcccatattccatctctcaacagacagatttgcttcagaacaataacttatcactgaacctttctctgcccaatcagcatattccatcaccaacatctatgagcgaagaaggctcagaatcatttaactatcatcatcgcgataatgacaatcccgtccgtactatctctttgacaaatattgaacaacagagtcaattgaaccaacggaaaagagcacgcaataatttggaaaatgacattggtaaacccctattcaagcattccttttcaaattcaatcagtgcaacaaatacgatgaatccagctttacattcaatgcaagatttctcaatgaaaaacaacaacaataatttgccatcaattaatcgcgttataccttcacaaggcccaatcaatggtggtatcgaagttacattactgggttgtaacttcaaagatggtctttctgtaaagttcggctctaatcttgccctttctacgcaatgctggagtgagaccacgatcgtcacttatctccctcccgctgcctacgcgggtcaagttttcgtctctattactgatacgaataatgaaaataataacgatgaccttccccaagaaattgagatcaatgacaataaaaaggccatatttacctatgttgatgatactgataggcaactgattgaattggctttgcaaattgtgggattaaaaatgaatggtaagttagaagatgcaagaaatatcgcgaagaggattgttggcaatgattctcctgatagcggtacaaatggcaacagctgttcaaaaagcacaggtccctctccaaaccaacacagtatgaatctgaacacaagtgttctttactccgatgaagtcttgatacaaaaagttataaaatcattgaacataaattccaatatttccatatgtgattcattagggagaactttattacatcttgcctgtttgaaaaattactcaagccttgtgtatacattgattaaaaagggtgctcgtgttaacgatattgattcctttgggctaactccattacattttgcttgcataagtggtgaccctaaaattattaagatgcttttaaattgtaaagtaaattattcactgaggtcacacaacggattaactgcaagagaagtattcatagcaaaccacattcattcaaaggaaatagacaaaaaacaagataacagagacaaccataagtttgttcataatgacacttatatcagcgaagtattgtcattgtttgaagaattccaaaacggtacgaagtttaccgatagtgtagaaacagacagtaattattctattagcaggaaatattcacaatccagtttcaattcaagcctgctagacaatgaatctttgaatgagaacttattcgaaagccaaagcatgataaatcccacttctatggagattcagcatccaaccttgcaactatttgagaattcaagttactctgagtacgaccaaagtgatttcgaagaagacggggatgaagatctgttcgtcactgacgaagtagaaaaaccaggtgttgcatgcagggaggaacaaagcgaactccttgatattggatctagcgccaacgaacccgaagaggataatggtagtacatctctctggaatagagttttacatcgaattaatgatgacttaccaaaatatgaggatctgttcccgttgtcttggggtaaagatgataaattgaaaaccacaaatcaagacagtattgtggagcagtcagcatctaatattgaaaactctgaaaattcggaggaagaggattatgaggaagaggaagaatttttgaaaaaacagtttaacagattcttccaaaacaaacaaaacttccgaaatgataaaatgttaatatttttctggatacccttaacactactacttttgacatggttcatcatgtacaaatttggcaaccaagatagttccatcaatcatataagcgaattaatctcagagtacttgagaattgcattagcaaagttcttgctgggaaatgaaaggatgaaaactgcattcaggtcaaaattatcaaacctgcaaacaacaagaatgttgaacgatttaattgtcagttag

SEQ ID NO: 5698 - DNA, 3342 bp, Artificial Sequence
  Description of Artificial Sequence: Synthetic polynucleotide
atgcagcagaacagtgagttcttaacggaaacacctggaagcgaccctcatatatctcaattgcacgcgaatagcgtaatggaatctcagctcttggacgatttcctcttgaacgggtctcccatgtaccaggatgatagcatggcgcatattaatattgatgagggtgctaatttccaaaattttatcaagacagatgagggtgattctcccaaccttttgtctttcgaaggtatcggtaacaatactcatgtcaaccaaaacgtgtccactccattggaggaggaaatggaaagtaacagagccttgaaggaggaagaagaggacgagcatgaaaataaggtttttaatgaaaaaaatataggcaaccctgctcatgacgagattgtatttggaagaaaggagacgattcaatctgtttacataaatcctttagattaccttaaagtgaacgcagcgcagttgcctttggatgtagaggtctctggtttgccacaagtatctagagtggaaaatcaattgaaattgaaagtgaaaattacgtctgaaacaccattgaaccaaagcatgctttacttgcctagcgattccatttctagagaaaagttttatttaaaaaaaaatatcgaggatttttctgaagacttcaagaaaaatcttttatacatcaatgcgtttgttttatgtgcggtcagcaacagaacgacaaatgtttgtaccaagtgtgttaagagagaacaaagaagagccgctagaaggaaatctggtattgcagacaatttactctggtgtaataatattaatagaaggttagtcgtgttcaataacaaacaggttttccccataatgaaaactttcgataatgttaaggagtttgaattaactaccaggttggtttgttattgcaggcaccataaggcaaataatggctttgtcatattattcactataacagattggcaaaatagattattgggtaagtttacgacaacacctattatgatcacggatagaaaaccagcaaatatggataccaccaagtttaataacactactacctcttccagaaggcagttaacggaagaagaatctaccacagaatattattctacggataacaaccaattgagcaaagacgaaaatatgccatttcaatatacttatcaacacaacccatatgataatgacagtcaaatgaataatattccattgaaagacaaaaacgtaccattcccatattccatctctcaacagacagatttgcttcagaacaataacttatctttgaacctttctttacccaatcagcatattccatctccaacatctatgagcgaagaaggctctgaaagttttaactatcatcatcgcgataatgacaatcccgtccgtactatctctttgacaaatattgaacaacagagtcaattgaaccaaagaaaaagagcacgcaataatttggaaaatgacattggtaaaccccttttcaagcattccttttctaattccatcagtgcaacaaatacgatgaatccagctttacattctatgcaagatttctccatgaaaaacaacaacaataatttgccatctattaatcgcgttataccttctcaaggcccaatcaatggtggtatcgaagttacattattgggttgtaacttcaaagatggtctttctgtaaagttcggctctaatcttgccctttctacgcaatgctggagtgagaccacgatcgtcacttatctccctcccgctgcctacgcgggtcaagttttcgtctctattactgatacgaataatgaaaataataacgatgaccttccccaagaaattgagatcaatgacaataaaaaggccatatttacctatgttgatgatactgataggcaattgattgaattggctttgcaaattgtgggattaaaaatgaatggtaagttagaagatgcaagaaatatcgcgaagaggattgttggcaatgattctcctgatagcggtacaaatggcaacagctgttctaaaagcacaggtccctctccaaaccaacacagtatgaatttgaacacaagtgttctttactccgatgaagtcttgatacaaaaagttataaaatctttgaacataaattccaatatttccatatgtgattctttagggagaactttattacatcttgcctgtttgaaaaattactccagccttgtgtatacattgattaaaaagggtgctcgtgttaacgatattgattcctttgggttgactccattacattttgcttgcataagtggtgaccctaaaattattaagatgcttttaaattgtaaagtaaattattctttgaggtctcacaacggattaactgcaagagaagtattcatagcaaaccacattcattctaaggaaatagacaaaaaacaagataacagagacaaccataagtttgttcataatgacacttatatcagcgaagtattgtctttgtttgaagaattccaaaacggtacgaagtttaccgatagtgtagaaacagacagtaattattctattagcaggaaatattctcaatccagtttcaatagtagcttgttggacaatgaatctttgaatgagaacttattcgaaagccaaagcatgataaatcccacttctatggagattcagcatccaaccttgcaattatttgagaatagtagttactctgagtacgaccaaagtgatttcgaagaagacggggatgaagatcttttcgtcactgacgaagtagaaaaaccaggtgttgcatgcagggaggaacaaagcgaactccttgatattggatctagcgccaacgaacccgaagaggataatggtagtacatctctctggaatagagttttacatagaattaatgatgacttaccaaaatatgaggatcttttcccgttgtcttggggtaaagatgataaattgaaaaccacaaatcaagacagtattgtggagcagtctgcatctaatattgaaaactctgaaaattctgaggaagaggattatgaggaagaggaagaatttttgaaaaaacagtttaacagattcttccaaaacaaacaaaacttcagaaatgataaaatgttaatatttttctggatacccttaacattgttacttttgacatggttcatcatgtacaaatttggcaaccaagatagttccatcaatcatataagcgaattaatctctgagtacttgagaattgcattagcaaagttcttgttgggaaatgaaaggatgaaaactgcattcaggtccaaattatctaacttacaaacaacaagaatgttgaacgatttaattgtcagttga

SEQ ID NO: 5699 - DNA, 1122 bp, Saccharomyces cerevisiae
atggctgccgtcacattacatctaagagctgaaactaaacccctagaggcacgtgctgccttaacacctaccacggttaaaaaactgatagctaagggcttcaaaatatatgtagaggacagtccacaatctactttcaatattaacgaatatcgtcaagcaggtgccattatagtgcctgcaggttcatggaaaaccgctccacgcgacagaatcattataggtttgaaggaaatgcctgaaaccgatactttccctctagtccacgaacacatccagtttgctcactgctacaaagaccaagctgggtggcaaaatgtccttatgagatttattaagggacacggtactctatatgatttggaatttttggaaaatgaccaaggtagaagagttgctgcctttggattttacgctgggttcgcaggtgcagcccttggtgtaagagactgggcattcaagcaaacgcattctgacgatgaagacttgcctgcagtgtcgccttaccccaatgaaaaggcattggttaaagatgttaccaaagattataaagaagccttagccaccggagccagaaagccaaccgtgttaatcattggtgcgctaggaagatgtggttccggtgccatcgatctgttgcacaaagttggtattccagatgctaacatattaaaatgggatatcaaagaaacttcccgtggtggtccctttgacgaaattccacaagctgatatttttatcaattgtatatatctatcgaagccaattgctcctttcactaacatggagaaactgaataatcctaacagaagactaaggaccgtggtggacgtatcagcagacactaccaaccctcacaaccccatcccaatatacactgtggctactgtgtttaacaaacctaccgttctggtacctaccactgccgggcctaaattatctgtcatctctattgatcacttgccttctttgctgccaagagaagcttcagaatttttctctcatgatctcttaccatctttagagctcctacctcaaagaaaaactgctcctgtctgggttagagccaagaaattgttcgatagacattgcgctcgtgttaaaagatcttcaagattgtag

SEQ ID NO: 5700 - DNA, 1122 bp, Artificial Sequence
  Description of Artificial Sequence: Synthetic polynucleotide
atggctgccgtcacattacatttaagagctgaaactaaacccttggaggcacgtgctgccttaacacctaccacggttaaaaaattgatagctaagggcttcaaaatatatgtagaggacagtccacaatctactttcaatattaacgaatatcgtcaagcaggtgccattatagtgcctgcaggttcttggaaaaccgctccacgcgacagaatcattataggtttgaaggaaatgcctgaaaccgatactttccctttggtccacgaacacatccagtttgctcactgctacaaagaccaagctgggtggcaaaatgtccttatgagatttattaagggacacggtactttatatgatttggaatttttggaaaatgaccaaggtagaagagttgctgcctttggattttacgctgggttcgcaggtgcagcccttggtgtaagagactgggcattcaagcaaacgcattctgacgatgaagacttgcctgcagtgtctccttaccccaatgaaaaggcattggttaaagatgttaccaaagattataaagaagccttagccaccggagccagaaagccaaccgtgttaatcattggtgcgttgggaagatgtggttccggtgccatcgatttattgcacaaagttggtattccagatgctaacatattaaaatgggatatcaaagaaacttcccgtggtggtccctttgacgaaattccacaagctgatatttttatcaattgtatatatttatccaagccaattgctcctttcactaacatggagaaattgaataatcctaacagaagattaaggaccgtggtggacgtatctgcagacactaccaaccctcacaaccccatcccaatatacactgtggctactgtgtttaacaaacctaccgttttggtacctaccactgccgggcctaaattatctgtcatctctattgatcacttgccttctttgttaccaagagaagcttctgaatttttctctcatgatctcttaccatctttagagctcttacctcaaagaaaaactgctcctgtctgggttagagccaagaaattgttcgatagacattgcgctcgtgttaaaagatcttctagattgtga

SEQ ID NO: 5701 - DNA, 765 bp, Saccharomyces cerevisiae
atgggtaaagttattttagttacaggtgtttccagaggtatcggtaagtccatcgtggatgttcttttcagtttggacaaggacacggttgtttacggtgtagccaggtctgaggcacccttgaagaagttgaaagagaagtatggcgacaggtttttttacgttgtcggtgatattaccgaggattccgtgttgaagcagttggttaacgctgctgttaagggccacggcaagatcgactccttggttgccaacgctggtgtcctagagcccgtgcaaaatgtcaacgagattgatgtcaacgcttggaagaagctgtatgacatcaacttcttcagcattgtttccttggttggcattgcgttacctgaattgaagaagaccaacggtaacgtggtattcgtcagttcggacgcctgtaacatgtacttcagcagttggggagcttacggttcttcaaaagccgctctgaaccacttcgccatgactctggccaacgaggaaaggcaagtgaaagccattgccgtcgccccaggtattgtggacacagatatgcaagttaacattagggagaacgtggggccttcctccatgagtgcagagcaattgaagatgtttagaggtttaaaggagaataaccagttgctggatagctctgtgccagctacagtttatgccaaattggcccttcatggtattcctgacggtgttaatggacagtacttgagctataatgaccctgccttggcggactttatgccttga

SEQ ID NO: 5702 - DNA, 765 bp, Artificial Sequence
  Description of Artificial Sequence: Synthetic polynucleotide
atgggtaaagttattttagttacaggtgtttccagaggtatcggtaagtccatcgtggatgttcttttcagtttggacaaggacacggttgtttacggtgtagccaggtctgaggcacccttgaagaagttgaaagagaagtatggcgacaggtttttttacgttgtcggtgatattaccgaggattccgtgttgaagcagttggttaacgctgctgttaagggccacggcaagatcgactccttggttgccaacgctggtgtcttggagcccgtgcaaaatgtcaacgagattgatgtcaacgcttggaagaagctttatgacatcaacttcttcagcattgtttccttggttggcattgcgttacctgaattgaagaagaccaacggtaacgtggtattcgtcagtagtgacgcctgtaacatgtacttcagcagttggggagcttacggttcttctaaagccgctttgaaccacttcgccatgactttggccaacgaggaaaggcaagtgaaagccattgccgtcgccccaggtattgtggacacagatatgcaagttaacattagggagaacgtggggccttcctccatgagtgcagagcaattgaagatgtttagaggtttaaaggagaataaccagttgttggatagctctgtgccagctacagtttatgccaaattggcccttcatggtattcctgacggtgttaatggacagtacttgagctataatgaccctgccttggcggactttatgccttga

SEQ ID NO: 5703 - DNA, 792 bp, Saccharomyces cerevisiae
atgggcaaggttattttgattacaggtgcctcccgtgggattggcctgcaattggtgaaaactgttatcgaagaggacgatgaatgcatcgtctacggcgtagcaagaacggaagctggtctgcagtctttgcaaagagaatacggtgcagacaaatttgtctatcgtgtcctcgacatcacggacaggtctcgaatggaagcgttggtggaggaaatccggcaaaagcatggaaaactggacggtattgtcgcaaatgcggggatgctagaaccggtgaagtccatctcccagtccaactccgaacacgacatcaagcagtgggaacggctgttcgatgtgaactttttcagcattgtctctttggtggcactgtgtttacccctcttgaagagctcgccatttgtaggcaacattgtcttcgtcagctctggagccagtgtgaaaccatataacggatggtcggcgtacggctgctcgaaagccgcattaaaccactttgccatggacattgccagtgaagagcccagtgataaagtgcgtgccgtgtgtattgcaccgggcgtcgttgacacgcagatgcagaaagatattagggaaacattgggtcctcagggcatgacacccaaggctctcgagaggtttactcaattgtacaagacttcgtcactgctggacccaaaggtgcctgcggcggtactagcgcaactcgtcctgaaaggtattcccgactctttgaacggtcaatatctccgctacaacgatgagcgactggggccggtgcagggctag

SEQ ID NO: 5704 - DNA, 792 bp, Artificial Sequence
  Description of Artificial Sequence: Synthetic polynucleotide
atgggcaaggttattttgattacaggtgcctcccgtgggattggcttacaattggtgaaaactgttatcgaagaggacgatgaatgcatcgtctacggcgtagcaagaacggaagctggtttacagtctttgcaaagagaatacggtgcagacaaatttgtctatcgtgtcctcgacatcacggacaggtctagaatggaagcgttggtggaggaaatcagacaaaagcatggaaaattagacggtattgtcgcaaatgcggggatgttggaaccggtgaagtccatctcccagtccaactccgaacacgacatcaagcagtgggaaagattattcgatgtgaactttttcagcattgtctctttggtggcattatgtttacccctcttgaagagctctccatttgtaggcaacattgtcttcgtcagctctggagccagtgtgaaaccatataacggatggtccgcgtacggctgctccaaagccgcattaaaccactttgccatggacattgccagtgaagagcccagtgataaagtgcgtgccgtgtgtattgcaccgggcgtcgttgacacgcagatgcagaaagatattagggaaacattgggtcctcagggcatgacacccaaggctctcgagaggtttactcaattgtacaagacttcttctttattagacccaaaggtgcctgcggcggtattggcgcaactcgtcttgaaaggtattcccgactctttgaacggtcaatatctccgctacaacgatgagaggttggggccggtgcagggctga

SEQ ID NO: 5705 - DNA, 492 bp, Saccharomyces cerevisiae
atgtcagaattctataagctagcacctgttgacaagaaaggccaaccattccccttcgaccaattaaagggaaaagtggtgcttatcgttaatgttgcctccaaatgtggattcactcctcaatacaaagaactagaggccttgtacaaacgttataaggacgaaggatttaccatcatcgggttcccatgcaaccagtttggccaccaagaacctggctctgatgaagaaattgcccagttctgccaactgaactatggcgtgactttccccattatgaaaaaaattgacgttaatggtggcaatgaggaccctgtttacaagtttttgaagagccaaaaatccggtatgttgggcttgagaggtatcaaatggaattttgaaaaattcttagtcgataaaaagggtaaagtgtacgaaagatactcttcactaaccaaaccttcttcgttgtccgaaaccatcgaagaacttttgaaagaggtggaatag

SEQ ID NO: 5706 - DNA, 492 bp, Artificial Sequence
  Description of Artificial Sequence: Synthetic polynucleotide
atgtctgaattctataagttagcacctgttgacaagaaaggccaaccattccccttcgaccaattaaagggaaaagtggtgcttatcgttaatgttgcctccaaatgtggattcactcctcaatacaaagaattagaggccttgtacaaacgttataaggacgaaggatttaccatcatcgggttcccatgcaaccagtttggccaccaagaacctggctctgatgaagaaattgcccagttctgccaattgaactatggcgtgactttccccattatgaaaaaaattgacgttaatggtggcaatgaggaccctgtttacaagtttttgaagagccaaaaatccggtatgttgggcttgagaggtatcaaatggaattttgaaaaattcttagtcgataaaaagggtaaagtgtacgaaagatactcttctttaaccaaaccttcttctttgtccgaaaccatcgaagaacttttgaaagaggtggaatga

SEQ ID NO: 5707 - DNA, 705 bp, Saccharomyces cerevisiae
atgtcgttgccaattatcaaagtccattggttggaccattccagagcgttcagacttttgtggttattagaccatttgaaccttgaatatgaaattgtcccttataaaagagatgctaacttccgtgctccaccagaattaaagaaaattcacccattaggaagatctccattgttagaagttcaagacagagaaactggtaagaagaagatacttgccgagtccggtttcatcttccaatatgtcttgcagcattttgatcattcacacgttttaatgagcgaagatgctgatattgcagaccagattaactattatctgttttatgtagaaggttccttgcaaccacctttaatgattgagttcattctttcaaaggtgaaggattctggtatgcccttccctatttcgtacttggcaagaaaagtggcagacaagatcagtcaggcatactctagtggtgaagttaagaaccagttcgactttgtggagggtgaaatttccaaaaataacggctacctggttgatgggaagttgagcggtgccgatatcttgatgtctttccctttgcagatggcgtttgaaagaaagtttgccgcaccagaggattatcctgccatttccaaatggttaaagaccataacctcagaggagtcgtatgctgcttctaaggaaaaggcgcgtgctttaggtagcaatttctaa

SEQ ID NO: 5708 - DNA, 705 bp, Artificial Sequence
  Description of Artificial Sequence: Synthetic polynucleotide
atgtctttgccaattatcaaagtccattggttggaccattccagagcgttcagacttttgtggttattagaccatttgaaccttgaatatgaaattgtcccttataaaagagatgctaacttccgtgctccaccagaattaaagaaaattcacccattaggaagatctccattgttagaagttcaagacagagaaactggtaagaagaagatacttgccgagtccggtttcatcttccaatatgtcttgcagcattttgatcattctcacgttttaatgagcgaagatgctgatattgcagaccagattaactattatttattttatgtagaaggttccttgcaaccacctttaatgattgagttcattctttccaaggtgaaggattctggtatgcccttccctatttcttacttggcaagaaaagtggcagacaagatcagtcaggcatactctagtggtgaagttaagaaccagttcgactttgtggagggtgaaatttccaaaaataacggctacttggttgatgggaagttgagcggtgccgatatcttgatgtctttccctttgcagatggcgtttgaaagaaagtttgccgcaccagaggattatcctgccatttccaaatggttaaagaccataacctctgaggagtcttatgctgcttctaaggaaaaggcgcgtgctttaggtagcaatttctga

SEQ ID NO: 5709 - DNA, 1614 bp, Saccharomyces cerevisiae
atgcaattgatttccatcctctctttgttgtcatcattgatgtgttcattgaccgttttagggtcttccgcaagttcctatgttaagtttcctgttcaaaagttggctgatattataaatatatgcacacaggatgtttctaccgtcttcaaaagaaatgaggttcttaacaccacagtgataaatggaataggagtgtatgttgtcaagatggaaatcggaacgcctccacaaacgttgtacctacagttagatactggctcttcagatatgattgtgaataatgctgacattgcctattgcaaatcgatgtctgacggatctgactacgcttcaactgataattacgagctcacagcaacgttcaatgggcttccttcgactaccatctcatcagaagcttataacactctctgctcttattggggtacattcgatgcaagcaactcatctacttttgagaataatgcgacgtttttcaataacacatacggagatggtacgtattatgcagggacttatggtacggatgttgtctctttcgaaaatattactctaaatgatttcacttttggtgtatcaaatgatacaataggcaatccaagtggcattttaggcatatcgcttcccattgcagaatttacagatggtatcgaatacgcattggcattgaacagaacacctttcatatatgataactttccaatggaattaaaaaatcagggaaagattaataaaatagcgtattctttatttttgaatggacctgatgcacacttcgggagcatcttgtttggtgcagtggacaaaagtaagtacacaggacagctttacaccctgcctatgctgcaggcattcaatacccttggctcaaatcctgggatgattattactgcacaaagtgtggcaattttggatagtgaatctggcaataaaactgtttcggatattcaatttccagtgatgttggattctggcacaactttctcctatttacccaccgaaattgcagaagcaatcggcaaaagttttgacggagagtacagctctgacgaccaaggctacatctttgattgttcaaaagtgaacgatactttactgtccgtcgactttggaggatttaatatatcggcaaacatatccaatttcgtaacatcagctaaggatcgttgcgttttaaatgttaagcaatccgagtccacttatatgctgggagatgctttccttgtcgacgcatatgtagtctacgatttagaaaactacgaaatttctattgctcaggctagctttaataatcaagaagaagatattgaggttatctccgatactgtcccaggtgccacccctgctcccggatactttagtacatgggtatataagcccggtagtcccatcggaacaggagattttattaatgtcagctggacctcgtattcggaattttcacagtacaaatcattgcttgccaccgcagcccaaagcgatgatgctagttctttctcaagtagtggcggctctagcgaaagcaccactaaaaaacaaaatgcaggttacaaataccgttcttctttctccttttcattattgtccttcatatcttattttcttttataa

SEQ ID NO: 5710 - DNA, 1614 bp, Artificial Sequence
  Description of Artificial Sequence: Synthetic polynucleotide
atgcaattgatttccatcctctctttgttgagttctttgatgtgttctttgaccgttttagggtcttccgcaagttcctatgttaagtttcctgttcaaaagttggctgatattataaatatatgcacacaggatgtttctaccgtcttcaaaagaaatgaggttcttaacaccacagtgataaatggaataggagtgtatgttgtcaagatggaaatcggaacgcctccacaaacgttgtacttacagttagatactggctcttctgatatgattgtgaataatgctgacattgcctattgcaaatctatgtctgacggatctgactacgcttccactgataattacgagctcacagcaacgttcaatgggcttccttccactaccatctcttctgaagcttataacactctctgctcttattggggtacattcgatgcaagcaactcttctacttttgagaataatgcgacgtttttcaataacacatacggagatggtacgtattatgcagggacttatggtacggatgttgtctctttcgaaaatattactttgaatgatttcacttttggtgtatctaatgatacaataggcaatccaagtggcattttaggcatatctcttcccattgcagaatttacagatggtatcgaatacgcattggcattgaacagaacacctttcatatatgataactttccaatggaattaaaaaatcagggaaagattaataaaatagcgtattctttatttttgaatggacctgatgcacacttcgggagcatcttgtttggtgcagtggacaaaagtaagtacacaggacagctttacaccttacctatgttacaggcattcaatacccttggcagtaatcctgggatgattattactgcacaaagtgtggcaattttggatagtgaatctggcaataaaactgtttctgatattcaatttccagtgatgttggattctggcacaactttctcctatttacccaccgaaattgcagaagcaatcggcaaaagttttgacggagagtacagctctgacgaccaaggctacatctttgattgttctaaagtgaacgatactttattatccgtcgactttggaggatttaatatatctgcaaacatatccaatttcgtaacatctgctaaggatcgttgcgttttaaatgttaagcaatccgagtccacttatatgcttggagatgctttccttgtcgacgcatatgtagtctacgatttagaaaactacgaaatttctattgctcaggctagctttaataatcaagaagaagatattgaggttatctccgatactgtcccaggtgccacccctgctcccggatactttagtacatgggtatataagcccggtagtcccatcggaacaggagattttattaatgtcagctggacctcttattctgaattttcccagtacaaatctttgcttgccaccgcagcccaaagcgatgatgctagttctttctctagtagtggcggctctagcgaaagcaccactaaaaaacaaaatgcaggttacaaataccgttcttctttctccttttctttattgtccttcatatcttattttcttttatga

SEQ ID NO: 5711 - DNA, 375 bp, Saccharomyces cerevisiae
atggtcaaattaacttcaatcgctgctggtgtcgccgccatcgctgctggtgttgccgctgccccagccactaccactctatctccatctgacgaaagagttaacttggtcgaattgggtgtttacgtctccgatatcagagctcatttggcccaatactacttgtttcaagcagctcatccaagtgagacctacccagttgaaattgctgaagctgttttcaactatggtgacttcaccaccatgttgactggtattccagctgaacaagtcaccagagttatcactggtgttccatggtactctaccagattgagaccagctatctccagtgctctatctaaggacggtatttacactgctattccaaaatag

SEQ ID NO: 5712 - DNA, 375 bp, Artificial Sequence
  Description of Artificial Sequence: Synthetic polynucleotide
atggtcaaattaacttctatcgctgctggtgtcgccgccatcgctgctggtgttgccgctgccccagccactaccactttatctccatctgacgaaagagttaacttggtcgaattgggtgtttacgtctccgatatcagagctcatttggcccaatactacttgtttcaagcagctcatccaagtgagacctacccagttgaaattgctgaagctgttttcaactatggtgacttcaccaccatgttgactggtattccagctgaacaagtcaccagagttatcactggtgttccatggtactctaccagattgagaccagctatctccagtgctttatctaaggacggtatttacactgctattccaaaatga

SEQ ID NO: 5713 - DNA, 711 bp, Saccharomyces cerevisiae
atggcgaatttaaatatatttgggcaagaagttggtgctgacgtcgaaggttggacaacaagggccttcccagagaaagttgtattgaaaggtaacacttgcagactagaacctctagatagagaaagacatggttcggaactttttagtgcctatagtgaggcaggccaaaaattatggacgtatttacctgcgggaccattcactaacttggaggaatatctagaattcattaaggaactcaatgaaactaaagatactgtgcctttcgcaattattaataaagagactgaacgtgccgttggtacattgtgcttaataagaatcgatgaagccaacggttcactagaagttggatatgttgttttttcaccagaattacagaagacgattattgcaactgaagctcaatttctgttaatgaagtatgtatttgatgatcttcaatacaggagatatgagtggaagtgtgatagtttaaatgggccgtcaaggagggcagcgatgcgcttaggctttaagtatgaaggcacgtttcgacaagtggtggtatataagggtcgcactcgcgacactcaatggttttcaataatcgataaagaatggttacgcattcgtaaaacctttgaagaatggttagacaaaacaaattttgaaaatggcaaacaaaagagaggaatagcagcaataagagaaagcttgtcaaactga

SEQ ID NO: 5714 - DNA, 711 bp, Artificial Sequence
  Description of Artificial Sequence: Synthetic polynucleotide
atggcgaatttaaatatatttgggcaagaagttggtgctgacgtcgaaggttggacaacaagggccttcccagagaaagttgtattgaaaggtaacacttgcagattagaacctttggatagagaaagacatggttctgaactttttagtgcctatagtgaggcaggccaaaaattatggacgtatttacctgcgggaccattcactaacttggaggaatatttggaattcattaaggaactcaatgaaactaaagatactgtgcctttcgcaattattaataaagagactgaacgtgccgttggtacattgtgcttaataagaatcgatgaagccaacggttctttggaagttggatatgttgttttttctccagaattacagaagacgattattgcaactgaagctcaatttttattaatgaagtatgtatttgatgatcttcaatacaggagatatgagtggaagtgtgatagtttaaatgggccgtctaggagggcagcgatgcgcttaggctttaagtatgaaggcacgtttagacaagtggtggtatataagggtcgcactcgcgacactcaatggttttccataatcgataaagaatggttacgcattcgtaaaacctttgaagaatggttagacaaaacaaattttgaaaatggcaaacaaaagagaggaatagcagcaataagagaaagcttgtctaactga

SEQ ID NO: 5715 - DNA, 5277 bp, Saccharomyces cerevisiae
atgaaagtttccgataggcgtaagtttgaaaaagcaaactttgacgagtttgagtcggctctaaataacaaaaacgacttggtacattgtccctcaataactttatttgaatcgatccccacggaagtgcggtcattctacgaagacgaaaagtctggcctaatcaaagtggtaaaattcagaactggtgcaatggataggaaaaggtcttttgaaaaagttgtcatttccgtcatggtcgggaaaaatgtaaaaaagttcctgacgtttgttgaagacgaaccagatttccagggcggaccaatcccttcaaagtatcttattcccaagaaaatcaacttgatggtctacacgttgtttcaagtgcatactttgaaattcaatagaaaggattacgataccctttctcttttttacctcaacagaggatactataatgagttgagtttccgtgtcctggaacgttgtcacgaaatagcgagtgctaggccgaacgacagctctacgatgcgtactttcactgactttgtttccggcgcacctattgtaaggagtcttcagaaaagcaccataaggaaatatgggtacaatttggcaccctacatgtttttgttactacacgtagatgagctatcgattttttctgcataccaagcaagtttacctggcgaaaagaaagtcgacacagagcggctgaagcgtgatctatgcccacgtaaacccattgagataaagtacttttcacagatatgtaacgatatgatgaacaaaaaggaccgattgggtgatattttgcatattatcttgcgagcatgtgcactcaatttcggggcgggtccccgtggtggcgctggtgacgaagaggatcgatctattacgaatgaagaacccattattccctctgtggacgagcatggcctgaaagtatgtaagttgcgcagtcctaacactccacgaagactcagaaaaacactagatgccgtgaaagctttattggtgtcgtcttgtgcttgtaccgcaagggatttagatatatttgatgacaacaacggcgttgcaatgtggaaatggatcaaaattctgtaccacgaagtagcgcaggaaaccacgctgaaggactcttatagaataactttggtaccttcttctgatggtatatcactactcgcttttgccggtcctcagcgcaacgtatacgtcgatgatacaacaagacgcatccaactgtacactgattacaacaagaacggttcatcggagcctcgactaaagacgcttgacggactcacctcagattacgtgttttattttgtcactgtgctaaggcaaatgcaaatatgtgcgcttggtaacagttatgacgcttttaatcatgatccttggatggatgtggtgggatttgaggatccaaatcaagtaacaaatcgagacatttcgaggatagttttgtattcctacatgtttctgaataccgcgaagggctgtctggttgaatacgcaacttttcggcagtacatgagggaacttccgaagaatgcacctcagaagctgaattttcgggagatgcgtcaggggttgattgccctaggacggcactgcgtaggtagcagatttgaaacagatttgtacgagtcggcgacgagtgaactcatggccaatcattccgttcaaacagggcgaaatatttacggtgtggattccttttcgttaactagtgtcagtgggacgaccgccactttattgcaggaacgagcttccgagcgctggattcagtggttaggccttgaaagcgactaccattgttcattctccagtactcggaatgcggaagacgtagtggcaggtgaggcggcgagttcaaatcatcatcaaaaaatttcaagagtaacgcgaaaaaggccccgagagcccaagagtacaaacgatatcctcgtcgcaggccagaaactctttggcagctcctttgaattcagggacttgcatcagttgcgcttatgttatgaaatatacatggcagacacaccctctgtggcagtacaggccccaccgggctatggtaagacggagttatttcatctccccttgatagcactggcatctaagggcgacgtggaatatgtgtcgtttctgtttgtaccgtacacagtgttgcttgctaattgcatgatcaggttgggccgacgcggttgcttgaatgtggcccctgtaagaaactttattgaagaaggttacgatggcgttactgatttatacgtggggatctacgatgatcttgctagcactaatttcacagacaggatagctgcgtgggagaatattgttgagtgcacctttaggaccaacaacgtaaaattgggttacctcattgtagatgagtttcacaactttgaaacggaggtctaccggcagtcgcaatttgggggcataactaaccttgattttgacgcttttgagaaagcaatctttttgagcggcacagcccctgaggctgtagctgatgctgcgttgcagcgtattgggcttacgggactggccaagaaatcgatggacatcaacgagctcaaacggtcggaagatctcagcagaggtctatccagctatccaacacggatgtttaatctaatcaaggagaaatccgaggtgcctttagggcatgttcataaaattcggaagaaagtggaatcacagcccgaagaagcactgaagcttcttttagccctctttgaaagtgaaccagagtcgaaggccattgtagttgcaagcacaaccaacgaagtggaagaattggcctgctcttggagaaagtattttagggtggtatggatacacgggaagctgggtgctgcagaaaaggtgtctcgcacaaaggagtttgtcactgacggtagcatgcaagttctcatcggaacgaaattagtgactgaaggaattgacattaagcaattgatgatggtgatcatgcttgataatagacttaatattattgagctcattcaaggtgtagggagactaagagatgggggcctctgttatctattatctagaaaaaacagttgggcggcaaggaatcgtaagggtgaattaccaccaattaaggaaggctgtataaccgaacaggtacgcgagttctatggacttgaatcaaagaaaggaaaaaagggccagcatgttggatgctgtggctccaggacagacctgtctgctgacacagtggaactgatagaaagaatggacagattggctgaaaaacaggcgacagcttccatgtcgatcgttgcgttaccgtctagcttccaggagagcaatagcagtgacaggtacagaaagtattgcagcagtgatgaggacagcaacacgtgcattcatggtagtgctaatgccagtactaacgccagtactaatgcgattaccactgctagtaccaacgtcaggactaatgcgactaccaatgctagtactaatgcgactaccaatgccagtaccaatgccagtactaatgcgaccaccaatgccagtaccaatgcgactaccaactccagcactaatgctactaccactgccagcaccaacgtcaggactagtgctactaccactgccagcatcaacgtcaggactagtgctactaccactgaaagtaccaactccagcactaatgcgactaccactgaaagtaccaactccagcactaatgctactaccaccgaaagtaccaactccaacactagtgctactaccactgccagcatcaacgtcaggactagtgctactaccactgaaagtaccaactccagcactagtgcgactaccactgccagcatcaacgtcaggactagtgctactaccactaaaagtatcaactctagcactaatgctactaccactgaaagtaccaactccaacactaatgctactaccactgaaagtaccaactccagcactaatgctactaccactgaaagtaccaactccagcactaatgctactaccactgaaagtaccaactccaacactagtgctgctaccaccgaaagtaccaactccaacactagtgctactaccactgaaagtaccaacgctagtgccaaggaggacgccaataaagatggcaatgctgaggataatagattccatccagtcaccgacattaacaaagagtcgtataagcggaaagggagtcaaatggttttgctagagagaaagaaactgaaagcacaatttcccaatacttccgagaatatgaatgtcttacagtttcttggatttcggtctgacgaaattaaacatcttttcctctatggtattgacatatacttctgcccagagggagtgttcacacaatacggattatgcaagggctgtcaaaagatgttcgagctctgtgtctgttgggctggccagaaagtatcgtatcggaggatagcttgggaagcactagctgtggagagaatgctgcgaaatgacgaggaatacaaagaatacttggaagacatcgagccatatcatggggaccctgtaggatatttgaaatattttagcgtaaaaaggagagagatctactctcagatacagagaaattatgcttggtacctggccattactagaagaagagaaacaattagtgtattggattcgacaagaggcaagcaagggagccaagttttccgcatgtctggaaggcagatcaaagagttgtattttaaagtatggagcaacttgcgtgaatcgaagacagaggtgctgcagtactttttgaactgggacgaaaaaaagtgccaggaagaatgggaggcaaaagacgatacggttgttgtggaagcgctcgagaaaggtggagtttttcagcgtttgcgttccatgacgagcgctggactgcagggtccgcagtacgtcaagctgcagtttagcaggcatcatcgacagttgaggagcagatatgaattaagtctaggaatgcacttgcgagatcagattgcgctgggagttaccccatctaaagtgccgcattggacggcattcctctcgatgctgatagggctgttctacaataaaacatttcggcagaaactggagtatcttttggagcagatttcggaggtgtggttgttaccacattggcttgatttggcaaacgttgaagttctcgctgcagatgacacgagggtaccactgtacatgctgatggtagcggttcacaaagagctggatagcgatgatgttccagacggtagatttgatatattattatgtagggattcgagcagagaagttggagagtga

SEQ ID NO: 5716 - DNA, 5277 bp, Artificial Sequence
  Description of Artificial Sequence: Synthetic polynucleotide
atgaaagtttccgataggcgtaagtttgaaaaagcaaactttgacgagtttgagtctgctttgaataacaaaaacgacttggtacattgtccctccataactttatttgaaagtatccccacggaagtgagatctttctacgaagacgaaaagtctggcttaatcaaagtggtaaaattcagaactggtgcaatggataggaaaaggtcttttgaaaaagttgtcatttccgtcatggtcgggaaaaatgtaaaaaagttcttgacgtttgttgaagacgaaccagatttccagggcggaccaatcccttctaagtatcttattcccaagaaaatcaacttgatggtctacacgttgtttcaagtgcatactttgaaattcaatagaaaggattacgataccctttctcttttttacctcaacagaggatactataatgagttgagtttccgtgtcttggaacgttgtcacgaaatagcgagtgctaggccgaacgacagctctacgatgcgtactttcactgactttgtttccggcgcacctattgtaaggagtcttcagaaaagcaccataaggaaatatgggtacaatttggcaccctacatgtttttgttattacacgtagatgagttatccattttttctgcataccaagcaagtttacctggcgaaaagaaagtcgacacagagaggttaaagcgtgatttatgcccacgtaaacccattgagataaagtacttttcccagatatgtaacgatatgatgaacaaaaaggacagattgggtgatattttgcatattatcttgagagcatgtgcactcaatttcggggcgggtccccgtggtggcgctggtgacgaagaggatagatctattacgaatgaagaacccattattccctctgtggacgagcatggcttgaaagtatgtaagttgcgcagtcctaacactccaagaagactcagaaaaacattagatgccgtgaaagctttattggtgtcttcttgtgcttgtaccgcaagggatttagatatatttgatgacaacaacggcgttgcaatgtggaaatggatcaaaattttataccacgaagtagcgcaggaaaccacgttgaaggactcttatagaataactttggtaccttcttctgatggtatatctttactcgcttttgccggtcctcagcgcaacgtatacgtcgatgatacaacaagacgcatccaattgtacactgattacaacaagaacggttcttctgagcctcgtttgaagacgcttgacggactcacctctgattacgtgttttattttgtcactgtgttaaggcaaatgcaaatatgtgcgcttggtaacagttatgacgcttttaatcatgatccttggatggatgtggtgggatttgaggatccaaatcaagtaacaaatagagacatttctaggatagttttgtattcctacatgtttttgaataccgcgaagggctgtttggttgaatacgcaacttttagacagtacatgagggaacttccgaagaatgcacctcagaagttgaattttagagagatgcgtcaggggttgattgccttaggaagacactgcgtaggtagcagatttgaaacagatttgtacgagtctgcgacgagtgaactcatggccaatcattccgttcaaacagggagaaatatttacggtgtggattccttttctttaactagtgtcagtgggacgaccgccactttattgcaggaaagagcttccgagcgctggattcagtggttaggccttgaaagcgactaccattgttctttctccagtactagaaatgcggaagacgtagtggcaggtgaggcggcgagtagtaatcatcatcaaaaaatttctagagtaacgagaaaaaggcccagagagcccaagagtacaaacgatatcctcgtcgcaggccagaaactctttggcagctcctttgaattcagggacttgcatcagttgcgcttatgttatgaaatatacatggcagacacaccctctgtggcagtacaggccccaccgggctatggtaagacggagttatttcatctccccttgatagcattggcatctaagggcgacgtggaatatgtgtcctttttgtttgtaccgtacacagtgttgcttgctaattgcatgatcaggttgggcaggcgcggttgcttgaatgtggcccctgtaagaaactttattgaagaaggttacgatggcgttactgatttatacgtggggatctacgatgatcttgctagcactaatttcacagacaggatagctgcgtgggagaatattgttgagtgcacctttaggaccaacaacgtaaaattgggttacctcattgtagatgagtttcacaactttgaaacggaggtctacagacagtctcaatttgggggcataactaaccttgattttgacgcttttgagaaagcaatctttttgagcggcacagcccctgaggctgtagctgatgctgcgttgcagcgtattgggcttacgggattggccaagaaatctatggacatcaacgagctcaaaagaagtgaagatctcagcagaggtttatccagctatccaacaagaatgtttaatttgatcaaggagaaatccgaggtgcctttagggcatgttcataaaattagaaagaaagtggaatctcagcccgaagaagcattgaagcttcttttagccctctttgaaagtgaaccagagtctaaggccattgtagttgcaagcacaaccaacgaagtggaagaattggcctgctcttggagaaagtattttagggtggtatggatacacgggaagttgggtgctgcagaaaaggtgtctcgcacaaaggagtttgtcactgacggtagcatgcaagttctcatcggaacgaaattagtgactgaaggaattgacattaagcaattgatgatggtgatcatgcttgataatagacttaatattattgagctcattcaaggtgtagggagattgagagatgggggcctctgttatcttttatctagaaaaaacagttgggcggcaaggaatcgtaagggtgaattaccaccaattaaggaaggctgtataaccgaacaggtacgcgagttctatggacttgaatccaagaaaggaaaaaagggccagcatgttggatgctgtggctccaggacagacttgtctgctgacacagtggaattgatagaaagaatggacagattggctgaaaaacaggcgacagcttccatgtccatcgttgcgttaccgtctagcttccaggagagcaatagcagtgacaggtacagaaagtattgcagcagtgatgaggacagcaacacgtgcattcatggtagtgctaatgccagtactaacgccagtactaatgcgattaccactgctagtaccaacgtcaggactaatgcgactaccaatgctagtactaatgcgactaccaatgccagtaccaatgccagtactaatgcgaccaccaatgccagtaccaatgcgactaccaactccagcactaatgctactaccactgccagcaccaacgtcaggactagtgctactaccactgccagcatcaacgtcaggactagtgctactaccactgaaagtaccaactccagcactaatgcgactaccactgaaagtaccaactccagcactaatgctactaccaccgaaagtaccaactccaacactagtgctactaccactgccagcatcaacgtcaggactagtgctactaccactgaaagtaccaactccagcactagtgcgactaccactgccagcatcaacgtcaggactagtgctactaccactaaaagtatcaactctagcactaatgctactaccactgaaagtaccaactccaacactaatgctactaccactgaaagtaccaactccagcactaatgctactaccactgaaagtaccaactccagcactaatgctactaccactgaaagtaccaactccaacactagtgctgctaccaccgaaagtaccaactccaacactagtgctactaccactgaaagtaccaacgctagtgccaaggaggacgccaataaagatggcaatgctgaggataatagattccatccagtcaccgacattaacaaagagtcttataagagaaaagggagtcaaatggttttgttggagagaaagaaattgaaagcacaatttcccaatacttccgagaatatgaatgtcttacagtttcttggatttagatctgacgaaattaaacatcttttcctctatggtattgacatatacttctgcccagagggagtgttcacacaatacggattatgcaagggctgtcaaaagatgttcgagctctgtgtctgttgggctggccagaaagtatcttatagaaggatagcttgggaagcattggctgtggagagaatgttaagaaatgacgaggaatacaaagaatacttggaagacatcgagccatatcatggggaccctgtaggatatttgaaatattttagcgtaaaaaggagagagatctactctcagatacagagaaattatgcttggtacttggccattactagaagaagagaaacaattagtgtattggattctacaagaggcaagcaagggagccaagttttccgcatgtctggaaggcagatcaaagagttgtattttaaagtatggagcaacttgcgtgaatccaagacagaggtgttacagtactttttgaactgggacgaaaaaaagtgccaggaagaatgggaggcaaaagacgatacggttgttgtggaagcgctcgagaaaggtggagtttttcagcgtttgcgttccatgacgagcgctggattacagggtccgcagtacgtcaagttacagtttagcaggcatcatagacagttgaggagcagatatgaattaagtttgggaatgcacttgagagatcagattgcgttgggagttaccccatctaaagtgccgcattggacggcattcctctctatgttgatagggcttttctacaataaaacatttagacagaaattagagtatcttttggagcagatttctgaggtgtggttgttaccacattggcttgatttggcaaacgttgaagttctcgctgcagatgacacgagggtaccattgtacatgttaatggtagcggttcacaaagagttagatagcgatgatgttccagacggtagatttgatatattattatgtagggattctagcagagaagttggagagtga

SEQ ID NO: 5717 - DNA, 363 bp, Saccharomyces cerevisiae; identical to SEQ ID NO: 5293

SEQ ID NO: 5718 - DNA, 363 bp, Artificial Sequence; identical to SEQ ID NO: 5294
  Description of Artificial Sequence: Synthetic polynucleotide

SEQ ID NO: 5719 - DNA, 4650 bp, Saccharomyces cerevisiae
atggcattgtttcgtgccctgtatattatttgggtattcctactcattccactgtccaatgcagaagaattcacccccaaggttaccagaactttgtcaagatatgtattcgatatagtaaactttgatgattcaaacactttgatcagagcagaagaagactctgtcgagataagttttgatgctggagaaaattggaaaacaatagatgagattgaagagcctatcgagtcatttgttgttgatcccttccgtgggcatgatagagcttttgctttcgtgaaaacggcaccaaaattttacgtcacggatgatcaaggtaaatcgtggaggcctttgactatacccatttctgagaaagcatcgaattatttttgcgacgtaactactcaccctataaaaaagaagcatcttattattcgttgtgatttgttgacaataaaaaactcaggcttaatgtatgttggaagagagatttacacaactaatgatggagtatccttttcccaagttaaaccttcttttggaaaaattgatggtcatattagcacggcacgctgtgactttattaaatctagtgaggattctgatctgggcggtaatgatgcttcgatactctgtcttttccgaaacactgagtacattgaaagtacaggctcaactattgacaagtctgaattgattttaagtgccgatggaggtgaaacattcaaagaattagtccagttcaaagataaggttgttagtcgatacgagatacttaagcatcatgtgatcgttttgacacaagatgatatgtataatgaaatgtcatcaacaaacatttggatatccaatgatgtatccacttttcaagtggctcgtacacctactaagatacggcacgttaatatgggacaaattcatgaagattccatcggaagaatcgttttacctgtatctagagaaagagatgatgaagacagcaaccaaccgggagctgctgaagtgttaatatcagattctgaaggactaaaatttttgcctataaattggataccaaacaatcagtttggatatatcaatgtagcttatccaggtttcttaaaaggaacattttttggttcgtttcatcccttcattgaatattctgatagaaaaaggaaatacagccgacagaaagtaagagaggaaactaaagtatctgttgataacggtctcacatggacaaacttgaaagttgttgaccgggaaaatgtagatttatttggttgtgatgtcactaaacccgagagatgttcgcttcagactcatttctatgatctaagaaatttaaatccctctgccggaatcatgatgatatcgggtattgttggcgacggcagtgcatacaattggaaagaagaaaaaactttcatctccagggatagtggtttaacatggaggttagtccataattccactggtttatatactactggtgatctgggaaatattatcatgtatattccatatcgttcgaatgaaaatggcgatgtgccttctaaattttattattccttggatcaaggtaagacatggggtgaatatgatctaatcatgcctatttatccatacagattagtcagcacaatatcagatggatctggttcaaaatttattctaacaggaacgtccattacagaagatccaatattcattacatattcaattgatttttcagcggtatttgattataaatcatgtgaagagggtgattttgaagattggaatctagcagatggaaaatgtgttaatggcgccaaatacaagtacagaaggaggaaacaggacgcccagtgtttggtaaaaaaagcattcaaagatttgagtttagatgaaacgccttgtaacagttgtactggatccgactacgaatgttcgtttgaattcgttagagatgcgaagggtgactgtataccagattataatctgattgccctttccgatatatgtgacaaatcgaagggtaaatctgtgttagtaaagccactacaattaatcaaaggtgataaatgtaaaacacctatgaaaattgaatccgtagacattccgtgtgacgaaattccaaaggagggttcgagtgacaaggaaatagtgactactgaaaacaaattcgactttgaaattaaattttaccaatacttcgatacagttgccgacgaatctttggtcatgctgaattcgataggagacgcctatatatcccacgatggtggacaaacgataaaaaggtttgacactgacggcgaaaaaattgtcgaaatcgtgtttaacccatacttcaattcttcagcatatttgtttggctctaaaggtaacatattcttaacacacgatagaggatactctttcatgatagctaaattacctgaagccaggcaattaggcatgccactagattttagtgctaaagcacaggatacttttatttactatggtggtaagaattgtgaatcaattttaagtccagaatgtcatgcagtggcatacctcaccaaagatgggggtgaaacttttacagaaatgcttgataatgcaattcattgtgagtttgcaggaacactattcaaatatccgtcaaatgacgatatggttatgtgccaagtaaaggaaaagttttcgcaaacaagaagtttagtttcttctactgactttttccaagatgatagaaaaactgtctttgaaaacattatcggctacttgtctactggtggctatatcattgttgccgtacctcatgaagacaatgaattgagggcgtatgtaactaatgatggtgctgagtttaccgaggcaaaattcccatatgatgaagatattggtaagcaagacgcattcactattttaggatctgaggaaggatcaatatttttacatttagcaacaaacttggaatcaggacacgatttcggaaaccttttgaaatccaactcgaatggtacttcttttgtcaccttagagcatgccgttaatagaaacacattcggttatgtggactttgaaaaagttcaaggtcttgaaggtattattatcaccaacatcgtttcgaatagcgaaaaggttggcgagaacaaggaagacgaacaattgaagacgaaaatcaccttcaatgacggttcagattggaactttttgaagcctccaaagaaggattcggaagggaaaaagtttccctgtgattctgtgtcattagataaatgttctctacatttgcatggttacactgaacgtaaggatatcagggatacatattcctctggctccgcgttaggaatgatgtttggtgtcggaaatgttggcgataggcttctaccatatgaggagtgttccacttttctaaccactgatggaggagagacgtggactgaggttaaaaaaggcccccatcaatgggagtacggtgatcatggtggagtcttggttttggtccccgaaaacgcagaaactgattctatttcttactccaccgattttggtaaaacatggaaagattataaattctgtggcgacaaagtcctcgtaaaggatataatcaccgttcccagagattctgctttgaggtttttgctatttggagaagcaaaaaacatgggtagtggttcattcagaacgtatacaattgattttagaaacatcttcgagaggcaatgtgagtttgatattaccggtagaaaaagggcagattttaagtactctcctctgggttccagaactggttgtttgtttggccataaaacagaatttttacgtaaaaccgatgaaaaatgttttattgggaatattccactttctgaattttcgaggaacgtcaaaaactgtccatgtacaagacaagatttcgaatgtgactataatttttataaagccagtgatggtacttgtaaattagtcaaaggcttaagttcggcgaatggtgccgatatctgcaaaaaggaacccgacttaattgaatactatgattcctccggctatcggaaaattcccttatcaacctgtaaaggtgggctgaaattggatgcacatttagcaccacatccttgtccgggaaaagaaaaggcattcagggaaaaatactctataaacaccggcgcttatgcgctggtttttgttacaattcttctcgttattttctttgtcgcatggtttgtatacgatagaggtatcaggagaaatgggggattttcaagatttgaagaaatcagattaggagacgatgggctgatagaaaacaataggaccgatagagttgtcaacatcattgtaagactaggattatgcatttctttaatcaccaagtctgcgtttcaacgcgcgaaggcaggtacagcgcaactttcttcaaaatttagggcaaggtttggcaacaaaaaaggtgccacttactcttcgctgcttcatgatcagctttcagatgaaccagatggcttccatgaagattccaacgatttatccagtttcagaggtcaaggtagtaattctgaaattgagcaagaagatgttgacacatctcaacaagagcatacgtcgcggacagacctacttggtgctagcaatattccagacgctttgccagcgcgtagtgcttctcacgagtccgatttagcagctgcacgcagcgaagacaagtag

SEQ ID NO: 5720 - DNA, 4650 bp, Artificial Sequence
  Description of Artificial Sequence: Synthetic polynucleotide
atggcattgtttcgtgccttatatattatttgggtattcttactcattccattgtccaatgcagaagaattcacccccaaggttaccagaactttgtccagatatgtattcgatatagtaaactttgatgattccaacactttgatcagagcagaagaagactctgtcgagataagttttgatgctggagaaaattggaaaacaatagatgagattgaagagcctatcgagtcttttgttgttgatcccttccgtgggcatgatagagcttttgctttcgtgaaaacggcaccaaaattttacgtcacggatgatcaaggtaaaagttggaggcctttgactatacccatttctgagaaagcatctaattatttttgcgacgtaactactcaccctataaaaaagaagcatcttattattcgttgtgatttgttgacaataaaaaacagtggcttaatgtatgttggaagagagatttacacaactaatgatggagtatccttttcccaagttaaaccttcttttggaaaaattgatggtcatattagcacggcacgctgtgactttattaaatctagtgaggattctgatttgggcggtaatgatgcttctatactctgtcttttcagaaacactgagtacattgaaagtacaggctccactattgacaagtctgaattgattttaagtgccgatggaggtgaaacattcaaagaattagtccagttcaaagataaggttgttagtagatacgagatacttaagcatcatgtgatcgttttgacacaagatgatatgtataatgaaatgtcttctacaaacatttggatatccaatgatgtatccacttttcaagtggctcgtacacctactaagatacgtcacgttaatatgggacaaattcatgaagattccatcggaagaatcgttttacctgtatctagagaaagagatgatgaagacagcaaccaaccgggagctgctgaagtgttaatatctgattctgaaggattgaaatttttgcctataaattggataccaaacaatcagtttggatatatcaatgtagcttatccaggtttcttaaaaggaacattttttggttcttttcatcccttcattgaatattctgatagaaaaaggaaatacagcagacagaaagtaagagaggaaactaaagtatctgttgataacggtctcacatggacaaacttgaaagttgttgacagagaaaatgtagatttatttggttgtgatgtcactaaacccgagagatgttctcttcagactcatttctatgatttgagaaatttaaatccctctgccggaatcatgatgatatctggtattgttggcgacggcagtgcatacaattggaaagaagaaaaaactttcatctccagggatagtggtttaacatggaggttagtccataattccactggtttatatactactggtgatttgggaaatattatcatgtatattccatatcgttccaatgaaaatggcgatgtgccttctaaattttattattccttggatcaaggtaagacatggggtgaatatgatttgatcatgcctatttatccatacagattagtcagcacaatatctgatggatctggttccaaatttattttaacaggaacgtccattacagaagatccaatattcattacatattctattgatttttctgcggtatttgattataaaagttgtgaagagggtgattttgaagattggaatttggcagatggaaaatgtgttaatggcgccaaatacaagtacagaaggaggaaacaggacgcccagtgtttggtaaaaaaagcattcaaagatttgagtttagatgaaacgccttgtaacagttgtactggatccgactacgaatgttcctttgaattcgttagagatgcgaagggtgactgtataccagattataatttaattgccctttccgatatatgtgacaaatccaagggtaaatctgtgttagtaaagccattgcaattaatcaaaggtgataaatgtaaaacacctatgaaaattgaatccgtagacattccgtgtgacgaaattccaaaggagggtagtagtgacaaggaaatagtgactactgaaaacaaattcgactttgaaattaaattttaccaatacttcgatacagttgccgacgaatctttggtcatgttgaattctataggagacgcctatatatcccacgatggtggacaaacgataaaaaggtttgacactgacggcgaaaaaattgtcgaaatcgtgtttaacccatacttcaattcttctgcatatttgtttggctctaaaggtaacatattcttaacacacgatagaggatactctttcatgatagctaaattacctgaagccaggcaattaggcatgccattagattttagtgctaaagcacaggatacttttatttactatggtggtaagaattgtgaaagtattttaagtccagaatgtcatgcagtggcatacctcaccaaagatgggggtgaaacttttacagaaatgcttgataatgcaattcattgtgagtttgcaggaacattgttcaaatatccgtccaatgacgatatggttatgtgccaagtaaaggaaaagttttctcaaacaagaagtttagtttcttctactgactttttccaagatgatagaaaaactgtctttgaaaacattatcggctacttgtctactggtggctatatcattgttgccgtacctcatgaagacaatgaattgagggcgtatgtaactaatgatggtgctgagtttaccgaggcaaaattcccatatgatgaagatattggtaagcaagacgcattcactattttaggatctgaggaaggatccatatttttacatttagcaacaaacttggaatctggacacgatttcggaaaccttttgaaatccaacagtaatggtacttcttttgtcaccttagagcatgccgttaatagaaacacattcggttatgtggactttgaaaaagttcaaggtcttgaaggtattattatcaccaacatcgtttctaatagcgaaaaggttggcgagaacaaggaagacgaacaattgaagacgaaaatcaccttcaatgacggttctgattggaactttttgaagcctccaaagaaggattctgaagggaaaaagtttccctgtgattctgtgtctttagataaatgttctttgcatttgcatggttacactgaacgtaaggatatcagggatacatattcctctggctccgcgttaggaatgatgtttggtgtcggaaatgttggcgataggcttttaccatatgaggagtgttccacttttttaaccactgatggaggagagacgtggactgaggttaaaaaaggcccccatcaatgggagtacggtgatcatggtggagtcttggttttggtccccgaaaacgcagaaactgattctatttcttactccaccgattttggtaaaacatggaaagattataaattctgtggcgacaaagtcctcgtaaaggatataatcaccgttcccagagattctgctttgaggtttttgttatttggagaagcaaaaaacatgggtagtggttctttcagaacgtatacaattgattttagaaacatcttcgagaggcaatgtgagtttgatattaccggtagaaaaagggcagattttaagtactctcctttaggttccagaactggttgtttgtttggccataaaacagaatttttacgtaaaaccgatgaaaaatgttttattgggaatattccactttctgaatttagcaggaacgtcaaaaactgtccatgtacaagacaagatttcgaatgtgactataatttttataaagccagtgatggtacttgtaaattagtcaaaggcttaagttctgcgaatggtgccgatatctgcaaaaaggaacccgacttaattgaatactatgattcctccggctatagaaaaattcccttatctacctgtaaaggtgggttgaaattggatgcacatttagcaccacatccttgtccgggaaaagaaaaggcattcagggaaaaatactctataaacaccggcgcttatgcgttggtttttgttacaattcttctcgttattttctttgtcgcatggtttgtatacgatagaggtatcaggagaaatgggggattttccagatttgaagaaatcagattaggagacgatgggttgatagaaaacaataggaccgatagagttgtcaacatcattgtaagattaggattatgcatttctttaatcaccaagtctgcgtttcaacgcgcgaaggcaggtacagcgcaactttcttctaaatttagggcaaggtttggcaacaaaaaaggtgccacttactcttctttacttcatgatcagctttctgatgaaccagatggcttccatgaagattccaacgatttatccagtttcagaggtcaaggtagtaattctgaaattgagcaagaagatgttgacacatctcaacaagagcatacgtccaggacagacttacttggtgctagcaatattccagacgctttgccagcgcgtagtgcttctcacgagtccgatttagcagctgcacgcagcgaagacaagtga

SEQ ID NO: 5721 - DNA, 1770 bp, Saccharomyces cerevisiae; identical to SEQ ID NO: 5297

SEQ ID NO: 5722 - DNA, 1770 bp, Artificial Sequence; identical to SEQ ID NO: 5298
  Description of Artificial Sequence: Synthetic polynucleotide

SEQ ID NO: 5723 - DNA, 1704 bp, Saccharomyces cerevisiae
atgtccggtgttaataatacatccgcaaatgatttatccactaccgagtctaactctaactcagtagcaaatgcaccatctgtaaaaactgagcataatgactctaaaaactccctcaacctggatgccactgaaccacctattgacttacctcaaaaacccctctctgcatataccaccgtcgcaatcctgtgtttgatgattgcatttggcggcttcatctttggttgggataccggtaccatttctggttttgttaacctttctgatttcatcagaaggttcggtcaaaaaaatgacaagggaacctactacttatcgaaagtaagaatgggtttgatcgtctcaatattcaacattggctgcgccataggcggaattgtcttgtcaaaagtcggtgatatatatggtcgtcgtattggattgattacagttactgccatttacgttgtaggcatcctaatccaaataacttccataaacaagtggtaccaatacttcattggaagaattatttctggcctaggagtgggaggcattgctgtcctttccccaatgttgatatctgaagttgctcccaaacaaatcagaggaaccctggtccaattgtaccagctgatgtgtacgatgggtatttttctaggatactgtaccaattacggtaccaagaactatcacaacgccactcaatggagagtcggccttggtctttgctttgcctggactacattcatggttagtggaatgatgtttgtaccagaatcaccacgttacctgattgaggttggtaaagatgaggaagcgaaacgttcactttcgaaatccaacaaagtctcagtcgacgatccagccttgttagcagaatatgacactataaaggcgggaatcgaacttgaaaagctggcaggtaacgcatcatggtctgaactactctccactaaaacaaaggtctttcagcgtgttctcatgggagtgatgatccaatcgctgcagcaattaaccggtgataactacttcttttactacggcaccaccatcttcaaatctgtcggtctaaaggactcctttcagacttcgatcattatcggtgtggttaattttttctcttcattcatagcggtatacaccattgagaggtttggacgccgtacgtgtctattgtggggtgctgcttctatgctatgctgctttgctgtgtttgcctccgtcggtgtgacaaagttgtggcctcaaggaagcagtcaccaagacattacttctcagggcgccggtaactgtatgattgtgtttactatgttcttcattttttcgttcgccaccacttgggcaggcggctgttacgttattgtctcagagacgtttcctcttagggtcaaatcaagaggaatggcaatcgcaacagctgcaaactggatgtggggtttcctgattagtttctttaccccattcattaccggggcaatcaacttttactacggttatgtattcttaggctgtctggtttttgcatacttttatgtctttttctttgtcccagaaacaaaaggcctgacgctggaggaggtgaatactatgtggctggaaggtgtgccagcatggaaatcagcctcatgggtgccaccagaaagaagaaccgcagattacgatgctgacgccatagaccatgacgatagaccaatctacaagaggttcttttccagctaa

SEQ ID NO: 5724 - DNA, 1704 bp, Artificial Sequence
  Description of Artificial Sequence: Synthetic polynucleotide
atgtccggtgttaataatacatccgcaaatgatttatccactaccgagtctaactctaactctgtagcaaatgcaccatctgtaaaaactgagcataatgactctaaaaactccctcaaccttgatgccactgaaccacctattgacttacctcaaaaacccctctctgcatataccaccgtcgcaatcttgtgtttgatgattgcatttggcggcttcatctttggttgggataccggtaccatttctggttttgttaacctttctgatttcatcagaaggttcggtcaaaaaaatgacaagggaacctactacttatccaaagtaagaatgggtttgatcgtcagtatattcaacattggctgcgccataggcggaattgtcttgagtaaagtcggtgatatatatggtcgtcgtattggattgattacagttactgccatttacgttgtaggcatcttaatccaaataacttccataaacaagtggtaccaatacttcattggaagaattatttctggcttgggagtgggaggcattgctgtcctttccccaatgttgatatctgaagttgctcccaaacaaatcagaggaaccttggtccaattgtaccagttgatgtgtacgatgggtatttttttgggatactgtaccaattacggtaccaagaactatcacaacgccactcaatggagagtcggccttggtctttgctttgcctggactacattcatggttagtggaatgatgtttgtaccagaatctccacgttacttgattgaggttggtaaagatgaggaagcgaaacgttctctttctaaatccaacaaagtcagtgtcgacgatccagccttgttagcagaatatgacactataaaggcgggaatcgaacttgaaaagttagcaggtaacgcatcttggtctgaattactctccactaaaacaaaggtctttcagcgtgttctcatgggagtgatgatccaaagtttacagcaattaaccggtgataactacttcttttactacggcaccaccatcttcaaatctgtcggtttgaaggactcctttcagacttctatcattatcggtgtggttaattttttctcttctttcatagcggtatacaccattgagaggtttggacgccgtacgtgtttgttgtggggtgctgcttctatgttgtgctgctttgctgtgtttgcctccgtcggtgtgacaaagttgtggcctcaaggaagcagtcaccaagacattacttctcagggcgccggtaactgtatgattgtgtttactatgttcttcattttttctttcgccaccacttgggcaggcggctgttacgttattgtcagtgagacgtttcctcttagggtcaaatctagaggaatggcaatcgcaacagctgcaaactggatgtggggtttcttgattagtttctttaccccattcattaccggggcaatcaacttttactacggttatgtattcttaggctgtttggtttttgcatacttttatgtctttttctttgtcccagaaacaaaaggcttgacgttggaggaggtgaatactatgtggttagaaggtgtgccagcatggaaaagtgccagttgggtgccaccagaaagaagaaccgcagattacgatgctgacgccatagaccatgacgatagaccaatctacaagaggttcttttccagctga

SEQ ID NO: 5725 - DNA, 591 bp, Saccharomyces cerevisiae
atgggcgtattagaaaatatagtacctggtgagctttatgatgcgaactatgatccagatcttttgaaaattagaaaagagactaaaataaaattgcacgaatacaacacccttagccccgctgatgagaataaaaagagccaggtaataagagaattacttggtagttgcactgataactttataattgaaccgccgttttactgtgattacggaagtaacatctatatcggagacaacttttacgccaatcacaatcttgttatattggatggggccaaggtagtcatcggtgacaacgtatttatcgcccctaatgttggtatttatacggcaggtcatccaattgacgtggaaagacggcttcaaggattagaatatgccatgcctgtgaccattggagacaatgtatggattggaggtggagtgtcaataattcctggagtaaatataggtaaaaactccgtgattgccgccggtagtgttgtgattcgtgacataccagaaaatgtagtggcagcaggtaatccttgtaaggtgataagaaagatcactgaaaaagatagtacaactacaaactatcgaaaatga

SEQ ID NO: 5726 - DNA, 591 bp, Artificial Sequence
  Description of Artificial Sequence: Synthetic polynucleotide
atgggcgtattagaaaatatagtacctggtgagctttatgatgcgaactatgatccagatcttttgaaaattagaaaagagactaaaataaaattgcacgaatacaacacccttagccccgctgatgagaataaaaagagccaggtaataagagaattacttggtagttgcactgataactttataattgaaccgccgttttactgtgattacggaagtaacatctatatcggagacaacttttacgccaatcacaatcttgttatattggatggggccaaggtagtcatcggtgacaacgtatttatcgcccctaatgttggtatttatacggcaggtcatccaattgacgtggaaagaagacttcaaggattagaatatgccatgcctgtgaccattggagacaatgtatggattggaggtggagtgtctataattcctggagtaaatataggtaaaaactccgtgattgccgccggtagtgttgtgattcgtgacataccagaaaatgtagtggcagcaggtaatccttgtaaggtgataagaaagatcactgaaaaagatagtacaactacaaactatagaaaatga

SEQ ID NO: 5727 - DNA, 597 bp, Saccharomyces cerevisiae
atggtcgaatctaagaatactgaattatcgcaaggaacatggctcaataagccaaaatctgtttttcaagaggcaggaaaagtcactctggaaacagatgaaaaaactgacttttggcgtgaaacattttacggatttacccgtgatagcggtcattttttgggagtagagacaggtagtgcttttactgcacaagtccgtgttcagggaagctacgagagtctttatgatcaggctggtatcatggttcgtatagatgatggacattggctcaaagctggcatagaaatttctgatggccacgcaatgctaagcagtgttttgacaaatggaaaatcagattggtcaactgctgtttatggcggaaatgctcgcgatttctggcttcgtgttactgttgaaaagggcgttttgaggattcaggtgtcctctgataaaaaaacatggccgttagtacgtttggctccatttccaacttctgaccattaccttgttggaccaatggcttgcacacctgagcgtggcggattgaaagttactttctcggaatggagtctcacagctcctttaggaaaagctttacatgatttgagttag

SEQ ID NO: 5728 - DNA, 597 bp, Artificial Sequence
  Description of Artificial Sequence: Synthetic polynucleotide
atggtcgaatctaagaatactgaattatctcaaggaacatggctcaataagccaaaatctgtttttcaagaggcaggaaaagtcactttggaaacagatgaaaaaactgacttttggcgtgaaacattttacggatttacccgtgatagcggtcattttttgggagtagagacaggtagtgcttttactgcacaagtccgtgttcagggaagctacgagagtctttatgatcaggctggtatcatggttcgtatagatgatggacattggctcaaagctggcatagaaatttctgatggccacgcaatgttaagcagtgttttgacaaatggaaaatctgattggtctactgctgtttatggcggaaatgctcgcgatttctggcttcgtgttactgttgaaaagggcgttttgaggattcaggtgtcctctgataaaaaaacatggccgttagtacgtttggctccatttccaacttctgaccattaccttgttggaccaatggcttgcacacctgagcgtggcggattgaaagttactttctctgaatggagtctcacagctcctttaggaaaagctttacatgatttgagttga

SEQ ID NO: 5729 - DNA, 1746 bp, Saccharomyces cerevisiae
atgacgatcatccataatcctaaatggtggaaagaagccaccgtctaccaaatttatcctgctagtttcaaggactccaacaatgacggatggggtgatttagctgggattacctccaaacttgactatgtcaaagaattaggtgtcgatgcgatatgggtgtgcccattttatgactctcctcaagaagatatgggttacgatattgccaactatgagaaggtttggccacgttacggtaccaatgaggattgtttccaaatgatagaagaagctcataagagaggtatcaaggttattgttgacctggttatcaaccactgttctgaagagcatgaatggttcaaggagagtagatcttctaaggctaatccaaagcgtgactggtttttctggagacctccaaagggttacgatgagaaaggtaatccaattcctcccaacaattggagatctttctttggtggatctgcttggagatatgacgaaaaaactggtgagttctttctgcatgtgtttgctcttggccaacctgatttcaattgggaaaatgaagagtgccgtaaagccatttatgactcctcagtgggctattggctacgtcacaacgttgatggctttcgtattgacgtaggcagcatgtattctaaggttgagggcctacccgatgctcctatcactgatcctacagttccttaccaaaaaggaactgaatttttcataaatgggccacgtatccatgagtatcataaagaaatgcataactacatgctctcgcaagttccagagggtaaagaaatcatgactgttggagaagttggtatcgggaatgaagacgacttcagagtttataccagtgccaaagaaggagaactaaatatgatgttcaacttcaagcacacctcagtaggtgaaaacccaaaatgcaagtacgaacttattccctttactttaaaagactttaagctggctcttgctgaaagctttctgtttatcgaaaacacagattgctggtcgaccatctatttggagaatcatgatcaacctcgtagcgtttcgcgttttggctcagattctcctaaatggcgtgagatttcgtccaagatgttggctactctcatcatttcattgactggtactgtttttatctaccaaggacaagaattgggtatgcccaacttcaaaaacagaaaaattgagcaaatcaaatgcgttgaaggtactggtacatatgccgccattaaacgtgattatggtgaagattctgaaaagatgaaaaagttttttgaagcattagctttgatctctagagatcatgggagaacaccattcccatggagtgctgatgagccttctgcaggtttctcgaaggatgccaaaccatggattgacatgaatgaatcatttagagacggaatcaacgcagaagctgagttaaaagataaaaactcagtcttctttttctggaaaaaggccttacaagttagaaaggagcacaaagatatccttgtttatggacataactttcagttcattgatcttgataatgacaagctattcatgtttacaaaggacacagataacaaaaaaatgtttgctgttttcaatttcagtagcgataatacggacttttcagttcctgataatgaggcctcctacaccatgttttttggcaactatgcaaactcaaatggtgattcccgcaccttgcagccatgggaaggaagactttacttgttgaagtaa

SEQ ID NO: 5730 - DNA, 1746 bp, Artificial Sequence
  Description of Artificial Sequence: Synthetic polynucleotide
atgacgatcatccataatcctaaatggtggaaagaagccaccgtctaccaaatttatcctgctagtttcaaggactccaacaatgacggatggggtgatttagctgggattacctccaaacttgactatgtcaaagaattaggtgtcgatgcgatatgggtgtgcccattttatgactctcctcaagaagatatgggttacgatattgccaactatgagaaggtttggccacgttacggtaccaatgaggattgtttccaaatgatagaagaagctcataagagaggtatcaaggttattgttgacttggttatcaaccactgttctgaagagcatgaatggttcaaggagagtagatcttctaaggctaatccaaagcgtgactggtttttctggagacctccaaagggttacgatgagaaaggtaatccaattcctcccaacaattggagatctttctttggtggatctgcttggagatatgacgaaaaaactggtgagttctttttacatgtgtttgctcttggccaacctgatttcaattgggaaaatgaagagtgccgtaaagccatttatgactcctctgtgggctattggcttcgtcacaacgttgatggctttcgtattgacgtaggcagcatgtattctaaggttgagggcttgcccgatgctcctatcactgatcctacagttccttaccaaaaaggaactgaatttttcataaatgggccacgtatccatgagtatcataaagaaatgcataactacatgctctctcaagttccagagggtaaagaaatcatgactgttggagaagttggtatcgggaatgaagacgacttcagagtttataccagtgccaaagaaggagaattgaatatgatgttcaacttcaagcacacctctgtaggtgaaaacccaaaatgcaagtacgaacttattccctttactttaaaagactttaagttggctcttgctgaaagctttttgtttatcgaaaacacagattgctggtctaccatctatttggagaatcatgatcaacctcgtagcgtttctcgttttggcagtgattctcctaaatggcgtgagatttcttccaagatgttggctactctcatcatttctttgactggtactgtttttatctaccaaggacaagaattgggtatgcccaacttcaaaaacagaaaaattgagcaaatcaaatgcgttgaaggtactggtacatatgccgccattaaacgtgattatggtgaagattctgaaaagatgaaaaagttttttgaagcattagctttgatctctagagatcatgggagaacaccattcccatggagtgctgatgagccttctgcaggtttctccaaggatgccaaaccatggattgacatgaatgaaagttttagagacggaatcaacgcagaagctgagttaaaagataaaaactctgtcttctttttctggaaaaaggccttacaagttagaaaggagcacaaagatatccttgtttatggacataactttcagttcattgatcttgataatgacaagcttttcatgtttacaaaggacacagataacaaaaaaatgtttgctgttttcaatttcagtagcgataatacggacttttctgttcctgataatgaggcctcctacaccatgttttttggcaactatgcaaacagtaatggtgattcccgcaccttgcagccatgggaaggaagactttacttgttgaagtga

SEQ ID NO: 5731 - DNA, 1710 bp, Saccharomyces cerevisiae
atgactgatcgtaaaaccaacttgccagaagaaccgattttcgaagaggcagaagatgatggctgcccttcgatagaaaattcttcacatctgtcagtacctacagtggaggaaaacaaggacttttccgagtataatggggaagaggcagaggaagttgttgttccagaaaagcctgcttcagcctatgctactgtttctatcatgtgtttatgtatggctttcggtggatttatgtccggttgggacacaggtacgatttctggtttcgtcaatcagactgattttttaagaagatttggtaattatagccattccaagaacacttactacttatctaatgtgagaactgggttgattgtgtccatcttcaatgtgggaagcgccattggctgtcttttcttgtctaaattgggtgatatttacggccgctgcatgggtttgattatagttattgtcgtttatatggttggtattgtcattcaaattgcctctatagataagtggtatcagtattttattggaagaattatcgctggtataggtgctggttccattagtgttcttgccccgatgcttatttcggaaactgcgccaaagcatatcagaggtacgttgctagcttgttggcaattgatggtgactttcgcaattttcttgggttattgtaccaattatggtaccaagacttactcgaattctgtccagtggcgtgttccgcttggtctatgttttgcatgggctattattatgattggtggtatgacgtttgttccggaatctcctcggtttttggtgcaagtcggtaagattgagcaagctaaagcttcttttgccaagtcgaacaagcttagtgttgacgatcctgctgtggttgcagagattgatcttcttgttgctggtgtggaggcagaagaagcaatgggaactgcttcatggaaggaattattttcgagaaagactaaagtttttcaacgtttaacgatgacagtcatgattaactctctgcagcaactaaccggtgacaactatttcttctactacggtactactatcttcaaatctgtcggtatgaatgactcttttgagacttcaattgtcttgggtattgtgaattttgcttcttgcttcttttcactttattctgttgataagttgggccgtcgtagatgtcttttacttggagcagccaccatgacggcgtgcatggttatttacgcctccgttggcgtcacaagactatatccgaacggtaaaagtgaaccatcatctaaaggtgctggtaattgtacgattgttttcacgtgtttttacattttctgcttttcctgcacctggggacctgtatgttatgtgattatttctgaaacatttccattaagggtgagatccaagtgtatgtccgttgcaacagcggccaacttattgtgggggttcctaatcgggtttttcactccttttattacttcggcaattaatttctactacggttacgttttcatgggttgcttagcgttttcatatttttacgtctttttctttgttccagaaacaaaaggtctaactttagaagaagttgatgagatgtggatggacggtgtattaccttggaaatctgaatcctgggtaccagcttctagaagggatggtgattatgataacgaaaaattacagcatgacgagaaacccttctacaaaagaatgttttag

SEQ ID NO: 5732 - DNA, 1710 bp, Artificial Sequence
  Description of Artificial Sequence: Synthetic polynucleotide
atgactgatcgtaaaaccaacttgccagaagaaccgattttcgaagaggcagaagatgatggctgcccttccatagaaaattcttctcatttaagtgtacctacagtggaggaaaacaaggacttttccgagtataatggggaagaggcagaggaagttgttgttccagaaaagcctgcttctgcctatgctactgtttctatcatgtgtttatgtatggctttcggtggatttatgtccggttgggacacaggtacgatttctggtttcgtcaatcagactgattttttaagaagatttggtaattatagccattccaagaacacttactacttatctaatgtgagaactgggttgattgtgtccatcttcaatgtgggaagcgccattggctgtcttttcttgtctaaattgggtgatatttacggccgctgcatgggtttgattatagttattgtcgtttatatggttggtattgtcattcaaattgcctctatagataagtggtatcagtattttattggaagaattatcgctggtataggtgctggttccattagtgttcttgccccgatgcttatttctgaaactgcgccaaagcatatcagaggtacgttgttggcttgttggcaattgatggtgactttcgcaattttcttgggttattgtaccaattatggtaccaagacttactctaattctgtccagtggcgtgttccgcttggtttgtgttttgcatgggctattattatgattggtggtatgacgtttgttccggaatctcctagatttttggtgcaagtcggtaagattgagcaagctaaagcttcttttgccaagtctaacaagcttagtgttgacgatcctgctgtggttgcagagattgatcttcttgttgctggtgtggaggcagaagaagcaatgggaactgcttcttggaaggaattattttccagaaagactaaagtttttcaacgtttaacgatgacagtcatgattaactctttgcagcaattgaccggtgacaactatttcttctactacggtactactatcttcaaatctgtcggtatgaatgactcttttgagacttctattgtcttgggtattgtgaattttgcttcttgcttcttttccctttattctgttgataagttgggccgtcgtagatgtcttttacttggagcagccaccatgacggcgtgcatggttatttacgcctccgttggcgtcacaagattatatccgaacggtaaaagtgaaccatcttctaaaggtgctggtaattgtacgattgttttcacgtgtttttacattttctgcttttcctgcacctggggacctgtatgttatgtgattatttctgaaacatttccattaagggtgagatccaagtgtatgtccgttgcaacagcggccaacttattgtgggggttcttgatcgggtttttcactccttttattacttctgcaattaatttctactacggttacgttttcatgggttgcttagcgttttcttatttttacgtctttttctttgttccagaaacaaaaggtttgactttagaagaagttgatgagatgtggatggacggtgtattaccttggaaatctgaatcctgggtaccagcttctagaagggatggtgattatgataacgaaaaattacagcatgacgagaaacccttctacaaaagaatgttttga

SEQ ID NO: 5733 - DNA, 996 bp, Saccharomyces cerevisiae
atgctgatgccaaagtcagttgcattactcagaataagatacactttggaagccgctctggcaagaggtttcacaacagtgagagactgtgggggtgcagaaggctttctgaaagcagagattcgtcagggatccttgaatggtcccagattaattacgtgtggacatgccatttcccaaactggtggtcatggcgatctgagatctggtgccctacctgctagtgcctttgacagctgttcatgccactttggtcaagttggtgttgtagcagatggtgttcccgaatgctacaaagcggccagagaagagtttagaagaggtgcagactttattaagattatgggtggtggaggtgtggcctctccaactgacaaaatatcaaacaaacaattttgcgacgacgaaataaaagcacttgtagatgtcgcaaatagttaccacacatacgtaacagcacacgcctacactgcggaagcgatacaaaattgtatcaagttaggtgttaagggtatcgaacacggaaacttattagatgaacgtaccgcagagcttatggcagaattgggttgctacttgactccaacactagttacctacaaagtgatgggttctgatcaatttagtgcattcttgggacctgaaaatagtagaaaaaatacagaggtgctttacaaaggaattgatgcaatgaaaattgcccagaaaaaaaaagttaaaatttgttttggttcagatttattgggtcctctatatggttatcaaacgcaagagtttcgtattagagggaaagttcaaacgacacaagagattttgctctcagcaactgttactcctgccgaaatgaacggattaggcgataaattgggacagattaagccagggttcattgctgacctactgatgatgaaatcaaatccgttggacgatataacgattttggatgaacccgagagcaacatactatttgtcatgaaagagggaaggatatattga

SEQ ID NO: 5734 - DNA, 996 bp, Artificial Sequence
  Description of Artificial Sequence: Synthetic polynucleotide
atgttaatgccaaagtctgttgcattactcagaataagatacactttggaagccgctttggcaagaggtttcacaacagtgagagactgtgggggtgcagaaggctttttgaaagcagagattcgtcagggatccttgaatggtcccagattaattacgtgtggacatgccatttcccaaactggtggtcatggcgatttgagatctggtgccttgcctgctagtgcctttgacagctgtagttgccactttggtcaagttggtgttgtagcagatggtgttcccgaatgctacaaagcggccagagaagagtttagaagaggtgcagactttattaagattatgggtggtggaggtgtggcctctccaactgacaaaataagcaacaaacaattttgcgacgacgaaataaaagcacttgtagatgtcgcaaatagttaccacacatacgtaacagcacacgcctacactgcggaagcgatacaaaattgtatcaagttaggtgttaagggtatcgaacacggaaacttattagatgaacgtaccgcagagcttatggcagaattgggttgctacttgactccaacattagttacctacaaagtgatgggttctgatcaatttagtgcattcttgggacctgaaaatagtagaaaaaatacagaggtgctttacaaaggaattgatgcaatgaaaattgcccagaaaaaaaaagttaaaatttgttttggttctgatttattgggtcctttatatggttatcaaacgcaagagtttcgtattagagggaaagttcaaacgacacaagagattttgctctctgcaactgttactcctgccgaaatgaacggattaggcgataaattgggacagattaagccagggttcattgctgacttattgatgatgaaatctaatccgttggacgatataacgattttggatgaacccgagagcaacatattgtttgtcatgaaagagggaaggatatattga

SEQ ID NO: 5735 - DNA, 2400 bp, Saccharomyces cerevisiae
atgagtaccatttatagggagagcgactcgttggagtcggagccctcgccaacgccaacaaccattcctatccagatcaatatggaagaggaaaagaaagatgctttcgttaagaatattgacgaggacgtcaataatctcactgcgactactgatgaggaggaccgcgatccggaaagccaaaaattcgacaggcattccatacaggaggaaggtctcgtttggaagggcgaccctacatacttgcccaattctccatatcctgaagtgagatcggcggtgtccatcgaggatgaccccaccatccgcctcaaccactggagaacgtggttcttgaccacggtgtttgtggtagttttcgccggtgttaatcaatttttttccctgagatatccatcgctagagatcaacttccttgttgcacaagttgtttgctacccaattggtaggatactggctctcttgcccgactggaagtgttctaaagtgccatttttcgatttaaacccgggcccatttaccaaaaaggaacacgccgtggtcacaattgccgtggcgcttacttcctctactgcatacgctatgtacattttgaacgcccagggaagcttttacaacatgaaacttaatgtcggatatcagttcttgttggtttggacatctcaaatgattggttatggtgctgcaggtcttaccagaagatgggtcgtcaaccctgcaagctctatctggcctcagactttaatttcagtgtccttgtttgattcgttgcactcgagaaaagttgaaaagacagtcgcaaatggttggacgatgccccgttacaggttcttcttaatcgtccttatcggatcgttcatctggtattgggtacctggattcctctttaccggtctgtcctatttcaacgttatcctatgggggtcgaagacaagacacaatttcatcgctaacacaatctttggtactcaaagtggtctcggtgcgttgccaattacatttgactacacccaggtttcccaagccatgtccggctctgttttcgccacaccattctacgtctccgccaacacctatgcatcagtgttgatattcttcgtcatagtgctgccatgtctttattttacgaatacctggtatgccaaatacatgcccgtcatttcaggttctacttatgacaacactcaaaacaaatacaacgtaacaaagattcttaacgaggattattccattaatcttgagaaatataaggaatactcaccggtattcgttccattttcctatcttttgtcgtatgctttaaattttgccgctgttatcgccgtttttgtccactgcatcttataccacggtaaagatattgtcgccaagtttaaagaccgtaaaaatggtggcactgacattcacatgagaatctactccaagaactataaggattgtcccgattggtggtatttacttttgcagattgtcatgatcggtttaggatttgtagcagtgtgctgtttcgatactaagttcccagcttgggcatttgttattgcaatattaatttcccttgtaaatttcatcccgcaaggtatcttggaagcaatgactaaccaacacgtaggtttgaatattatcacagaattgatctgcggttatatgctgcctttaagaccaatggcaaacttattattcaagctatacggatttattgtcatgagacaaggcttgaatttgagtagagatttgaaattagccatgtacatgaaggtttcccctcgtttgatctttgccgttcaaatctatgccactatcatatcaggcatggttaacgttggtgtccaggaatggatgatgcataatatcgatggcttatgtaccaccgatcaaccaaatggcttcacttgtgctaatggtcgcacggttttcaatgcttccattatctggtctttgccaaagtatcttttctcatcagggcgcatttataatccgctgatgtggttcttcttgattggtttgctattcccactagccgtttatgctgttcaatggaaattccctaaatttaaatttgctaagcacattcatactcctgtatttttcacaggcccaggtaatattccaccaagcacaccttataactactcattattttttgcaatgtcattctgcctaaacttgataagaaaaagatggagagcttggttcaataagtacaatttcgtcatgggggccggtgttgaagcaggtgtggcaatctccgtcgtcatcatcttcttgtgtgtacagtacccaggtggtaagctcagctggtggggaaacaacgtttggaaaagaacgtatgataatgattataaaaaattttataccttaaagaaaggtgagacatttggttatgataaatggtggtaa

SEQ ID NO: 5736 - DNA, 2400 bp, Artificial Sequence
  Description of Artificial Sequence: Synthetic polynucleotide
atgagtaccatttatagggagagcgactctttggagagtgagccctctccaacgccaacaaccattcctatccagatcaatatggaagaggaaaagaaagatgctttcgttaagaatattgacgaggacgtcaataatctcactgcgactactgatgaggaggaccgcgatccggaaagccaaaaattcgacaggcattccatacaggaggaaggtctcgtttggaagggcgaccctacatacttgcccaattctccatatcctgaagtgagatctgcggtgtccatcgaggatgaccccaccatccgcctcaaccactggagaacgtggttcttgaccacggtgtttgtggtagttttcgccggtgttaatcaatttttttccttgagatatccatctttggagatcaacttccttgttgcacaagttgtttgctacccaattggtaggatattggctctcttgcccgactggaagtgttctaaagtgccatttttcgatttaaacccgggcccatttaccaaaaaggaacacgccgtggtcacaattgccgtggcgcttacttcctctactgcatacgctatgtacattttgaacgcccagggaagcttttacaacatgaaacttaatgtcggatatcagttcttgttggtttggacatctcaaatgattggttatggtgctgcaggtcttaccagaagatgggtcgtcaaccctgcaagctctatctggcctcagactttaatttctgtgtccttgtttgattctttgcactccagaaaagttgaaaagacagtcgcaaatggttggacgatgccccgttacaggttcttcttaatcgtccttatcggaagtttcatctggtattgggtacctggattcctctttaccggtttatcctatttcaacgttatcttatgggggtccaagacaagacacaatttcatcgctaacacaatctttggtactcaaagtggtctcggtgcgttgccaattacatttgactacacccaggtttcccaagccatgtccggctctgttttcgccacaccattctacgtctccgccaacacctatgcatctgtgttgatattcttcgtcatagtgttaccatgtctttattttacgaatacctggtatgccaaatacatgcccgtcatttctggttctacttatgacaacactcaaaacaaatacaacgtaacaaagattcttaacgaggattattccattaatcttgagaaatataaggaatactctccggtattcgttccattttcctatcttttgagttatgctttaaattttgccgctgttatcgccgtttttgtccactgcatcttataccacggtaaagatattgtcgccaagtttaaagaccgtaaaaatggtggcactgacattcacatgagaatctactccaagaactataaggattgtcccgattggtggtatttacttttgcagattgtcatgatcggtttaggatttgtagcagtgtgctgtttcgatactaagttcccagcttgggcatttgttattgcaatattaatttcccttgtaaatttcatcccgcaaggtatcttggaagcaatgactaaccaacacgtaggtttgaatattatcacagaattgatctgcggttatatgttgcctttaagaccaatggcaaacttattattcaagttgtacggatttattgtcatgagacaaggcttgaatttgagtagagatttgaaattagccatgtacatgaaggtttcccctcgtttgatctttgccgttcaaatctatgccactatcatatctggcatggttaacgttggtgtccaggaatggatgatgcataatatcgatggcttatgtaccaccgatcaaccaaatggcttcacttgtgctaatggtcgcacggttttcaatgcttccattatctggtctttgccaaagtatcttttctcttctgggcgcatttataatccgttaatgtggttcttcttgattggtttgttattcccattggccgtttatgctgttcaatggaaattccctaaatttaaatttgctaagcacattcatactcctgtatttttcacaggcccaggtaatattccaccaagcacaccttataactactctttattttttgcaatgagtttctgcttgaacttgataagaaaaagatggagagcttggttcaataagtacaatttcgtcatgggggccggtgttgaagcaggtgtggcaatctccgtcgtcatcatcttcttgtgtgtacagtacccaggtggtaagctcagctggtggggaaacaacgtttggaaaagaacgtatgataatgattataaaaaattttataccttaaagaaaggtgagacatttggttatgataaatggtggtga

SEQ ID NO: 5737 - DNA, 816 bp, Saccharomyces cerevisiae
atgtctcgagttgcacagctcgactcgatagcgcttgataaagaattgtatggacagttttggtccgagttcaatgcagcattcaatacgagtgaacacaaagaggaatgggagttggcactgaacacagttgtgtttatgtgcgcgacgaggttcctgccacactatggctctagctgtacgtatggatccgcactcagtggcgtggtttttcagtgcaggaaacgcaccttgtatgtcgtcactgtcttggcagggtacgtgtggaagaagatcacacatattatttttaatgggccgcactgtgggaaccagatgatgtggctgaagctgtacaaatgggttaatttattgtatcacggctgtgatgtaaccaacttcctgaggtttctagcagcggaagggcccaatgcgagggcgtttttgtcgccgttataccgggcttttaatgtccattccacaaggttgattcgggatggttctgcaattgcctctgaattttattcgaactctgtattcgctgggttagaataccagaatagacaattgctatggaatgcactattagaactcttttccaatacactacttacgaaaagaggactcttgacctttgttaaaaaaccaccaaggtctcgttctacgactacttataagacagtttgcccccgttgcggcggttttccaaccaacccataccagatcgcttgttgtcgtgcgaactactgttacgtgtgcgttgtaaaggcgttggagtggtctatgtgcgatgcctgtggatcctctgggagactgaccgcctcaccagtgtactaa

SEQ ID NO: 5738 - DNA, 816 bp, Artificial Sequence
  Description of Artificial Sequence: Synthetic polynucleotide
atgtctagagttgcacagctcgacagtatagcgcttgataaagaattgtatggacagttttggtccgagttcaatgcagcattcaatacgagtgaacacaaagaggaatgggagttggcattgaacacagttgtgtttatgtgcgcgacgaggttcttaccacactatggctctagctgtacgtatggatccgcactcagtggcgtggtttttcagtgcaggaaacgcaccttgtatgtcgtcactgtcttggcagggtacgtgtggaagaagatcacacatattatttttaatgggccgcactgtgggaaccagatgatgtggttaaagttgtacaaatgggttaatttattgtatcacggctgtgatgtaaccaacttcttgaggtttttggcagcggaagggcccaatgcgagggcgtttttgtctccgttatacagagcttttaatgtccattccacaaggttgattagagatggttctgcaattgcctctgaattttattccaactctgtattcgctgggttagaataccagaatagacaattgttatggaatgcattattagaactcttttccaatacattgcttacgaaaagaggactcttgacctttgttaaaaaaccaccaaggtctcgttctacgactacttataagacagtttgcccccgttgcggcggttttccaaccaacccataccagatcgcttgttgtcgtgcgaactactgttacgtgtgcgttgtaaaggcgttggagtggtctatgtgcgatgcctgtggatcctctgggagattgaccgcctctccagtgtactga

SEQ ID NO: 5739 - DNA, 1965 bp, Saccharomyces cerevisiae
atgtttttacctcgtctcgttcggtacaggaccgagaggtttataaaaatggtacctaccaggaccttgcgacgaatcaaccacagcagcagggatccaattcaaaaacaggtcttggcccttatcaaagcaaatgcgaatttaaatgacaatgacaagttgaaaatacggaaatattggtctgacatggcggactacaaaagtcttcggaaacaagaaaatagcttactggaaagctctatattacacgaggtcaagatcgaagatttcatcagtttcatcaatcgcacaaaaacctcatctatgactacaagaggaatttatagaagagaatgtttgtaccaatgcaagaaaaacttggatctagtcaatcaagtggtctcccaagtttcatccgtaagacatcaaaagcccttgactacgcaattggatactatgcgctggtgtgttgatgatgccatcggcacaggagacatagttatggctgccgaccttttcctgctgtactacagattatttacagatgataaaaagctagacgaacaatatgctaagaaaataatatcagtattagcgtacccaaacccactgcatgatcatgttcatctagtcaaatatttacaactgaactctctgttcgaaagtataaccggaggcggaataaagttaacgaggtttcaattagaaactctttctaataaggccctcggcttaagtaatgaagccccgcaattatgcaaggctatactgaacaaactgatgaatataaactattctttgactaacgatttgaagcttcgggatgatcaagtgctgcttgcgtacaagtccattgatgaaaattatagaagaggaaatgttgcaagtgtgtattctatttggaacaaaatcaaagagcactatgtttccatttctgcacatgattccagaatcatttataaagtcttcaagatttgtacccataatagagcctatagatctatatgtagcgaaatgttttggcaattaactccagagtactattgtaataaccctttgatattaccggcaattattgacttcattacaaagcaagactctttaacaatggccaaggaactcatgcagaacattaacagatacactttacccgaaaaccatcatattgtctggcttaacaagagatgtctttcttcattgctaagaatgcatttgaaatttaacgattctaacggtgtagatagggttttgaagcaaataacaacaaatttcagggcgctttcgcaagaaaattatcaagcaataattattcaccttttcaaaacacaaaacctcgatcatatcgctaaggcagtcaaattactcgatactataccccccggacaagcaatgttagcctatgggtcaataattaacgaagtagttgattggaaattggcttcaaaggtcaagttcaccgataatttgatggcacttgtaaacgatttgttgacgaaggcacatgattttgatcctgaccacagaaactctctttggaatgtggtttccgctttatacattaaaaaactttgtcattataaaaagcgagatggtaaatttgttgccaatgccaagaaggatatcgatttggcaaaactactttatataaatgctgcaaagagaagtaaaacatactggacaaaatcgaactgtaacccattcattgcatcctccccatgtgatgtcaaattaaaagtgaataatcaaaacaggtttactattttaaggaatattgcattaagcgcactgcagataggaagaacagacatttttctttgggcgtgcgcagaactataccagaacggtatgacgattgaggaattgaagttagactggaatttcatcttaaaacatcaaattagaaattcagagttcaaaacaaacaaggagatcatacaagatattaaaaagcatggtgtgtcggctgtcaaacgttacttaagatga

SEQ ID NO: 5740 - DNA, 1965 bp, Artificial Sequence
  Description of Artificial Sequence: Synthetic polynucleotide
atgtttttacctcgtctcgttagatacaggaccgagaggtttataaaaatggtacctaccaggaccttgagaagaatcaaccacagcagcagggatccaattcaaaaacaggtcttggcccttatcaaagcaaatgcgaatttaaatgacaatgacaagttgaaaataagaaaatattggtctgacatggcggactacaaaagtcttagaaaacaagaaaatagcttattggaaagctctatattacacgaggtcaagatcgaagatttcatcagtttcatcaatcgcacaaaaacctcttctatgactacaagaggaatttatagaagagaatgtttgtaccaatgcaagaaaaacttggatttggtcaatcaagtggtctcccaagtttcttccgtaagacatcaaaagcccttgactacgcaattggatactatgcgctggtgtgttgatgatgccatcggcacaggagacatagttatggctgccgaccttttcttattgtactacagattatttacagatgataaaaagttggacgaacaatatgctaagaaaataatatctgtattagcgtacccaaacccattgcatgatcatgttcatttggtcaaatatttacaattgaactctttattcgaaagtataaccggaggcggaataaagttaacgaggtttcaattagaaactctttctaataaggccctcggcttaagtaatgaagccccgcaattatgcaaggctatattaaacaaattaatgaatataaactattctttgactaacgatttgaagcttagagatgatcaagtgttgcttgcgtacaagtccattgatgaaaattatagaagaggaaatgttgcaagtgtgtattctatttggaacaaaatcaaagagcactatgtttccatttctgcacatgattccagaatcatttataaagtcttcaagatttgtacccataatagagcctatagatctatatgtagcgaaatgttttggcaattaactccagagtactattgtaataaccctttgatattaccggcaattattgacttcattacaaagcaagactctttaacaatggccaaggaactcatgcagaacattaacagatacactttacccgaaaaccatcatattgtctggcttaacaagagatgtctttcttctttgttaagaatgcatttgaaatttaacgattctaacggtgtagatagggttttgaagcaaataacaacaaatttcagggcgctttctcaagaaaattatcaagcaataattattcaccttttcaaaacacaaaacctcgatcatatcgctaaggcagtcaaattactcgatactataccccccggacaagcaatgttagcctatgggtccataattaacgaagtagttgattggaaattggcttccaaggtcaagttcaccgataatttgatggcacttgtaaacgatttgttgacgaaggcacatgattttgatcctgaccacagaaactctctttggaatgtggtttccgctttatacattaaaaaactttgtcattataaaaagagagatggtaaatttgttgccaatgccaagaaggatatcgatttggcaaaattactttatataaatgctgcaaagagaagtaaaacatactggacaaaaagtaactgtaacccattcattgcatcctccccatgtgatgtcaaattaaaagtgaataatcaaaacaggtttactattttaaggaatattgcattaagcgcattacagataggaagaacagacatttttctttgggcgtgcgcagaattataccagaacggtatgacgattgaggaattgaagttagactggaatttcatcttaaaacatcaaattagaaattctgagttcaaaacaaacaaggagatcatacaagatattaaaaagcatggtgtgtctgctgtcaaacgttacttaagatga

SEQ ID NO: 5741 - DNA, 990 bp, Saccharomyces cerevisiae
atgtgcagtaggatactcttgtccggtttagtcggactgggtgctggtactggcttaacctatcttcttttgaacaaacattctccaacgcaaatcattgagacaccttatccacctacccagaaacctaatagtaatattcaatctcactctttcaacgtcgatccttccgggttcttcaagtatggttttcctggtccgattcatgatctgcagaaccgcgaagagtttatctcatgttacaacagacaaactcaaaatccttattgggtcctcgaacatataacgccagaatcattggctgcaaggaatgctgacagaaaaaattcctttttcaaggaagatgaagtaattccagaaaagtttagaggtaaactaagagactattttaggtcgggctatgatcgaggccatcaagccccagctgcagacgcaaaattttctcaacaggccatggatgatacattctacttatccaatatgtgtcctcaagtaggagaaggttttaatagagactattgggcgcatttggagtacttttgtaggggattgactaagaaatataagagtgtaagaatcgtgactggtccattgtatctacccaaaaaggatcccatagataataaatttagggttaattatgaagttattggcaatccacccagtattgctgttccaacgcacttttttaaattgattgttgcagaagcaccaacagccaatcctgctagagaggatattgctgtcgcggcatttgtattgccaaacgaaccgatatcaaatgagacgaaattgactgactttgaagttcctatagatgctttagagagaagtactgggctagaacttctgcaaaaagtaccaccttcaaagaagaaggcattatgcaaagaggtaaattgtcaaattgtagtgagagatttctctaacgcggcgatcaaacaatcgaaagatgtgaaattgttacctcctccaaaaaaaaggaattga

SEQ ID NO: 5742 - DNA, 990 bp, Artificial Sequence
  Description of Artificial Sequence: Synthetic polynucleotide
atgtgcagtaggatactcttgtccggtttagtcggattaggtgctggtactggcttaacctatcttcttttgaacaaacattctccaacgcaaatcattgagacaccttatccacctacccagaaacctaatagtaatattcaatctcactctttcaacgtcgatccttccgggttcttcaagtatggttttcctggtccgattcatgatttacagaaccgcgaagagtttatcagttgttacaacagacaaactcaaaatccttattgggtcctcgaacatataacgccagaatctttggctgcaaggaatgctgacagaaaaaattcctttttcaaggaagatgaagtaattccagaaaagtttagaggtaaattgagagactattttaggagtggctatgatagaggccatcaagccccagctgcagacgcaaaattttctcaacaggccatggatgatacattctacttatccaatatgtgtcctcaagtaggagaaggttttaatagagactattgggcgcatttggagtacttttgtaggggattgactaagaaatataagagtgtaagaatcgtgactggtccattgtatttacccaaaaaggatcccatagataataaatttagggttaattatgaagttattggcaatccacccagtattgctgttccaacgcacttttttaaattgattgttgcagaagcaccaacagccaatcctgctagagaggatattgctgtcgcggcatttgtattgccaaacgaaccgatatccaatgagacgaaattgactgactttgaagttcctatagatgctttagagagaagtactgggttggaacttttacaaaaagtaccaccttctaagaagaaggcattatgcaaagaggtaaattgtcaaattgtagtgagagatttctctaacgcggcgatcaaacaaagtaaagatgtgaaattgttacctcctccaaaaaaaaggaattga

SEQ ID NO: 5743 - DNA, 6045 bp, Saccharomyces cerevisiae
atggcaaaccgatccctcaagaaagtgatagaaacatcatcaaacaatggtcacgatttattaacttggataaccaccaatttggaaaagcttatatgtttgaaagaagttaatgataatgaaatacaggaggttaaggaaatacacactcaactggatgagtttgtgaggtatatctccgtactagaaaatacggatgatttagaactgcattcagtgtttatcagtttgtctcagctctatacgatttccatatggcgtttgaaggacgaatatcctggtgtagtttttgattccgcagcattcttaacaaacgtattgtgtgaagaagatgtatccattgatgatggagataccgaccctaaccaaaagaaaaaaaagaagaagtcaagtacaaaaaaaaaaaagtacatatactcaccggcaaaagatatcgcatgtaccatacttgttcaattatttgaaaattttggaagtagcatctcttccttaatcccattgttatttaatgctattttcaaaaacctgaaaaaaattatggagaaaagtaaatattatcatgctaccttcatgacaacccttcttcagctttttaatgcgattctaagaaattccaataatgatgataaaatccttgatccagccacatatgcgaaattttcgaaactatccaaaaccgtttttgacagtatttccactgatgagaaggacttttcagttacttttgtgtctgtcctaattgaatgctggacagctcatttcaaacaaactaattttatcagagagcactcccatgatattatagagaccatatattctagatttaccgaaggtgaaataggtgtttatggttttgcaaacgacgaaactcgtatctttaccgcaaaatctttagcggagatattatttgattattacttttctaaaaatattttaactctacaagaagtatggtccatctacgttaagatattcttaaactgtgatacacgagacgtggaaagtggttgcttcgaatctattattcatttgataaacttgaatttattagctgacaacacttttttgagtaactcaaaatatttggatatagttctctctttaagcggcgtcttcagcagttacgaagtgaataataggagcatgaatacattatcaaggtatttgagatactttcaacatatgcatgaagtaatattgccacatttgaatgattctgcaaagactcaaatgttgtactacatcctaggttgttctgatacttaccagagctcctctaaaagtgattcagcttcaaatttcaaatatagtattgatgcgaagcctgaaacacagtggcttacattactgcagcttgacttcacgtatgtgttaatcagcgacttaggttctactttcaccactgaggaaaataccgttaaagagattagagataaactggttgatttagctacatgtgaaatctttacgatacgagttcacactgtggaaattttgaaggtttttttgaacaactgtccagaatatctttcggagaccattgaaaactccttacgtgcactatccactgattttaaatctacaggaaaatttatttttcataaaaatcatggccatgcttttataatagcaaatctaatcaaaggtgccgagagcgattatatttcctatgagttgatcatgagaattacagtgttttctacatcattcattaagaataatactacatctacctcttctaatttgtacttcaagggtcttttatgctggatattattgataggattgatgaattataaagatgaacagtatttgaagctgcagataccccaactatttcttttctggaaagttttattaacacatacctacacataccacgacgaggatgaattatacaagaacctagaaatccgaaatcatgcattgacttgtttattgacgtatttaagcaatacgacaattgataaagaaatggctaaacaagtatcatatttgctaactaagtgctccaattttaatcattccattgacctgaaatcgaaaaacattgacaatgctttactgcataatgaaaacagaattttacaggtataccttaagctggagaaatacataaatagcgattttaatagttctttactaatattaatcgtgaagaatttttcagatcccaatctttacaccgagtcaagtagttccgttttgggaagcttgaaagatattggtaacaggaaagtgagtaacaaggacgacatggaaagtaatatagtattagaatcttcaattaatactttacttcgtcaaaacaacggctttgcattcggcctatccagcaaaataactggggaccgtatcgtgaatttatcgatgtccagtgcttacaagtatgatgaatcaataagtggaagttggccatccaaggattacaattggtacaatattttcgaagtagaagtatcaaaaccaatttcacccattttatctttagattcactgattctactatatggatctgggtcttattcccaaattgaccgctacgcacctcaggtcactacatctttaatcgactcttctatggaacttttttcatctgtattcccttttttgaatagcaaaatacagtattccattatggaaactttaaatttgtccatgttctccaaaatgactacaccattgagaagcgtggctgtggctgctaatgtttgtagtgctctgcataatgctttacgcatcatgcaagaaaacaatctagagttggactattcagtggggcagctaattatcgaatcaataaagaagattcagttttttaatgacatttttctcacaaaaatcaaggcagattgtgtaggattgctgacagcggctatcgcaagaacacttggcgatgaagaaagacaaaaattccttacagagcaatcaagaatattcattaaaaacgtcgcagatatggacgaaccatacttaaggatgtttcatgtcttatcattggctacaatttttaaatataactcacaatatgctaattttgaagaatactttgatgtaatttttgcattaatgagggatccacaccctgttgttcattcatggtcattgaaagcaatgcatattcttcttgagaaacatttagtgattgatttaaagacggcagctctgttgctaagttctatggaagagcttttggtccaggataagtatggtatttacggacgctctactcttcgctgtaactataatagggactttaattctcacgtagcaatcggtgaaatttcaaggacattgactgaaactgtggggccaaattttctagaacttaacaccaaggttcttgattcgttcagaaacattacactctccatgttaatttcaaataatattctcaacagcataaccagcattaaaatgtttgaaaacatagctacttttaaaatgaaaaacattctaaactatgaaatctttattcttgcttctaagagcataattaaaagttcaatagtgactggaataggctcatcatattttgacactacattcacgggctcaaatgaactcatttctcgaacttcaagtctgaaaggcgcctttgaaaactttgatttattgacgttgttgtacaaattacagatggaggaatttttcatgaaagaaatggaaaatttgagctggagatatctcgcactttttccaaattccggttctgtcaagaattattttaccgaatggatattacatactttcaaaagagataatcattggttcgataaattatactcaatatttaatatgagtttaggaagactcttccaaagctataacagagacgtttcagccctactagaggtaaatggcctaaaaaaatcttcagaaaaggaaattaaaggcgaagaagaagaatcaatagcgaatgttaaccaactgactgacacagatgctggtggtctcgactctgagaacctgcaatggaagagcagacagattatcttaaatttaatattaatgttgtgcttagaatccgaaaaatatgaaaatctgctccttgccctcagcaacaaaattgcagatctcattaaaatatcatttcgtggatctacagtgaggaatgaaggcatgaagttaacgggactacacattttgaattttgttctcaagaactactccaccatgagagatcctcaggttcctggatcgtcgattttagaacagcaagaggcccaaataactagcgcattaatgcctgcttttagtaaaggaagctcacctactgtaatgtcctttgctattactgttgctgctgaagtgttggcatcgaatataatgccaccagataaattgggaagaatttcacaattactaattgaccttcttggtaactttaaagatcctaattccggtatacggataggggaagctataatcgttacacccaaagcgaaaagaaaaattgaacttgccgttttggatgcgtgggctgaggtagtgcaaagatccatcacgtcgtcaaatgatgcgcttttctcttttaccaggaaatattggagcattttagtcccattatggatcatttctttacgtgaatacatgatgataaagtataacgataatgattctactgtgcaagtaaagaatgactcgaaagaaaatagtctcattgaaccaagaagtacgaaaattgagttatatgaaccggtctggttaaatttcgtagaggcccttgggtgcactctggattcagacgttcaagtcattttggcatctcttaacgatgaggaattagagtattttctttttattttatttagccaatgtttggaggctatcgtcaaaaatattgatgatcattcagtcaagatgcaagttttaccggctttacacaatgttttgaagagcaatctgtgcataaaaagtatatttgaggatgatattattactgaagttgttgagattatggacagactgatttctacaggcgacagtaaagaagaatttttgcttgttgatatcatcagtgacttgatcattgggtattcgaagtgtaatgctactcctgaaacatttctacaagatattgacaaactatatgagctactgcgactactgatgacaattatttctgagaggttgccatttattaagtataacgtgcttaccagcgaagaagatgataatgaaataaaaatctctcccacagatattagtctgttgaaaaaaacatttattgcgttcgaatcaaatatcagtaacttcgacaatatgttcaaagtagatctttattcatgtcttttattcatcatagggaaaatttatgaatgtagtcatcgtgaagtaataattccaatcatactcccacttttcaaggcactagtaaaagcgcttacggaatctgaggacgaaaaaaatattgtgttactagaaatattctacgggtcaataaaagatgttatttatcataagctggattcaaagaataaagttgcaaccattttgatcttgctgtctaatggatactctaagctaagttttcaggaactgaatcagtgcgcaaatattctctcggaggcattgaataatcctgctacgcagccaattgctctacaaggcttcaagagaataatatctaatattttcaaatacccgttgttgcagtattttatgaagttggttataaaaagattctttcaagatattcaaacaaacgattccttatcgcaggcaagcattaaaactaagttgataattcagttttccgaggaagtaatcaaacaagatcaccaaaaggcatcattgtcaattgctttatgtctttctttctttgccgcatatcatagcgcatatacagagaaaatagacaacgaagtagcaagtggcatagttgctttggctaaattggacaaaaattcatttaaagaagccatttctagcactataagtcctcaacaaaaagcaattataggttccgtgatggaggcatacgttaaatcgcagtctttgggctctgtcgaagaggcctttcaactgaaatctttcgactaa

SEQ ID NO: 5744 - DNA, 6045 bp, Artificial Sequence
  Description of Artificial Sequence: Synthetic polynucleotide
atggcaaacagatccctcaagaaagtgatagaaacatcttccaacaatggtcacgatttattaacttggataaccaccaatttggaaaagcttatatgtttgaaagaagttaatgataatgaaatacaggaggttaaggaaatacacactcaattggatgagtttgtgaggtatatctccgtattggaaaatacggatgatttagaattacattctgtgtttatcagtttgtctcagctctatacgatttccatatggcgtttgaaggacgaatatcctggtgtagtttttgattccgcagcattcttaacaaacgtattgtgtgaagaagatgtatccattgatgatggagataccgaccctaaccaaaagaaaaaaaagaagaagagtagtacaaaaaaaaaaaagtacatatactctccggcaaaagatatcgcatgtaccatacttgttcaattatttgaaaattttggaagtagcatctcttccttaatcccattgttatttaatgctattttcaaaaacttgaaaaaaattatggagaaaagtaaatattatcatgctaccttcatgacaacccttcttcagctttttaatgcgattttaagaaattccaataatgatgataaaatccttgatccagccacatatgcgaaattttccaaactttccaaaaccgtttttgacagtatttccactgatgagaaggacttttctgttacttttgtgtctgtcttgattgaatgctggacagctcatttcaaacaaactaattttatcagagagcactcccatgatattatagagaccatatattctagatttaccgaaggtgaaataggtgtttatggttttgcaaacgacgaaactcgtatctttaccgcaaaatctttagcggagatattatttgattattacttttctaaaaatattttaactttacaagaagtatggtccatctacgttaagatattcttaaactgtgatacaagagacgtggaaagtggttgcttcgaatctattattcatttgataaacttgaatttattagctgacaacacttttttgagtaactccaaatatttggatatagttctctctttaagcggcgtcttcagcagttacgaagtgaataataggagcatgaatacattatctaggtatttgagatactttcaacatatgcatgaagtaatattgccacatttgaatgattctgcaaagactcaaatgttgtactacatcttgggttgttctgatacttaccagagctcctctaaaagtgattctgcttctaatttcaaatatagtattgatgcgaagcctgaaacacagtggcttacattattgcagcttgacttcacgtatgtgttaatcagcgacttaggttctactttcaccactgaggaaaataccgttaaagagattagagataaattggttgatttagctacatgtgaaatctttacgataagagttcacactgtggaaattttgaaggtttttttgaacaactgtccagaatatctttctgagaccattgaaaactccttacgtgcattgtccactgattttaaatctacaggaaaatttatttttcataaaaatcatggccatgcttttataatagcaaatttgatcaaaggtgccgagagcgattatatttcctatgagttgatcatgagaattacagtgttttctacatctttcattaagaataatactacatctacctcttctaatttgtacttcaagggtcttttatgctggatattattgataggattgatgaattataaagatgaacagtatttgaagttacagataccccaattatttcttttctggaaagttttattaacacatacctacacataccacgacgaggatgaattatacaagaacttggaaatcagaaatcatgcattgacttgtttattgacgtatttaagcaatacgacaattgataaagaaatggctaaacaagtatcttatttgttgactaagtgctccaattttaatcattccattgacttgaaatctaaaaacattgacaatgctttattacataatgaaaacagaattttacaggtataccttaagttggagaaatacataaatagcgattttaatagttctttattgatattaatcgtgaagaatttttctgatcccaatctttacaccgagagcagtagttccgttttgggaagcttgaaagatattggtaacaggaaagtgagtaacaaggacgacatggaaagtaatatagtattagaatcttccattaatactttacttcgtcaaaacaacggctttgcattcggcttatccagcaaaataactggggaccgtatcgtgaatttatctatgtccagtgcttacaagtatgatgaaagtataagtggaagttggccatccaaggattacaattggtacaatattttcgaagtagaagtatccaaaccaatttctcccattttatctttagattctttgattttattatatggatctgggtcttattcccaaattgaccgctacgcacctcaggtcactacatctttaatcgactcttctatggaacttttttcttctgtattcccttttttgaatagcaaaatacagtattccattatggaaactttaaatttgtccatgttctccaaaatgactacaccattgagaagcgtggctgtggctgctaatgtttgtagtgctttacataatgctttacgcatcatgcaagaaaacaatttggagttggactattctgtggggcagttgattatcgaaagtataaagaagattcagttttttaatgacatttttctcacaaaaatcaaggcagattgtgtaggattgttgacagcggctatcgcaagaacacttggcgatgaagaaagacaaaaattccttacagagcaatctagaatattcattaaaaacgtcgcagatatggacgaaccatacttaaggatgtttcatgtcttatctttggctacaatttttaaatataactctcaatatgctaattttgaagaatactttgatgtaatttttgcattaatgagggatccacaccctgttgttcattcttggtctttgaaagcaatgcatattcttcttgagaaacatttagtgattgatttaaagacggcagctttattgttaagttctatggaagagcttttggtccaggataagtatggtatttacggacgctctactcttcgctgtaactataatagggactttaattctcacgtagcaatcggtgaaatttctaggacattgactgaaactgtggggccaaattttttggaacttaacaccaaggttcttgattctttcagaaacattacactctccatgttaatttctaataatattctcaacagcataaccagcattaaaatgtttgaaaacatagctacttttaaaatgaaaaacattttgaactatgaaatctttattcttgcttctaagagcataattaaaagtagtatagtgactggaataggctcttcttattttgacactacattcacgggcagtaatgaactcatttctagaacttctagtttgaaaggcgcctttgaaaactttgatttattgacgttgttgtacaaattacagatggaggaatttttcatgaaagaaatggaaaatttgagctggagatatctcgcactttttccaaattccggttctgtcaagaattattttaccgaatggatattacatactttcaaaagagataatcattggttcgataaattatactctatatttaatatgagtttaggaagactcttccaaagctataacagagacgtttctgccttgttggaggtaaatggcttgaaaaaatcttctgaaaaggaaattaaaggcgaagaagaagaaagtatagcgaatgttaaccaattgactgacacagatgctggtggtctcgactctgagaacttacaatggaagagcagacagattatcttaaatttaatattaatgttgtgcttagaatccgaaaaatatgaaaatttactccttgccctcagcaacaaaattgcagatctcattaaaatatcctttcgtggatctacagtgaggaatgaaggcatgaagttaacgggattgcacattttgaattttgttctcaagaactactccaccatgagagatcctcaggttcctggatcttccattttagaacagcaagaggcccaaataactagcgcattaatgcctgcttttagtaaaggaagctctcctactgtaatgtcctttgctattactgttgctgctgaagtgttggcatctaatataatgccaccagataaattgggaagaatttctcaattattgattgaccttcttggtaactttaaagatcctaattccggtataagaataggggaagctataatcgttacacccaaagcgaaaagaaaaattgaacttgccgttttggatgcgtgggctgaggtagtgcaaagatccatcacgtcttccaatgatgcgcttttctcttttaccaggaaatattggagcattttagtcccattatggatcatttctttacgtgaatacatgatgataaagtataacgataatgattctactgtgcaagtaaagaatgactctaaagaaaatagtctcattgaaccaagaagtacgaaaattgagttatatgaaccggtctggttaaatttcgtagaggcccttgggtgcactttagattctgacgttcaagtcattttggcatctcttaacgatgaggaattagagtattttctttttattttatttagccaatgtttggaggctatcgtcaaaaatattgatgatcattctgtcaagatgcaagttttaccggctttacacaatgttttgaagagcaatttatgcataaaaagtatatttgaggatgatattattactgaagttgttgagattatggacagattgatttctacaggcgacagtaaagaagaatttttgcttgttgatatcatcagtgacttgatcattgggtattccaagtgtaatgctactcctgaaacatttttgcaagatattgacaaactttatgagttacttcgtttattgatgacaattatttctgagaggttgccatttattaagtataacgtgcttaccagcgaagaagatgataatgaaataaaaatctctcccacagatattagtttattgaaaaaaacatttattgcgttcgaaagtaatatcagtaacttcgacaatatgttcaaagtagatctttattcttgtcttttattcatcatagggaaaatttatgaatgtagtcatcgtgaagtaataattccaatcatactcccacttttcaaggcattggtaaaagcgcttacggaatctgaggacgaaaaaaatattgtgttattggaaatattctacgggtccataaaagatgttatttatcataagttggattctaagaataaagttgcaaccattttgatcttgttatctaatggatactctaagttgagttttcaggaattgaatcagtgcgcaaatattctcagtgaggcattgaataatcctgctacgcagccaattgctttacaaggcttcaagagaataatatctaatattttcaaatacccgttgttgcagtattttatgaagttggttataaaaagattctttcaagatattcaaacaaacgattccttatctcaggcaagcattaaaactaagttgataattcagttttccgaggaagtaatcaaacaagatcaccaaaaggcaagtttgtctattgctttatgtctttctttctttgccgcatatcatagcgcatatacagagaaaatagacaacgaagtagcaagtggcatagttgctttggctaaattggacaaaaattcttttaaagaagccatttctagcactataagtcctcaacaaaaagcaattataggttccgtgatggaggcatacgttaaatctcagtctttgggctctgtcgaagaggcctttcaattgaaatctttcgactga

SEQ ID NO: 5745 - DNA, 2277 bp, Saccharomyces cerevisiae
atgacgccgaaagaatctggaaagcctatttcgtgtgcaatgaagaagttgaaaggcaagagatctaagattttggttttatctagagatgcgggcaccaacgaattgaagccaacgaaaggaagagcacatcgagcttgcatagcttgcagaaagaggaaagtacgatgtagtggtaatataccatgtagactttgccagactaatagttacgaatgcaaatatgatcgccccccacggaactcatcggtatttgatagggaagtaagcgatgatagttccttatatgcacagagagcttcccacgaacgggaagatagcaagggccctataagttccattgattacaaaaaggttgtagagacgatctttccacctgaaacactccgtcaaatacttgcttcttcttcttttaacagccagaattttttggacactattaaaacgtgtctacttcaaggacaattaaatgttaatcaggtaatacgtcaaagtctaccaaaagatacgccttggcacatgcaaacaagtgttccattaccacccagagagattgccttgaaatttattcaaaagacctgggattgtgcctgtgtgctatttaggttctatcacagacctactatcatttctatcttggactcgatatacgaagcagaaaaacatggcaagcaatatactccagaacaagtgaaaacacaacctttaatttattctgttttagcagtcggagcccttttttctaaggaagatctcagcaaggatagtaaagcaactagggaattttacactgatgaaggctacagatactttttagaggccaaaaactctttggacttttctaatattactgacatctattccattcaagctatatttatgatgacgatctttttgcaatgttcagcaaacttgaaggcttgctattcgttcattggtatcgctctgcgtgctgcgttaaaggaaggtttacacaggcggtcttccatagttggtcctactccgattcaggatgagacaaaaaaaaggctcttttggtctgtgtacaaactagatctgtacatgaattgtattcttggttttccaagcggtatcgacgaatctgatatcgaccaagagtttcctctagacgtcgacgatgaaaatatatctactattggaataaagtttcaagattggcgaacgataagttcctgtggaatgaataataagcatacaaagcttattttaatcatgtctcggatctacaagctaatgtactctttgagaagaaaaccattagaagaggattctaggacgcagattgtatcgttgaacgatcaattagataattggtatgcccaattaccagatattttgaaggttgacacaatacggtatcgtcaaacgcaaccacctctaactgtttccgcaaatgatactagttctccatacactaaacctaagaaattattatatctggacttccttctatccaaaatcgtactctataaaccattctaccactatatttctatagacccgttagatatcccagagttccaatttcaaattcacatggcggaaaactgtattgaagttgccaaaaaagttattcaattatcttatgaaatgattacgcaaaaccttttgagtggtagctactggttttccattcatacaatcttttttagtgttgcttgcctcaaattttatgtctaccaaacagaaaagggcctgatacgaaatgggaaggttgattcggatattcataacgctacgcagcttggcagtgaaatattatcacttttgaagggtgcttcaaatgcgagtaaacgtacttttgaagtattgaaccaattgttcaaagagtttaacgagaagacctctgtattatctgaacaacttttgaatatagttaaattgcaacggcaagaaagtagtggagctttagtgccccagttgcagacaaataataattttacgaagtgccaaggagaattacatcatggacagcagcatcaccaaactccagccacgagtcttcgttccattctgaatcttccacaaggggaagctgatctaaagtttcagaataccaataatgagagccatacaacgacagctgcacaagaagaatacttagataaacttctagcagaatttgaggaatttgactactcaattaacagagtattacctgatgtcatcgatttttcagcactaattggccaagattcttctgccaacaatcaaatattttcctcagaattcagctctgacccaacagtaaattga

SEQ ID NO: 5746 - DNA, 2277 bp, Artificial Sequence
  Description of Artificial Sequence: Synthetic polynucleotide
atgacgccgaaagaatctggaaagcctattagttgtgcaatgaagaagttgaaaggcaagagatctaagattttggttttatctagagatgcgggcaccaacgaattgaagccaacgaaaggaagagcacatagagcttgcatagcttgcagaaagaggaaagtaagatgtagtggtaatataccatgtagactttgccagactaatagttacgaatgcaaatatgatcgccccccaagaaactcttctgtatttgatagggaagtaagcgatgatagttccttatatgcacagagagcttcccacgaaagagaagatagcaagggccctataagttccattgattacaaaaaggttgtagagacgatctttccacctgaaacactccgtcaaatacttgcttcttcttcttttaacagccagaattttttggacactattaaaacgtgtttgcttcaaggacaattaaatgttaatcaggtaatacgtcaaagtttaccaaaagatacgccttggcacatgcaaacaagtgttccattaccacccagagagattgccttgaaatttattcaaaagacctgggattgtgcctgtgtgctttttaggttctatcacagacctactatcatttctatcttggacagtatatacgaagcagaaaaacatggcaagcaatatactccagaacaagtgaaaacacaacctttaatttattctgttttagcagtcggagcccttttttctaaggaagatctcagcaaggatagtaaagcaactagggaattttacactgatgaaggctacagatactttttagaggccaaaaactctttggacttttctaatattactgacatctattccattcaagctatatttatgatgacgatctttttgcaatgttctgcaaacttgaaggcttgctattctttcattggtatcgctttgcgtgctgcgttaaaggaaggtttacacaggcgttcttccatagttggtcctactccgattcaggatgagacaaaaaaaaggctcttttggtctgtgtacaaattggatttatacatgaattgtattcttggttttccaagcggtatcgacgaatctgatatcgaccaagagtttcctttggacgtcgacgatgaaaatatatctactattggaataaagtttcaagattggagaacgataagttcctgtggaatgaataataagcatacaaagcttattttaatcatgtctagaatctacaagttgatgtactctttgagaagaaaaccattagaagaggattctaggacgcagattgtatctttgaacgatcaattagataattggtatgcccaattaccagatattttgaaggttgacacaataagatatcgtcaaacgcaaccacctttaactgtttccgcaaatgatactagttctccatacactaaacctaagaaattattatatttggacttccttctttccaaaatcgtactctataaaccattctaccactatatttctatagacccgttagatatcccagagttccaatttcaaattcacatggcggaaaactgtattgaagttgccaaaaaagttattcaattatcttatgaaatgattacgcaaaaccttttgagtggtagctactggttttccattcatacaatcttttttagtgttgcttgcctcaaattttatgtctaccaaacagaaaagggcttgataagaaatgggaaggttgattctgatattcataacgctacgcagcttggcagtgaaatattatctcttttgaagggtgcttctaatgcgagtaaacgtacttttgaagtattgaaccaattgttcaaagagtttaacgagaagacctctgtattatctgaacaacttttgaatatagttaaattgcaaagacaagaaagtagtggagctttagtgccccagttgcagacaaataataattttacgaagtgccaaggagaattacatcatggacagcagcatcaccaaactccagccacgagtcttcgttccattttgaatcttccacaaggggaagctgatttgaagtttcagaataccaataatgagagccatacaacgacagctgcacaagaagaatacttagataaacttttagcagaatttgaggaatttgactactctattaacagagtattacctgatgtcatcgatttttctgcattgattggccaagattcttctgccaacaatcaaatattttccagtgaattcagctctgacccaacagtaaattga

SEQ ID NO: 5747 - DNA, 162 bp, Saccharomyces cerevisiae
atggttcagtacgctccctttctattaggaaaattttctgatccgttattggcaattatggtaggctgtctcagctactatgtgtacgaaaggaaaatggggcgtccacaaggtcatcatttacacgagctcataaagaagcgatgggacgatcgcaaataa

SEQ ID NO: 5748 - DNA, 162 bp, Artificial Sequence
  Description of Artificial Sequence: Synthetic polynucleotide
atggttcagtacgctccctttttattaggaaaattttctgatccgttattggcaattatggtaggctgtctcagctactatgtgtacgaaaggaaaatggggcgtccacaaggtcatcatttacacgagctcataaagaagagatgggacgatcgcaaatga

SEQ ID NO: 5749 - DNA, 2523 bp, Saccharomyces cerevisiae
atggatgatctgctaaaagttcccgagattgtaaccaatattgcctcatatttatctactgtagattatctgagttttcaacaagtgaataaacgggtttatgcaatcattaacggcaaaaatgattcaaagtattggtcattgaaattgactagaatgggtctccaacaggtgcattcaaatgaagaagaagaaattacgttgctggatgaaaatgataatcaaaattcccttcgcatcttcgaaatatacaaatctttcactgctcaaaattctaaaaaaatctttgtgaaattttaccgttgttataactcatacgctaggaagctatataataataatctagcaaatttctttcctacttcatattccaacgatccgttgaaacaaacaagaattctaaattttatcaaaaagtacaatttctcgaataaaaatgatatagaaacatttactaggattgaaactaatttcaacattcttagggaaatcttcattaattctgttctcaaagagtcagaattgaattaccagtctaataatttagctgccgtcgctcgtttcatgaaaattttattgatatctaatgaggaaagcaatgctatcgaatttttcaagtcaaaggctgatttgcctcccagtttaacggttttgccgtctaatgatgaattattttgggccgaacaaccaagggaagaggacagcggtgggagtaccgtgatatttaattctaaaaatttagatacgtttctcaatcagctaagggatttcctcaacgaaaagattaaattagcggacattttattcaaagatgagttccctgtaatattacagttcatcgagtcctttatccaagatattttattagatattttaaacaatatcttattaagctatagtgaatttttaaaagaaaatggaaaggatagtaaagccaattatgaatgcgtacccgaactttatttcacatttataaaaaagtttgatactgaattaaacgactcagtaaacgcaggcgcaaatttccgtaaagttgttcgtgaccttttaaacctgtatctcgagccctttgttgtcaactatatgaatcagacaactagagtatttgaatcattgatcaactcacaattagctaattatgacacacaagttcaagacaagcagcgtgagcaaaacgcaaaaatttataacactttaaaagatcaaacggatgcttcgagtgcaagtaacaatgaattgccgaatgacctctcaataattactgaaacctccaaaactgtcccagaagcggattcaaaaccaagtacgatccatcaatcagttcattcaactgatatttctaatgataaactagactttctaagttccttcaccaagattttcaagttctcgaacaatgaaaatcaaaggctaaagcaacaactacaactagcctacaacttaaatttaatttccaataacttgcaaaacattaaatcgttaataagtctcgatttatgttacaaaattttacaggaaacaagcgaaaagacggatcaaatttacaaatttcatacgattgaaagtttgctaccattgatcaagctacgctgtcaagagattttcaaaattttaattacacaattgaataaaaatcacgttaaacctgcatttgaaaaggcaatcctgctactacaaaaatataatcctaacgaaatagaacaaatagaaataaaattcaattcactttcgccagccaatactcaagtcgaacctttagtacaattcactgaacttatcaatataggtgacataatattacaaatgatttccattttttacaagaacgaattgattcccaaaaaaattatcgataaaaataaagattttcttaatgatgttatccaattaaaaaaaaattttgagacttctatcgatgattttgtagccgaaggtttaaatatcggtataaacaaactaatggatgaaatctcatttgtattcaagactcttcaattgcctgacgattataatccaccgccaccctctaggaattctccaataagggatataaagccaaccaaatgtgctatcagggtagtcgagttactttctaatcattgctttctactgactggtgccacagacaagggtactattgacgtgtaccaacaagaaattggcgagagattctttaatgaaatcgtcaaacatctgaagaagtgcttcatatctacggagggcgcaatttggttaatctgcgatttaaattacttttacgattttattgctaacaaattaaaacaaaaaaatgttgttccctattttgttgggcttaagtctattggccagttatacatcatttcaggcaaggactcgaaagagttgggaaagcttatttctgatcttgggaaattcaatggcatttttacgcaagaggaaatttatgaatttgttcagaggagaagcgattgggttcgtgtacggaaagacgttgaaaaggtaatgtacggcctaggcatacgagattgctgcattatgtaa

SEQ ID NO: 5750 - DNA, 2523 bp, Artificial Sequence
  Description of Artificial Sequence: Synthetic polynucleotide
atggatgatttattgaaagttcccgagattgtaaccaatattgcctcttatttatctactgtagattatttgagttttcaacaagtgaataaaagagtttatgcaatcattaacggcaaaaatgattctaagtattggtctttgaaattgactagaatgggtctccaacaggtgcattctaatgaagaagaagaaattacgttgttggatgaaaatgataatcaaaattcccttcgcatcttcgaaatatacaaatctttcactgctcaaaattctaaaaaaatctttgtgaaattttaccgttgttataactcttacgctaggaagctttataataataatttggcaaatttctttcctacttcttattccaacgatccgttgaaacaaacaagaattttgaattttatcaaaaagtacaatttcagtaataaaaatgatatagaaacatttactaggattgaaactaatttcaacattcttagggaaatcttcattaattctgttctcaaagagagtgaattgaattaccagtctaataatttagctgccgtcgctcgtttcatgaaaattttattgatatctaatgaggaaagcaatgctatcgaatttttcaagtccaaggctgatttgcctcccagtttaacggttttgccgtctaatgatgaattattttgggccgaacaaccaagggaagaggacagcggtgggagtaccgtgatatttaattctaaaaatttagatacgtttctcaatcagttgagggatttcctcaacgaaaagattaaattagcggacattttattcaaagatgagttccctgtaatattacagttcatcgagtcctttatccaagatattttattagatattttaaacaatatcttattaagctatagtgaatttttaaaagaaaatggaaaggatagtaaagccaattatgaatgcgtacccgaactttatttcacatttataaaaaagtttgatactgaattaaacgactctgtaaacgcaggcgcaaatttccgtaaagttgttcgtgaccttttaaacttatatctcgagccctttgttgtcaactatatgaatcagacaactagagtatttgaatctttgatcaactctcaattagctaattatgacacacaagttcaagacaagcagcgtgagcaaaacgcaaaaatttataacactttaaaagatcaaacggatgcttccagtgcaagtaacaatgaattgccgaatgacctctccataattactgaaacctccaaaactgtcccagaagcggattctaaaccaagtacgatccatcaatctgttcattctactgatatttctaatgataaattagactttttgagttccttcaccaagattttcaagttcagtaacaatgaaaatcaaaggttaaagcaacaattacaattggcctacaacttaaatttaatttccaataacttgcaaaacattaaatctttaataagtctcgatttatgttacaaaattttacaggaaacaagcgaaaagacggatcaaatttacaaatttcatacgattgaaagtttgttaccattgatcaagttgcgctgtcaagagattttcaaaattttaattacacaattgaataaaaatcacgttaaacctgcatttgaaaaggcaatcttattattacaaaaatataatcctaacgaaatagaacaaatagaaataaaattcaattctctttctccagccaatactcaagtcgaacctttagtacaattcactgaacttatcaatataggtgacataatattacaaatgatttccattttttacaagaacgaattgattcccaaaaaaattatcgataaaaataaagattttcttaatgatgttatccaattaaaaaaaaattttgagacttctatcgatgattttgtagccgaaggtttaaatatcggtataaacaaattaatggatgaaatctcttttgtattcaagactcttcaattgcctgacgattataatccaccgccaccctctaggaattctccaataagggatataaagccaaccaaatgtgctatcagggtagtcgagttactttctaatcattgctttttattaactggtgccacagacaagggtactattgacgtgtaccaacaagaaattggcgagagattctttaatgaaatcgtcaaacatttgaagaagtgcttcatatctacggagggcgcaatttggttaatctgcgatttaaattacttttacgattttattgctaacaaattaaaacaaaaaaatgttgttccctattttgttgggcttaagtctattggccagttatacatcatttctggcaaggactctaaagagttgggaaagcttatttctgatcttgggaaattcaatggcatttttacgcaagaggaaatttatgaatttgttcagaggagaagcgattgggttcgtgtaagaaaagacgttgaaaaggtaatgtacggcttgggcataagagattgctgcattatgtga

SEQ ID NO: 5751 - DNA, 843 bp, Saccharomyces cerevisiae
atggaaccagaagatacccagctgaaagaggacattaaaaccacagtaaattacataaagcagcatggtgttgagtttgagaacaaactgctagaagatgagagattctcattcatcaagaaagatgacccactccatgaatactacaccaaactcatgaatgagccaacagacactgtcagcggtgaagataatgacagaaagagtgagcgagagatagcaaggccgccggattttctgttctctcaatatgatactggaatatcccgaagagacatggaagtaatcaaattgacagcacgctactatgcaaaggataaaagtattgttgaacagatgatttcaaaggatggtgaagccagattaaactttatgaacagctcacatccgctacataagacattcactgattttgtcgcccagtacaagcgagtatattcttttactggtcaagaaatcaagaaaagtaagagaaccattttagataattgttttgagagaacacagtattgggaatttgagaaagataaagaccgggaacatgataagctcgtagagttgtgcaaaatacaatttgcagccattccatgggataaatttactcaagtggcaaaattttctatccctgaagacacagaaatcttcgaaggctctctagatttagaacagatgaggctgcgaagagtacaaactggtattaagttattcgatagtatcaagccgacaaatgaagaagaaaagatagtatccgaccaaggtaagcaaaaaggaggagatagtaagggcaaaaagcgtaaaattagagctgtgggagagacaaggttaaagaaaagtaaaaaataa

SEQ ID NO: 5752 - DNA, 843 bp, Artificial Sequence
  Description of Artificial Sequence: Synthetic polynucleotide
atggaaccagaagatacccagttgaaagaggacattaaaaccacagtaaattacataaagcagcatggtgttgagtttgagaacaaattattggaagatgagagattcagtttcatcaagaaagatgacccactccatgaatactacaccaaactcatgaatgagccaacagacactgtcagcggtgaagataatgacagaaagagtgagagagagatagcaaggccgccggattttcttttctctcaatatgatactggaatatccagaagagacatggaagtaatcaaattgacagcacgctactatgcaaaggataaaagtattgttgaacagatgatttccaaggatggtgaagccagattaaactttatgaacagctctcatccgcttcataagacattcactgattttgtcgcccagtacaagagagtatattcttttactggtcaagaaatcaagaaaagtaagagaaccattttagataattgttttgagagaacacagtattgggaatttgagaaagataaagacagagaacatgataagctcgtagagttgtgcaaaatacaatttgcagccattccatgggataaatttactcaagtggcaaaattttctatccctgaagacacagaaatcttcgaaggctctttagatttagaacagatgaggcttagaagagtacaaactggtattaagttattcgatagtatcaagccgacaaatgaagaagaaaagatagtatccgaccaaggtaagcaaaaaggaggagatagtaagggcaaaaagcgtaaaattagagctgtgggagagacaaggttaaagaaaagtaaaaaatga

SEQ ID NO: 5753 - DNA, 1800 bp, Saccharomyces cerevisiae
atgatagatatcaacgttaataacatattttttagatcttattcagttgatcctaactctggtcacgcaatttatgtctttgattcgacttatttgccagcatctgatgaaattggcgataagcaagtttatgacttgcttattaatgccctcatggatcgattggtaatgaaattgccacaggcaccatattcactggtgattttttcatctgggttttcccagagaaaaataagctgggtttacggtattaaaatgtttgcaaagttacccaaagagaccaagttctatttacaaaagatttttattgttcatgagtcattcttcgttaggtcggtctatcaagtaatttcaaacgctatgaactttaacttcttggactcaaaagatagtcagcatgattttccaagtttagttcatgtcttggacctgacttctttatccgagctaatagatattacgcgacttagaatatcgttgaacgtgtacttatatgattaccagatacgcgaacatataaatgtcccggaggaatattataacagattgacccctctggcaataagacagtataggcagttagtattcgataaaattttcaagaaattacagaatgacgctctgttgtgtgaattgatattccagaagccgggaaactataaaaaggtaaacatttttttggatattatcaaaagaaacaactacattgatttatctcaatgggatatttattctttggcatccgtgtggttgaattacttcattaagaataaagccaaacctctaatcccaattgaattaattccgttaccaattgttgatgatctaaagttcacaagtgaaacattccgcaaaattattaaattcaaccaataccaggacctctttatggtcataattcctttttttaataggatcatagcgcatggtgaatcgactaaacatgattcaaggaccctaagtaaagctttaactccggcgttatgtaaggaaaaactttccatgatgactaatgatcgtttagctattgggtcgagatatattaaaaatttactggactttttccccgaaatcgcgaaggaaatatcatcacctccttcatccgtatcatcgtcttctactatccctgttttgcctaagccaaggaagtcgtcgccaaccagatacagtgaactaggctgcttaacccttcctagaagtcgaagccctagtccacaaagatctgttacgtctccaacgtacacacctgtcgcattacaaaatacaccagtcttgaaacctaagtcttcaagcagaaatgtttcatccccatcattcaatgccaaacctccacttcctattaaggcagttacacgaccacaactgtctctaacttccaattctaatacagatttggcattagcttcttcttctacagatacattatcctcaccgacgaagactccatcagcagactcgcttccattgagtaacagcagcaccgatttaacgatatcagataatatcaaagaaatggttaaggacgagccagcaaaggataaaaattctgtggaaacagatatattcgtacaacagtttgaaagtttaaccctcgtccaaaacgcgaagattaagaagttcgacaaagaactacaagaaaagaagaagaaaaatgaaactacttcaaagacagcagataaattctctcaaaagggatattcagatattaaagcaagcaacaaggttagcaggctagctgcattgtacgaagaacgtttacaaggtttacaagtaatgaatgaaatgaaacaaaggtggtaa

SEQ ID NO: 5754 - DNA, 1800 bp, Artificial Sequence
  Description of Artificial Sequence: Synthetic polynucleotide
atgatagatatcaacgttaataacatattttttagatcttattctgttgatcctaactctggtcacgcaatttatgtctttgattctacttatttgccagcatctgatgaaattggcgataagcaagtttatgacttgcttattaatgccctcatggatagattggtaatgaaattgccacaggcaccatattctttggtgattttttcttctgggttttcccagagaaaaataagctgggtttacggtattaaaatgtttgcaaagttacccaaagagaccaagttctatttacaaaagatttttattgttcatgagagtttcttcgttaggtccgtctatcaagtaatttccaacgctatgaactttaacttcttggactctaaagatagtcagcatgattttccaagtttagttcatgtcttggacttgacttctttatccgagttgatagatattacgagacttagaatatctttgaacgtgtacttatatgattaccagatacgcgaacatataaatgtcccggaggaatattataacagattgacccctttggcaataagacagtataggcagttagtattcgataaaattttcaagaaattacagaatgacgctttattgtgtgaattgatattccagaagccgggaaactataaaaaggtaaacatttttttggatattatcaaaagaaacaactacattgatttatctcaatgggatatttattctttggcatccgtgtggttgaattacttcattaagaataaagccaaacctttgatcccaattgaattaattccgttaccaattgttgatgatttgaagttcacaagtgaaacattccgcaaaattattaaattcaaccaataccaggacctctttatggtcataattcctttttttaataggatcatagcgcatggtgaatctactaaacatgatagtaggaccttaagtaaagctttaactccggcgttatgtaaggaaaaactttccatgatgactaatgatcgtttagctattgggtccagatatattaaaaatttattagactttttccccgaaatcgcgaaggaaatatcttctcctccttcttccgtatcttcttcttctactatccctgttttgcctaagccaaggaagtcttctccaaccagatacagtgaattaggctgcttaacccttcctagaagtagaagccctagtccacaaagatctgttacgtctccaacgtacacacctgtcgcattacaaaatacaccagtcttgaaacctaagtcttctagcagaaatgtttcttccccatctttcaatgccaaacctccacttcctattaaggcagttacaagaccacaattatctttgacttccaattctaatacagatttggcattagcttcttcttctacagatacattatcctctccgacgaagactccatctgcagactctcttccattgagtaacagcagcaccgatttaacgatatctgataatatcaaagaaatggttaaggacgagccagcaaaggataaaaattctgtggaaacagatatattcgtacaacagtttgaaagtttaaccctcgtccaaaacgcgaagattaagaagttcgacaaagaattacaagaaaagaagaagaaaaatgaaactacttctaagacagcagataaattctctcaaaagggatattctgatattaaagcaagcaacaaggttagcaggttggctgcattgtacgaagaacgtttacaaggtttacaagtaatgaatgaaatgaaacaaaggtggtga

SEQ ID NO: 5755 - DNA, 2370 bp, Saccharomyces cerevisiae
atgctatcttcagctaataggttttatataaagaggcatttggcaacacatgccaatatgttcccctctgtatctaaaaattttcaaacaaaagtgccaccttatgcaaaacttttgaccaacctagacaagattaaacaaataacaaacaatgctccattgacactagcagaaaaaattttatactcgcatctttgcgatcctgaagaatcgattacttcttctgatctgtccaccatccgtggtaataaatacttgaagctaaacccagaccgtgtagctatgcaggacgcttctgcccaaatggcgcttctacaattcatgaccaccggtctaaatcaaacatctgtcccagcatccatacattgtgatcatttaattgtaggtaaggacggtgaaactaaagatttaccctcttccatagctaccaaccaagaagttttcgatttcttggagagttgcgcaaagagatatggaattcaattctggggcccaggttctggtatcattcaccagattgttttggaaaatttctcagctccaggtctaatgatgctaggtactgattcccatacaccaaatgcaggcggtctgggagctattgccatcggggttggtggtgcggatgcagttgatgccctcacaggcactccatgggaattaaaagcaccaaaaattttaggtgttaaattgaccggaaagttaaacggatggtccactcctaaagatgtaatcacaaagctcgctggtttactaactgtcagaggtggtactggttatatcgtcgagtacttcggcgaaggtgtatccactctatcttgcacaggtatggcaaccatctgtaatatgggagctgaaatcggtgctacaacgtcaactttcccttaccaagaagctcacaagcgttatttgcaagcaactaatagagcagaggtcgctgaagcagctgatgttgctttaaacaagtttaacttcttaagagccgacaaagatgctcaatacgataaagttattgaaattgacttatccgcaattgaacctcacgttaatggtccatttacaccagacctttcaaccccaatatctcaatatgccgaaaaaagtttgaaggaaaactggccccaaaaagttagcgctggtttgattggatcatgtaccaattcatcttatcaagacatgagtcgtgttgtcgacttggtcaagcaagcttccaaagccggcttgaaaccacgtatccccttctttgtcacccctggttcagaacaaattagagctaccttggaaagagatggaatcatcgatattttccaagaaaatggtgccaaagttttagcaaatgcatgcggcccttgtatcggacaatggaatagggaagatgtctcgaaaacatcaaaagaaacgaacactatttttacatcattcaatagaaatttcagagctagaaacgatggtaataggaatacaatgaatttcttaacatccccagaaatagtaacagcgatgagttattctggagatgctcagttcaatccgctaactgactcaattaaattgccaaatgggaaggatttcaaattccaaccaccaaagggtgatgagttaccaaaaagaggatttgaacacggtagagacaaattttatcctgaaatggatccaaagccagatagcaatgtagagattaaggtagaccctaattctgatcgtttgcaattattagagccattcaaaccttggaacgggaaggaattgaagacaaacgtgcttttgaaagttgaaggtaaatgtacaacagatcatatttccgctgcgggcgtctggttgaaatataaaggccatctagaaaacatttcttacaatacattgattggtgcacaaaacaaagaaaccggtgaagtcaacaaggcttatgaccttgacggaactgaatatgatattcctggtttgatgatgaaatggaaatcagacggtagaccatggaccgtgatagcggaacataactatggtgaaggttccgcaagagagcatgctgctttgtcaccaagatttttaggcggagagattcttttagttaagtcttttgcaagaattcatgagacaaacttgaagaaacaaggtgtgttgccattgacttttgccaacgaatctgactatgataaaatatcaagcggagatgttttagaaacgttgaacctagttgacatgattgctaaggatggtaataacggtggtgaaattgatgttaaaattactaaaccaaacggtgaatcgttcaccatcaaggcaaaacatactatgtctaaagatcaaatcgattttttcaaagctggttcagcaatcaattatattggtaatatacgaagaaacgaataa

SEQ ID NO: 5756 - DNA, 2370 bp, Artificial Sequence
  Description of Artificial Sequence: Synthetic polynucleotide
atgctttcttctgctaataggttttatataaagaggcatttggcaacacatgccaatatgttcccctctgtatctaaaaattttcaaacaaaagtgccaccttatgcaaaacttttgaccaacttggacaagattaaacaaataacaaacaatgctccattgacattagcagaaaaaattttatactctcatctttgcgatcctgaagaaagtattacttcttctgatttatccaccatccgtggtaataaatacttgaagttgaacccagaccgtgtagctatgcaggacgcttctgcccaaatggcgcttttacaattcatgaccaccggtttgaatcaaacatctgtcccagcatccatacattgtgatcatttaattgtaggtaaggacggtgaaactaaagatttaccctcttccatagctaccaaccaagaagttttcgatttcttggagagttgcgcaaagagatatggaattcaattctggggcccaggttctggtatcattcaccagattgttttggaaaatttcagtgctccaggtttgatgatgttgggtactgattcccatacaccaaatgcaggcggtttgggagctattgccatcggggttggtggtgcggatgcagttgatgccctcacaggcactccatgggaattaaaagcaccaaaaattttaggtgttaaattgaccggaaagttaaacggatggtccactcctaaagatgtaatcacaaagctcgctggtttattaactgtcagaggtggtactggttatatcgtcgagtacttcggcgaaggtgtatccactttatcttgcacaggtatggcaaccatctgtaatatgggagctgaaatcggtgctacaacgtctactttcccttaccaagaagctcacaagcgttatttgcaagcaactaatagagcagaggtcgctgaagcagctgatgttgctttaaacaagtttaacttcttaagagccgacaaagatgctcaatacgataaagttattgaaattgacttatccgcaattgaacctcacgttaatggtccatttacaccagacctttctaccccaatatctcaatatgccgaaaaaagtttgaaggaaaactggccccaaaaagttagcgctggtttgattggatcttgtaccaattcttcttatcaagacatgagtcgtgttgtcgacttggtcaagcaagcttccaaagccggcttgaaaccacgtatccccttctttgtcacccctggttctgaacaaattagagctaccttggaaagagatggaatcatcgatattttccaagaaaatggtgccaaagttttagcaaatgcatgcggcccttgtatcggacaatggaatagggaagatgtctccaaaacaagtaaagaaacgaacactatttttacatctttcaatagaaatttcagagctagaaacgatggtaataggaatacaatgaatttcttaacatccccagaaatagtaacagcgatgagttattctggagatgctcagttcaatccgttgactgacagtattaaattgccaaatgggaaggatttcaaattccaaccaccaaagggtgatgagttaccaaaaagaggatttgaacacggtagagacaaattttatcctgaaatggatccaaagccagatagcaatgtagagattaaggtagaccctaattctgatcgtttgcaattattagagccattcaaaccttggaacgggaaggaattgaagacaaacgtgcttttgaaagttgaaggtaaatgtacaacagatcatatttccgctgcgggcgtctggttgaaatataaaggccatttggaaaacatttcttacaatacattgattggtgcacaaaacaaagaaaccggtgaagtcaacaaggcttatgaccttgacggaactgaatatgatattcctggtttgatgatgaaatggaaaagtgacggtagaccatggaccgtgatagcggaacataactatggtgaaggttccgcaagagagcatgctgctttgtctccaagatttttaggcggagagattcttttagttaagtcttttgcaagaattcatgagacaaacttgaagaaacaaggtgtgttgccattgacttttgccaacgaatctgactatgataaaatatctagcggagatgttttagaaacgttgaacttggttgacatgattgctaaggatggtaataacggtggtgaaattgatgttaaaattactaaaccaaacggtgaatctttcaccatcaaggcaaaacatactatgtctaaagatcaaatcgattttttcaaagctggttctgcaatcaattatattggtaatataagaagaaacgaatga

SEQ ID NO: 5757 - DNA, 327 bp, Saccharomyces cerevisiae
atgtataaggtgtcagcatgtggggtgaggataatgagtggcatatcagaaatttggattggcgaacttagagattacaagtacgctttacgtcttgatagagaagagtatccagcggtgcttgtttacgagtatgactcgtcttctactaggaactatctttttaccataaagtacagcgatcagaggccgaactggcagctcattactcgtgacgcagctttaacagcttacgacttacttaacagaggtggcgagttcacaactctcagctttccgggagccactattcaccgttcagtcagtgagctgtcccgattgcattaa

SEQ ID NO: 5758 - DNA, 327 bp, Artificial Sequence
  Description of Artificial Sequence: Synthetic polynucleotide
atgtataaggtgagcgcatgtggggtgaggataatgagtggcatatctgaaatttggattggcgaacttagagattacaagtacgctttacgtcttgatagagaagagtatccagcggtgcttgtttacgagtatgactcttcttctactaggaactatctttttaccataaagtacagcgatcagaggccgaactggcagctcattactcgtgacgcagctttaacagcttacgacttacttaacagaggtggcgagttcacaactctcagctttccgggagccactattcaccgtagtgtcagtgagctttccagattgcattga

SEQ ID NO: 5759 - DNA, 2646 bp, Saccharomyces cerevisiae
atgagattttcacacttcttgaagtacaatgctgtcccagaatggcaaaaccattatatggactacagcgagctgaaaaatcttatttacacgctacaaacagatgaacttcaggttggtgataacgaagaaggatttggcgcaggaaagagctctaacattacagataggttcaaaaacaagttttcttttaaaaatgcgaaggaagatacgtcttccggtatgaacaaagatgcaggcatcgttgaggaaaccatcgagttgcgagagttgcctactgctcagacggtcgctgccaaaccttctcctttcagaagaatgaaggaaaagatattttacaaaagaaggtcgtcttccgcatcgtccgtctcctccacggccaacgaaaatctgcaattagacacttatgatacgtttgttggtgatttaacagctgaaaaacagaaagtagatgatttttataagaggacagaagcgaagttctacgacaaatttgacgcgctggtgaaggacctgaagaaaatcggagttatagaatacgatatcgacgatgatactctgtttaacgaaccgattgccagcacaaatgacgaagttcccccactagacttggatgatgacgaagacgacgacgaattttacgatgatcaatctaatattgaagataatactgctttgctgcatcattcgcagtataacattaagtctcagaaaaaatcgctgttgaagaagtcgatcgtaaacctatatatcgatctttgccagttgaagtcgttcatcgaattgaaccgcattgggtttgcaaaaattacaaagaaatcagacaaagttcttcacttgaatacaagaaccgaactgatcgaatcggagcagtttttcaaagacacatatgcattccaggcagaaacgatcgaattgctaaattccaaaatttcccagctagtcacattttatgcgcgcatcactgaccggcctcataatatctcgcatagcaagcaagagttgaaatcctacctgcatgaccacattgtttgggaaagaagtaacacttggaaagacatgttgggactgctatcgcaagctgacgagttgacaccaaaggaaacagaatataatgcaaataagctggtaggcaagttagatttggaatactacagatggccactacccagaccgataaacttaaaattcactagtataaacaacgttgcactaccgaaattatttttcaccaagaaagcatacaagatttactttattattctagtcactggactcttgttaggaataaagaccttcaacgacgctgctcagcaccgctgcatggcccttgtcgagtgtgtcgcctttttgtgggctagtgaggccatcccattacacattacagcattccttgtaccactacttgtagtccttttcaaagtcctaaaaacctccgacggggctataatgagtgctgcaagcgcttcatcagaaattttggccgccatgtggtcttctacaattatgattctgctggcaggttttactttgggtgaagtacttgcacaatataacatcgccaaagttcttgcctcgtggttgttggccttcgctggttgtaaacccagaaacgttcttttaatggcaatgtgtgtcgtgttcttcctatcaatgtggatttccaatgtcgcagcacctgttctaacatattcgttgttatctcccctattggatgccatggatgcagatagcccatttgcgcaagcattggtgttaggtgtagcgttggctgcaaatatcggtggtatgtcttcaccaatctcttcacctcaaaacatcatttccatgtcgtacttgaaaccctatggtattggctggggccaattctttgctgttgcattgccatctggtatcctggccatgcttttggtttggattttattgttcactactttcaagatgaataagaccaaattggaaaaatttaagcctattaagacgaaattcacagttaagcagtattatatcattactgtcactgtggccactattttgttgtggtgtgtggaaagccagattgaaggtgcttttgggtcatcaggtcaaattgcaatcattcccatcgttttgttttttggtaccggattactatcaacacaagatttaaatgcctttccgtggtcaatcgttattttggcaatgggaggtattgctttggggaaggccgtctcatcctcgggtttgctatcaaccattgcaaaagcattacaaaagaaaattgagaatgatggtgtttttgccattctatgtattttcggtatcctgatgttggttgtgggtactttcgtctcgcatacagtatccgctattatcatcattcccttggtgcaagaagttggtgacaagcttggcaaccccaaagctgctcctatccttgttttcggttgtgcattattgtcatcctgtggtatgggactagcttcttcggggttccccaatgtcactgccatctctaaagtagatagaaagggcgatcgctatttaagtgtcatgactttcttaacgagaggtgttccagcttctattttggctttcctatgtgtcattactctaggttatggtatcatggcatctgttgtcaagggtaacgcaacctctgcgtaa

SEQ ID NO: 5760 - DNA, 2646 bp, Artificial Sequence
  Description of Artificial Sequence: Synthetic polynucleotide
atgagattttctcacttcttgaagtacaatgctgtcccagaatggcaaaaccattatatggactacagcgagttgaaaaatcttatttacacgttacaaacagatgaacttcaggttggtgataacgaagaaggatttggcgcaggaaagagctctaacattacagataggttcaaaaacaagttttcttttaaaaatgcgaaggaagatacgtcttccggtatgaacaaagatgcaggcatcgttgaggaaaccatcgagttgagagagttgcctactgctcagacggtcgctgccaaaccttctcctttcagaagaatgaaggaaaagatattttacaaaagaaggtcttcttccgcatcttccgtctcctccacggccaacgaaaatttacaattagacacttatgatacgtttgttggtgatttaacagctgaaaaacagaaagtagatgatttttataagaggacagaagcgaagttctacgacaaatttgacgcgttagtgaaggacttgaagaaaatcggagttatagaatacgatatcgacgatgatactttatttaacgaaccgattgccagcacaaatgacgaagttcccccattggacttggatgatgacgaagacgacgacgaattttacgatgatcaatctaatattgaagataatactgctttgttgcatcattctcagtataacattaagtctcagaaaaaatctttgttgaagaagtctatcgtaaacttatatatcgatctttgccagttgaagagtttcatcgaattgaaccgcattgggtttgcaaaaattacaaagaaaagtgacaaagttcttcacttgaatacaagaaccgaattgatcgaaagtgagcagtttttcaaagacacatatgcattccaggcagaaacgatcgaattgttgaattccaaaatttcccagttggtcacattttatgcgcgcatcactgacagacctcataatatctctcatagcaagcaagagttgaaatcctacttgcatgaccacattgtttgggaaagaagtaacacttggaaagacatgttgggattattatctcaagctgacgagttgacaccaaaggaaacagaatataatgcaaataagttggtaggcaagttagatttggaatactacagatggccattgcccagaccgataaacttaaaattcactagtataaacaacgttgcattaccgaaattatttttcaccaagaaagcatacaagatttactttattattttagtcactggactcttgttaggaataaagaccttcaacgacgctgctcagcaccgctgcatggcccttgtcgagtgtgtcgcctttttgtgggctagtgaggccatcccattacacattacagcattccttgtaccattacttgtagtccttttcaaagtcttgaaaacctccgacggggctataatgagtgctgcaagcgcttcttctgaaattttggccgccatgtggtcttctacaattatgattttattggcaggttttactttgggtgaagtacttgcacaatataacatcgccaaagttcttgccagttggttgttggccttcgctggttgtaaacccagaaacgttcttttaatggcaatgtgtgtcgtgttcttcttatctatgtggatttccaatgtcgcagcacctgttttgacatattctttgttatctcccttattggatgccatggatgcagatagcccatttgcgcaagcattggtgttaggtgtagcgttggctgcaaatatcggtggtatgtcttctccaatctcttctcctcaaaacatcatttccatgagttacttgaaaccctatggtattggctggggccaattctttgctgttgcattgccatctggtatcttggccatgcttttggtttggattttattgttcactactttcaagatgaataagaccaaattggaaaaatttaagcctattaagacgaaattcacagttaagcagtattatatcattactgtcactgtggccactattttgttgtggtgtgtggaaagccagattgaaggtgcttttgggtcttctggtcaaattgcaatcattcccatcgttttgttttttggtaccggattattatctacacaagatttaaatgcctttccgtggtctatcgttattttggcaatgggaggtattgctttggggaaggccgtctcttccagtggtttgttatctaccattgcaaaagcattacaaaagaaaattgagaatgatggtgtttttgccattctttgtattttcggtatcttgatgttggttgtgggtactttcgtctctcatacagtatccgctattatcatcattcccttggtgcaagaagttggtgacaagcttggcaaccccaaagctgctcctatccttgttttcggttgtgcattattgtcttcctgtggtatgggattggcttcttctgggttccccaatgtcactgccatctctaaagtagatagaaagggcgatcgctatttaagtgtcatgactttcttaacgagaggtgttccagcttctattttggctttcttgtgtgtcattactttaggttatggtatcatggcatctgttgtcaagggtaacgcaacctctgcgtga

SEQ ID NO: 5761 - DNA, 3765 bp, Saccharomyces cerevisiae
atgggttcttcagatgtttcaagtcgtgaatgttcattggtttataatgaagatcccgatttcaccgatggcacaacaccatgtgatcggttgggagtggacttgatgaatgttctagatgacaaggatgaaataaagcaagagtctgtcccagtctcagatcgtgaaattgaggatacggaatccgatgcttccgctgtttcttcatttgctagcgctaatgagttaatagctgagccacacgctgcaagtgaaactaatcttggaactaatggtcaagatggaagaaatgtcttagaacaacaaagagacgtggttgctagactaatagaagaaaacaaggaaacgcaaaaagagggtgataaagtctgtattgtccccaaggtttggtacgataaatttttcgaccccgatgttaccgatcctgaagatataggccctattaatacacgcatgatttgcagagactttgaaaattttgtgcttgaggattacaatagatgtccgtatctgtctattgcagagcctgttttcaattttctatcagaaatttacggcatgacaagtggctcttacccagtggtaactaatttggttatcaaccaaaccacaggggagttagagacagaatacaataaatggtttttcagactacattacctgaccgaaaaacaagacgggaggaaaaggaggcatggccaggacgattcaataatgtacctctcgatgtctgcgttgaatttagtacgtgatttggttgaaaagagtatgaatctgttttttgagaaagctgatcatctagacgtgaatgcggtggattttaaaatttggtttgtgtcagagggatctgatattgccacagatagcaatgttagtacttttttgaattcttcatatgaaataactccgcttcaatttctcgaactaccgataaagaaactactaataccagacatgtttgaaaaccgtttagacaagataacttcaaatccgagtgaccttgtcatagaaattaaacctatagaagggaatcaccattggccttcaaactattttgcttataataaactcgaaccagcatcaggtactactggtttggtcaatttgggaaatacatgttacatgaattctgcgttgcaatgcctggtacacattccgcagttgcgtgattatttcctttatgatggttatgaagacgaaatcaatgaagaaaatcctcttgggtaccacggctatgtggctagggcatttagtgacttggttcagaagttgtttcaaaacaggatgagcataatgcaaagaaatgctgctttccccccttcaatgttcaaatccactatcgggcactttaattcgatgttttctggttatatgcaacaggattctcaagaatttttagccttcctgttagacagtttacatgaagatttgaacaggataataaagaaagaatacacagaaaaaccatcattatctcctggtgatgacgtgaatgattggaatgtagtcaagaaactggcagacgatacttgggagatgcatttaaagagaaattgttccgttataacggatttatttgtcgggatgtacaaatcaacgctatattgtcccgaatgtcaaaatgtttctataacgtttgacccgtataatgatgttacattgccgcttccggttgatacagtgtgggataaaactataaaaatttttcccatgaactctccaccacttcttcttgaagttgagttaagcaaatcgtccacttatatggacttgaagaattatgttggtaaaatgtcgggcctagatccaaatacactatttggctgtgagattttcagtaatcaaatctatgttaactatgagtcaacagagtcgaatgctcaatttttaaccttgcaggaattgatcaaacctgctgatgacgttattttttatgaattaccagtaacaaatgacaatgaagtaattgttcccgtattgaatactagaattgaaaaaggctacaaaaatgcaatgttatttggagtccctttctttattacgttaaaagaagatgaattgaataatccaggtgcaataagaatgaaattgcaaaacaggtttgtccatttaagtggtgggtatatcccatttcctgaacctgtaggaaatcgaaccgattttgctgatgcttttccattattagtagaaaaatatccagatgttgaatttgaacaatataaagatatactacagtatacgtctattaaggtgactgacaaggataaatcctttttttccatcaagattctgtctgtagaaaaagagcagcaatttgctagtaataaccgaacagggcctaatttctggacccctatctcccagttaaaccttgacaaagctacagatatagacgataaacttgaagatgtggtgaaggatatctacaattattcatccttagtagattgtgctgaaggggtccttatgcaagtggatgatgagggagataccgagggtagtgaagcaaagaatttttccaagcccttccaatcgggagatgatgaagaaaataaagaaactgtaacaaataatgaaaatgtaaataatactaatgatcgggatgaagatatggaactaacagatgatgttgaagaagatgcaagtacagagccagaattaacagataagccagaggcgttagataaaattaaggatagcttgacttccactccgtttgcgattctttctatgaatgatattattgtttgtgagtggagcgaattgggttcaaatgaggcattttccgatgataaaatatataactgggaaaatccagctactttgcctaacaaagagttggagaacgctaagttggaaagatctaacgctaaggaaagaaccataaccttggacgattgtctccaattattttccaaaccagaaatactaggattaaccgattcgtggtactgccctacatgcaaggaacatcgtcaggctaccaaacaaatacaactttggaatacaccagatattctgctaattcaccttaaaaggtttgaaagtcaaaggtcttttagcgataaaattgatgccacggttaatttccccattacagatttggatctgtcgaggtacgttgtctataaagatgatcccagaggtttaatctatgacctgtatgcagtagataaccactatggtggtttgggtggtgggcactataccgcgtacgtaaagaattttgccgacaataaatggtactattttgatgattctcgagtaactgaaactgcgccagaaaatagtatagctggatcggcttatttgctattttacattcgccgtcataaagatggcaatggattaggcagctctaaactacaggaaataatccaaaagtcacgccacggatatgatgagcgtatcaaaaagatatacgatgaacagatgaagttgtatgaatttaataagactgacgaggaggaagatgtttctgatgatatgatagaatgtaatgaagatgtgcaggcccctgaatatagtaatcgtagtttggaggttgggcatattgaaactcaggactgcaacgacgaagatgacaatgatgatggtgagaggacaaattcaggtaggagaaagttaagattgttgaaaaaagtctacaagaataattcaggcttgggttcatcgagtacgtctgaaatatctgagggatgcccagaaaacgaagtcgctgatttgaatttaaaaaatggtgtgacactagaatcgccagaataa

SEQ ID NO: 5762 - DNA, 3765 bp, Artificial Sequence
  Description of Artificial Sequence: Synthetic polynucleotide
atgggttcttctgatgtttctagtcgtgaatgttctttggtttataatgaagatcccgatttcaccgatggcacaacaccatgtgatagattgggagtggacttgatgaatgttttggatgacaaggatgaaataaagcaagagtctgtcccagtctctgatcgtgaaattgaggatacggaatccgatgcttccgctgtttcttcttttgctagcgctaatgagttaatagctgagccacacgctgcaagtgaaactaatcttggaactaatggtcaagatggaagaaatgtcttagaacaacaaagagacgtggttgctagattaatagaagaaaacaaggaaacgcaaaaagagggtgataaagtctgtattgtccccaaggtttggtacgataaatttttcgaccccgatgttaccgatcctgaagatataggccctattaatacacgcatgatttgcagagactttgaaaattttgtgcttgaggattacaatagatgtccgtatttatctattgcagagcctgttttcaattttttatctgaaatttacggcatgacaagtggctcttacccagtggtaactaatttggttatcaaccaaaccacaggggagttagagacagaatacaataaatggtttttcagattacattacttgaccgaaaaacaagacgggaggaaaaggaggcatggccaggacgattctataatgtacctctctatgtctgcgttgaatttagtacgtgatttggttgaaaagagtatgaatttattttttgagaaagctgatcatttggacgtgaatgcggtggattttaaaatttggtttgtgtctgagggatctgatattgccacagatagcaatgttagtacttttttgaattcttcttatgaaataactccgcttcaatttctcgaattaccgataaagaaattattgataccagacatgtttgaaaaccgtttagacaagataacttccaatccgagtgaccttgtcatagaaattaaacctatagaagggaatcaccattggccttccaactattttgcttataataaactcgaaccagcatctggtactactggtttggtcaatttgggaaatacatgttacatgaattctgcgttgcaatgcttagtacacattccgcagttgcgtgattatttcctttatgatggttatgaagacgaaatcaatgaagaaaatcctcttgggtaccacggctatgtggctagggcatttagtgacttggttcagaagttgtttcaaaacaggatgagcataatgcaaagaaatgctgctttccccccttctatgttcaaatccactatcgggcactttaattctatgttttctggttatatgcaacaggattctcaagaatttttagccttcttattagacagtttacatgaagatttgaacaggataataaagaaagaatacacagaaaaaccatctttatctcctggtgatgacgtgaatgattggaatgtagtcaagaaattggcagacgatacttgggagatgcatttaaagagaaattgttccgttataacggatttatttgtcgggatgtacaaatctacgctttattgtcccgaatgtcaaaatgtttctataacgtttgacccgtataatgatgttacattgccgcttccggttgatacagtgtgggataaaactataaaaatttttcccatgaactctccaccacttcttcttgaagttgagttaagcaaatcttccacttatatggacttgaagaattatgttggtaaaatgagtggcttggatccaaatacattatttggctgtgagattttcagtaatcaaatctatgttaactatgagtctacagagagcaatgctcaatttttaaccttgcaggaattgatcaaacctgctgatgacgttattttttatgaattaccagtaacaaatgacaatgaagtaattgttcccgtattgaatactagaattgaaaaaggctacaaaaatgcaatgttatttggagtccctttctttattacgttaaaagaagatgaattgaataatccaggtgcaataagaatgaaattgcaaaacaggtttgtccatttaagtggtgggtatatcccatttcctgaacctgtaggaaatagaaccgattttgctgatgcttttccattattagtagaaaaatatccagatgttgaatttgaacaatataaagatatattacagtatacgtctattaaggtgactgacaaggataaatcctttttttccatcaagattttatctgtagaaaaagagcagcaatttgctagtaataacagaacagggcctaatttctggacccctatctcccagttaaaccttgacaaagctacagatatagacgataaacttgaagatgtggtgaaggatatctacaattattcttccttagtagattgtgctgaaggggtccttatgcaagtggatgatgagggagataccgagggtagtgaagcaaagaatttttccaagcccttccaaagtggagatgatgaagaaaataaagaaactgtaacaaataatgaaaatgtaaataatactaatgatagagatgaagatatggaattaacagatgatgttgaagaagatgcaagtacagagccagaattaacagataagccagaggcgttagataaaattaaggatagcttgacttccactccgtttgcgattctttctatgaatgatattattgtttgtgagtggagcgaattgggtagtaatgaggcattttccgatgataaaatatataactgggaaaatccagctactttgcctaacaaagagttggagaacgctaagttggaaagatctaacgctaaggaaagaaccataaccttggacgattgtctccaattattttccaaaccagaaatattaggattaaccgattcttggtactgccctacatgcaaggaacatcgtcaggctaccaaacaaatacaactttggaatacaccagatattttattgattcaccttaaaaggtttgaaagtcaaaggtcttttagcgataaaattgatgccacggttaatttccccattacagatttggatttatctaggtacgttgtctataaagatgatcccagaggtttaatctatgacctttatgcagtagataaccactatggtggtttgggtggtgggcactataccgcgtacgtaaagaattttgccgacaataaatggtactattttgatgattctagagtaactgaaactgcgccagaaaatagtatagctggatctgcttatttgttattttacattcgccgtcataaagatggcaatggattaggcagctctaaattacaggaaataatccaaaagagtcgccacggatatgatgagcgtatcaaaaagatatacgatgaacagatgaagttgtatgaatttaataagactgacgaggaggaagatgtttctgatgatatgatagaatgtaatgaagatgtgcaggcccctgaatatagtaatcgtagtttggaggttgggcatattgaaactcaggactgcaacgacgaagatgacaatgatgatggtgagaggacaaattctggtaggagaaagttaagattgttgaaaaaagtctacaagaataatagtggcttgggttcttccagtacgtctgaaatatctgagggatgcccagaaaacgaagtcgctgatttgaatttaaaaaatggtgtgacattagaatctccagaatga

SEQ ID NO: 5763 - DNA, 933 bp, Saccharomyces cerevisiae
atggtaagtgattggaaaaatttttgcctcgagaaagcctctaggtttcgcccaacaatagataggcctttttttaatatttatttgtgggactatttcaatcgtgcggttgggtgggccactgcaggtcgcttccagccaaaggattttgagtttaccgttgggaagcagcctttgagtgaacctcgtccggtactgctttttattgccatgtattatgtggttatatttggcgggaggtccctggtaaagtcatgtaaacctctcaagttgagatttatttctcaagtccataacttgatgttgacttctgtttcctttttatggttgattttgatggtggaacagatgctacccatagtgtatcgccatgggctgtattttgctgtttgtaatgttgaatcgtggacgcaaccgatggagacattatattatctcaactatatgacaaagtttgtggagttcgcagacactgtcttgatggtgttgaaacatagaaagttgactttcctacatacataccatcatggtgctacagctttactgtgctataatcaattggttggttacacagcagttacatgggttcctgtcaccttaaacttagctgttcacgttcttatgtattggtattatttcctttctgctagcggaattcgtgtttggtggaaagcctgggttacaagactacaaattgtgcagttcatgcttgatctcattgtcgtttattacgtgctttatcagaagattgttgctgcatatttcaaaaatgcttgtactccacagtgtgaggattgcttaggttcaatgacggctattgctgctggtgcagccattcttacatcctacttgtttttgttcatctctttctatattgaggtttacaaacgtggaagtgctagtggtaagaagaagatcaacaaaaacaattaa

SEQ ID NO: 5764 - DNA, 933 bp, Artificial Sequence
  Description of Artificial Sequence: Synthetic polynucleotide
atggtaagtgattggaaaaatttttgcctcgagaaagcctctaggtttcgcccaacaatagataggcctttttttaatatttatttgtgggactatttcaatcgtgcggttgggtgggccactgcaggtcgcttccagccaaaggattttgagtttaccgttgggaagcagcctttgagtgaacctcgtccggtattgctttttattgccatgtattatgtggttatatttggcgggaggtccttagtaaagagttgtaaacctctcaagttgagatttatttctcaagtccataacttgatgttgacttctgtttcctttttatggttgattttgatggtggaacagatgttgcccatagtgtatcgccatgggttatattttgctgtttgtaatgttgaaagttggacgcaaccgatggagacattatattatctcaactatatgacaaagtttgtggagttcgcagacactgtcttgatggtgttgaaacatagaaagttgactttcttacatacataccatcatggtgctacagctttattatgctataatcaattggttggttacacagcagttacatgggttcctgtcaccttaaacttagctgttcacgttcttatgtattggtattatttcctttctgctagcggaattcgtgtttggtggaaagcctgggttacaagattacaaattgtgcagttcatgcttgatctcattgtcgtttattacgtgctttatcagaagattgttgctgcatatttcaaaaatgcttgtactccacagtgtgaggattgcttaggttctatgacggctattgctgctggtgcagccattcttacatcctacttgtttttgttcatctctttctatattgaggtttacaaacgtggaagtgctagtggtaagaagaagatcaacaaaaacaattga

SEQ ID NO: 5765 - DNA, 1542 bp, Saccharomyces cerevisiae
atgtcagctataccaataactccaactaagcgtatcagaagaaatctatttgacgatgctccagcaacgcctccacgacctttgaaaagaaaaaagttgcagttcacagatgttacaccagaatcatccccagaaaaactgcagtttggctcacagtctatttttttgaggacaaaggcacttttgcagaagtcatctgagctagtcaacttgaatagcagcgatggtgcattgccagcaagaacagcagagtacgaacaagttatgaattttttggcgaaggcaatttctgaacacaggtccgattcactgtacatcacgggtccgcctggcactggcaagactgcccagcttgatatgattataagacagaagttccagtccctcccattgtcgctctccacgccacgctcgaaggacgtgctgagacatacgaatccgaacttgcagaatttgtcctggtttgaattgcccgatggaaggctagaatccgtggcggtaaccagtattaattgtatatcgttgggagagccgtcctccattttccagaagattttcgattccttccaagatctgaatggcccaacattgcaaataaaaaacatgcagcatctacagaagttcttagagccttatcataagaaaactacgtttgtggttgtgttggacgagatggacaggctattgcatgctaacacgagcgagacacaatcagttagaactattcttgaattattccttttggcgaaattgcctactgtgagttttgtgttaatcggtatggctaatagtctagatatgaaagataggtttctttccaggttaaatttggacagagggttgttaccgcaaactatagtttttcagccatacactgctgagcaaatgtatgaaatcgtcattcaaaaaatgagtagtctgcccactattatcttccaaccgatggccatcaaattcgcagcaaagaagtgtgctggaaatacgggtgaccttcgaaaactttttgatgtcttaaggggaagtatcgaaatctatgagttagaaaagcggtttctgctttcaccaacaagaggatcattgaactctgcgcaagttcctttgacgccaactacttctccggtaaagaaatcgtatccagaaccacaaggtaaaataggcttgaactacatagccaaggtcttctcaaaattcgtgaacaataattctacgagaacgaggatagccaaactaaacatccagcaaaaattaattctttgcaccataattcaatcactgaagctaaattccgatgctacaatcgacgaatcgtttgatcattatatcaaagcgataacaaaaactgatactttagcaccattgcagagaaatgaatttttggaaatctgtacaattttagaaacttgtgggctggtttcaatcaaaaagacaaagtgtaaagggaaaaccaagagatttgttgataagattgatgttgatctcgacatgcgagaattttatgatgagatgaccaaaatttcaattttgaaacctttccttcactag

SEQ ID NO: 5766 - DNA, 1542 bp, Artificial Sequence
  Description of Artificial Sequence: Synthetic polynucleotide
atgtctgctataccaataactccaactaagcgtatcagaagaaatttatttgacgatgctccagcaacgcctccaagacctttgaaaagaaaaaagttgcagttcacagatgttacaccagaatcttccccagaaaaattacagtttggctctcagtctatttttttgaggacaaaggcacttttgcagaagtcttctgagttggtcaacttgaatagcagcgatggtgcattgccagcaagaacagcagagtacgaacaagttatgaattttttggcgaaggcaatttctgaacacaggtccgattctttgtacatcacgggtccgcctggcactggcaagactgcccagcttgatatgattataagacagaagttccagtccctcccattgtctctctccacgccacgctctaaggacgtgttgagacatacgaatccgaacttgcagaatttgtcctggtttgaattgcccgatggaaggttagaatccgtggcggtaaccagtattaattgtatatctttgggagagccgtcctccattttccagaagattttcgattccttccaagatttgaatggcccaacattgcaaataaaaaacatgcagcatttacagaagttcttagagccttatcataagaaaactacgtttgtggttgtgttggacgagatggacaggttattgcatgctaacacgagcgagacacaatctgttagaactattcttgaattattccttttggcgaaattgcctactgtgagttttgtgttaatcggtatggctaatagtttggatatgaaagataggtttctttccaggttaaatttggacagagggttgttaccgcaaactatagtttttcagccatacactgctgagcaaatgtatgaaatcgtcattcaaaaaatgagtagtttacccactattatcttccaaccgatggccatcaaattcgcagcaaagaagtgtgctggaaatacgggtgaccttagaaaactttttgatgtcttaaggggaagtatcgaaatctatgagttagaaaagagatttttactttctccaacaagaggatctttgaactctgcgcaagttcctttgacgccaactacttctccggtaaagaaaagttatccagaaccacaaggtaaaataggcttgaactacatagccaaggtcttctccaaattcgtgaacaataattctacgagaacgaggatagccaaattgaacatccagcaaaaattaattctttgcaccataattcaaagtttgaagttgaattccgatgctacaatcgacgaaagttttgatcattatatcaaagcgataacaaaaactgatactttagcaccattgcagagaaatgaatttttggaaatctgtacaattttagaaacttgtgggttggtttccatcaaaaagacaaagtgtaaagggaaaaccaagagatttgttgataagattgatgttgatctcgacatgagagaattttatgatgagatgaccaaaatttccattttgaaacctttccttcactga

SEQ ID NO: 5767 - DNA, 1209 bp, Saccharomyces cerevisiae
atgtttcaacagctgtcggcatccattaggcacaatgcacacataatttttttatgcataagttggtattttatttcatcgttggcatctcaggtaacgaagcaggtactaacggtttgcccattaccactttttttgggtgagtttcagttcatttatactgctgtgctagcatggtttacgtgttatattgcatatagtttcccaggattctatcgcatatttcctaatggtacttttccggaatattatatcgacgacagagaaactagccgtgcagctaggaaagaatcaaaactatcctccctcattataccgccctctaaaccaatcctgcaaacagttctacctttaggtcttttccaatttgtagggaaatattttgggcatacagctacctctttggtgcctgtttccacggttgcaagtataaaaacgctatcccccatgtttatccttttgctccaaaagattttgaaaatatccactttgaaaattactttaactcttatctttagtttatgcactttagttcttggagtttggattatagttcaagaagataatcgttcaccggcctcttccaatgagctgagagaattctctaaatacggcgtaatatgcgctatgatatcaatgttcatttttgtcttgcaaaatatatatggcaagaccgtgttcacgtacagatctcaaacagatgaatctcaaagtaattctggattctcacggcaagaatcacctttacccttatatgaaaagttggatgagaaacttgttgcgaaaaagaaacctaaatcatatgacaaattgactttaatgatttatatttcccttgttggattttgtttatcgtttggctggtttatcactctagaatttcctgtactatttaggtatttttttcaaattaacagctcttctacagtaataaaagcttttccagtctctttatttttactgaacgggacattccacttcattcaggcaatgattacatttcatttactgggtgaggtctcaactttaacatattcaatagcgaatctgatgaagcgctttgccattattgcggttagttgggtctttattggaagaagaattacttggctgcaagtgttcggtttggttctgaacacattagggttattcctttatgaaagatgcacatcacaatcgaaaataaaagcgaaaatacgtcctgagtag

SEQ ID NO: 5768 - DNA, 1209 bp, Artificial Sequence
  Description of Artificial Sequence: Synthetic polynucleotide
atgtttcaacagttaagtgcatccattaggcacaatgcacacataatttttttatgcataagttggtattttatttcttctttggcatctcaggtaacgaagcaggtattgacggtttgcccattaccactttttttgggtgagtttcagttcatttatactgctgtgttggcatggtttacgtgttatattgcatatagtttcccaggattctatcgcatatttcctaatggtacttttccggaatattatatcgacgacagagaaactagccgtgcagctaggaaagaaagtaaactttcctccctcattataccgccctctaaaccaatcttgcaaacagttttacctttaggtcttttccaatttgtagggaaatattttgggcatacagctacctctttggtgcctgtttccacggttgcaagtataaaaacgttatcccccatgtttatccttttgctccaaaagattttgaaaatatccactttgaaaattactttaactcttatctttagtttatgcactttagttcttggagtttggattatagttcaagaagataatcgttctccggcctcttccaatgagttaagagaattctctaaatacggcgtaatatgcgctatgatatccatgttcatttttgtcttgcaaaatatatatggcaagaccgtgttcacgtacagatctcaaacagatgaatctcaaagtaattctggattcagtagacaagaatctcctttacccttatatgaaaagttggatgagaaacttgttgcgaaaaagaaacctaaaagttatgacaaattgactttaatgatttatatttcccttgttggattttgtttatcttttggctggtttatcactttggaatttcctgtattatttaggtatttttttcaaattaacagctcttctacagtaataaaagcttttccagtctctttatttttattaaacgggacattccacttcattcaggcaatgattacatttcatttattgggtgaggtctctactttaacatattctatagcgaatttaatgaagcgctttgccattattgcggttagttgggtctttattggaagaagaattacttggttacaagtgttcggtttggttttgaacacattagggttattcctttatgaaagatgcacatctcaaagtaaaataaaagcgaaaatacgtcctgagtga

SEQ ID NO: 5769 - DNA, 705 bp, Saccharomyces cerevisiae
atgttttcacagattgttcttttactcagtgcatttatttatgtcgccagtgctacggccaggagagggaccattaagggtcgcttagacttagcagcaagtaacatcaccggctttgtttcaactagaacaagtttcaaactttatcagatcggcaatttttcgacagaatatccttacacatctacgaccatgtttcaagatgacgaaggcaactttgaattcgctaatctccctttaaacgacggtgttaatgaaacgacatactatgtgatgtacccagcatctatggacttcaatctgaagccaaacagaattcttattgaattcaagaatttagagaatggcaccttacaattgaacgcgttcaagaacttttttggaagagaatatttcccatccaaagatataacgtacccagaaaaattacaatctatgaaggtgcacccttatattacagtggagcttttacataaggccccgattagatcttatttacaggctagaaacgtcagtatcttttctacaggtattgtgggtaatattttgaactcacgttggaaactggcgggcgttattaccttaattgcccttgtcgttttcccaatcatagtagaaaagttggaccccgaaacagctcgagccatcagagaggaggcaaaaagaaaacaaagagaaaagtatgctgccgttgcctcaaagtag

SEQ ID NO: 5770 - DNA, 705 bp, Artificial Sequence
  Description of Artificial Sequence: Synthetic polynucleotide
atgttttcccagattgttcttttactcagtgcatttatttatgtcgccagtgctacggccaggagagggaccattaagggtcgcttagacttagcagcaagtaacatcaccggctttgtttccactagaacaagtttcaaactttatcagatcggcaatttttctacagaatatccttacacatctacgaccatgtttcaagatgacgaaggcaactttgaattcgctaatctccctttaaacgacggtgttaatgaaacgacatactatgtgatgtacccagcatctatggacttcaatttgaagccaaacagaattcttattgaattcaagaatttagagaatggcaccttacaattgaacgcgttcaagaacttttttggaagagaatatttcccatccaaagatataacgtacccagaaaaattacaatctatgaaggtgcacccttatattacagtggagcttttacataaggccccgattagatcttatttacaggctagaaacgtcagtatcttttctacaggtattgtgggtaatattttgaactctcgttggaaattagcgggcgttattaccttaattgcccttgtcgttttcccaatcatagtagaaaagttggaccccgaaacagctagagccatcagagaggaggcaaaaagaaaacaaagagaaaagtatgctgccgttgcctccaagtga

SEQ ID NO: 5771 - DNA, 417 bp, Saccharomyces cerevisiae
atggctaacgaccttgttcaagctcgcgataactctcaagtctttggtgttgccagaatctacgcctcctttaacgatacctttgtacatgttaccgatttatctggtaaggaaactatcgccagagttactggtggtatgaaagtcaaggccgacagagacgaatcatctccatacgctgctatgttggctgcccaagatgttgccgctaagtgtaaggaagtcggtatcactgccgttcacgttaagatcagagctactggtggtaccagaaccaagaccccaggaccaggtggtcaagccgctttgagagctttggccagatctggtttgaggattggccgtatcgaagacgttactccagtcccatcagactccaccagaaagaagggtggtagaagaggtagaagattatga

SEQ ID NO: 5772 - DNA, 417 bp, Artificial Sequence
  Description of Artificial Sequence: Synthetic polynucleotide
atggctaacgaccttgttcaagctcgcgataactctcaagtctttggtgttgccagaatctacgcctcctttaacgatacctttgtacatgttaccgatttatctggtaaggaaactatcgccagagttactggtggtatgaaagtcaaggccgacagagacgaaagctctccatacgctgctatgttggctgcccaagatgttgccgctaagtgtaaggaagtcggtatcactgccgttcacgttaagatcagagctactggtggtaccagaaccaagaccccaggaccaggtggtcaagccgctttgagagctttggccagatctggtttgaggattggccgtatcgaagacgttactccagtcccatctgactccaccagaaagaagggtggtagaagaggtagaagattatga

SEQ ID NO: 5773 - DNA, 393 bp, Saccharomyces cerevisiae
atgaccagatcttccgttttagctgatgctttgaatgccattaacaacgctgaaaagaccggtaagcgtcaagttttaatcagaccatcctccaaggtcattatcaagtttttgcaagttatgcaaaagcacggttacattggtgaatttgaatacatcgatgaccacagatctggtaagattgttgttcaattgaacggtagattgaacaagtgtggtgttatttccccaagattcaacgttaagattggtgacattgaaaaatggactgccaacttgttgccagccagacaattcggttacgtcatcttgaccacctctgctggtatcatggaccatgaagaagccagaagaaagcacgtttctggtaagattttgggtttcgtttactaa

SEQ ID NO: 5774 - DNA, 393 bp, Artificial Sequence
  Description of Artificial Sequence: Synthetic polynucleotide
atgaccagatcttccgttttagctgatgctttgaatgccattaacaacgctgaaaagaccggtaagcgtcaagttttaatcagaccatcctccaaggtcattatcaagtttttgcaagttatgcaaaagcacggttacattggtgaatttgaatacatcgatgaccacagatctggtaagattgttgttcaattgaacggtagattgaacaagtgtggtgttatttccccaagattcaacgttaagattggtgacattgaaaaatggactgccaacttgttgccagccagacaattcggttacgtcatcttgaccacctctgctggtatcatggaccatgaagaagccagaagaaagcacgtttctggtaagattttgggtttcgtttactga

SEQ ID NO: 5775 - DNA, 156 bp, Saccharomyces cerevisiae
atggctgctcaaaagtctttcagaatcaagcaaaaaatggctaaggctaagaagcaaaacagaccattgccacaatggatcagattgagaaccaacaacactatccgttacaacgctaagagaagaaactggagaagaaccaagatgaacatctaa

SEQ ID NO: 5776 - DNA, 156 bp, Artificial Sequence
  Description of Artificial Sequence: Synthetic polynucleotide
atggctgctcaaaagtctttcagaatcaagcaaaaaatggctaaggctaagaagcaaaacagaccattgccacaatggatcagattgagaaccaacaacactatccgttacaacgctaagagaagaaactggagaagaaccaagatgaacatctga

SEQ ID NO: 5777 - DNA, 2460 bp, Saccharomyces cerevisiae
atgagttctttggacgaggatgaagaggacttcgaaatgctggacacggagaacctccagtttatggggaagaagatgtttggcaaacaggccggcgaagacgagagtgatgattttgctatagggggtagcaccccgaccaataaactgaaattttatccatattcgaacaacaaattgacaagaagtacggggaccttgaacctgtcattaagtaatacagctttgtcagaggctaactccaaatttcttgggaaaattgaagaagaggaagaagaggaggaagaaggcaaggatgaggaaagcgtggattctcgtattaaaaggtggtctccgttccatgaaaatgaaagtgttactactcctattacaaaaagatctgcggaaaaaacgaacagtcctatttctctcaaacaatggaaccagcgatggtttccgaaaaatgatgctcgcactgaaaatacatcctcatcctcttcatatagcgtcgctaaacctaaccaatcagcctttacgtcttcgggcctcgtatctaaaatgtctatggacacttcgttataccctgcgaaattgaggataccagaaacaccagtgaaaaaatcacccttagtggagggaagagaccataagcatgtccacctttcgagttcgaaaaatgcatcgtcttctctaagtgtttcccctttaaattttgttgaagacaataatttacaagaagaccttttattttcagattctccgtcttcgaaagctttaccttccatccatgtaccaaccatagactcatccccactgagcgaggcaaaatatcatgcacatgatcgtcacaataaccagacaaacatcctgtctcccactaatagcttggttaccaacagctctccacaaacattgcattctaacaagttcaaaaaaatcaaaagagcaaggaattcggttattttgaaaaatagagagctaacaaacagtttacaacaattcaaagatgatttatacggcacggacgagaatttcccacctccaatcataatatcaagtcatcattcaactagaaagaaccctcaaccttatcaatttcgtggacgctatgacaatgacactgacgaagagatctccactccaacaagacgaaaatctattattggggcaacatctcaaacacatagagaaagcagaccattgtcactctcctctgccatcgtgacaaacacaacaagtgcagagacgcattccatatcttccaccgattcttcgccgttaaattccaaaaggcgtctaatctcttcaaataagttatcagcaaatccagattcccatcttttcgaaaaatttacgaatgtgcattccattggtaaaggccagttttccacggtctaccaggttacgtttgcccaaacaaacaaaaagtatgcaatcaaagccattaaaccaaacaaatataattccttgaaacgcatattactggaaattaaaatactaaacgaggtaacaaaccaaattacaatggatcaagaagggaaggaatacatcatcgattacatcagttcctggaagtttcaaaattcatactatattatgacagaattgtgcgaaaatggtaatttggatggatttttacaagagcaagttatcgcaaagaaaaaaaggttggaagattggagaatttggaaaatcatcgtggaattaagcctggctttacgattcatccatgattcttgtcacattgtgcatctggacttgaaacccgcaaacgtcatgatcacatttgaaggtaacctaaaactaggtgactttggaatggctactcatttaccgttggaggataaaagttttgaaaatgaaggtgacagagaatatattgcaccagaaatcatttctgattgtacgtacgattacaaggcagatattttttccctgggtctgatgattgttgaaattgcagcgaacgttgtgttacctgacaatggcaacgcatggcataagttgagatcgggtgatttatcggatgcaggaagattaagttccacagatattcattctgaatcattattttcagacattacgaaagtagatacaaatgatttatttgattttgaaagagacaatatcagtggtaatagtaacaacgctggcacctccactgttcataacaatagtaatatcaacaaccctaatatgaataatggcaacgataataataatgtcaatactgccgctaccaagaatcgtcttattttgcataaaagttctaaaattcccgcatgggtaccgaaatttcttattgatggtgaatcacttgagagaatagtacgatggatgatagagcccaattatgagagaaggcccacggcaaatcaaatcttacaaactgaggaatgcctgtatgtagaaatgacacgcaatgcaggtgctattatccaggaagacgactttggacctaagccaaaattttttatatga

SEQ ID NO: 5778 - DNA, 2460 bp, Artificial Sequence
  Description of Artificial Sequence: Synthetic polynucleotide
atgagttctttggacgaggatgaagaggacttcgaaatgttggacacggagaacctccagtttatggggaagaagatgtttggcaaacaggccggcgaagacgagagtgatgattttgctatagggggtagcaccccgaccaataaattgaaattttatccatattccaacaacaaattgacaagaagtacggggaccttgaacttatctttaagtaatacagctttgagtgaggctaactccaaatttcttgggaaaattgaagaagaggaagaagaggaggaagaaggcaaggatgaggaaagcgtggattctcgtattaaaaggtggtctccgttccatgaaaatgaaagtgttactactcctattacaaaaagatctgcggaaaaaacgaacagtcctatttctctcaaacaatggaaccagaggtggtttccgaaaaatgatgctcgcactgaaaatacatcctcctcctcttcttatagcgtcgctaaacctaaccaatctgcctttacgtcttctggcctcgtatctaaaatgtctatggacacttctttataccctgcgaaattgaggataccagaaacaccagtgaaaaaaagtcccttagtggagggaagagaccataagcatgtccacctttccagttctaaaaatgcatcttcttctttgagtgtttcccctttaaattttgttgaagacaataatttacaagaagaccttttattttctgattctccgtcttctaaagctttaccttccatccatgtaccaaccatagactcttccccattaagcgaggcaaaatatcatgcacatgatcgtcacaataaccagacaaacatcctttctcccactaatagcttggttaccaacagctctccacaaacattgcattctaacaagttcaaaaaaatcaaaagagcaaggaattctgttattttgaaaaatagagagttgacaaacagtttacaacaattcaaagatgatttatacggcacggacgagaatttcccacctccaatcataatatctagtcatcattctactagaaagaaccctcaaccttatcaatttcgtggacgctatgacaatgacactgacgaagagatctccactccaacaagaagaaaatctattattggggcaacatctcaaacacatagagaaagcagaccattgtctctctcctctgccatcgtgacaaacacaacaagtgcagagacgcattccatatcttccaccgattcttctccgttaaattccaaaaggcgtttgatctcttccaataagttaagtgcaaatccagattcccatcttttcgaaaaatttacgaatgtgcattccattggtaaaggccagttttccacggtctaccaggttacgtttgcccaaacaaacaaaaagtatgcaatcaaagccattaaaccaaacaaatataattccttgaaacgcatattattggaaattaaaatattaaacgaggtaacaaaccaaattacaatggatcaagaagggaaggaatacatcatcgattacatcagttcctggaagtttcaaaattcttactatattatgacagaattgtgcgaaaatggtaatttggatggatttttacaagagcaagttatcgcaaagaaaaaaaggttggaagattggagaatttggaaaatcatcgtggaattaagccttgctttaagattcatccatgattcttgtcacattgtgcatttggacttgaaacccgcaaacgtcatgatcacatttgaaggtaacttgaaattgggtgactttggaatggctactcatttaccgttggaggataaaagttttgaaaatgaaggtgacagagaatatattgcaccagaaatcatttctgattgtacgtacgattacaaggcagatattttttccttgggtttgatgattgttgaaattgcagcgaacgttgtgttacctgacaatggcaacgcatggcataagttgagatctggtgatttaagtgatgcaggaagattaagttccacagatattcattctgaatctttattttctgacattacgaaagtagatacaaatgatttatttgattttgaaagagacaatatcagtggtaatagtaacaacgctggcacctccactgttcataacaatagtaatatcaacaaccctaatatgaataatggcaacgataataataatgtcaatactgccgctaccaagaatcgtcttattttgcataaaagttctaaaattcccgcatgggtaccgaaatttcttattgatggtgaatctcttgagagaatagtaagatggatgatagagcccaattatgagagaaggcccacggcaaatcaaatcttacaaactgaggaatgcttatatgtagaaatgacacgcaatgcaggtgctattatccaggaagacgactttggacctaagccaaaattttttatatga

SEQ ID NO: 5779 - DNA, 1761 bp, Saccharomyces cerevisiae
atgctgattaggttaaagaagagaaaaatcctgcaggtcatcgtgagcgcagtagtgctaattttatttttttgttctgtgcataatgatgtgtcttctagttggttatacggtaaaaagcttagattgccggttctaacaaggtcgaaccttaaaaacaatttttacacaacactggtacaagccatcgtggaaaacaagccggcagattcgtctccggacttgagtaagttgcatggggcggaagggtgtagctttgcaaataacgttgctgcacacgactctggacacgatagtgacttaagttacgagagcttgagtaaatgctataatttgaataaaacagtacaagaaagcctacgagaagtgcacagtaagtttacagacaccttatcagggaaactgaatttttccatcccacaaagagaggcacttttctcaggttctgagggcattgtcaccattggaggtggaaagtattctgtgctcgcgtatacgatgatcaaaaagttgagggacacgggtactacattgcctattgaagtcatcattccgcctcaggacgaaggcgaggatgatttttgtaagaactggttgccgaaattcaatggtaagtgcatttatttctcagatatcgttccttcaaagccattaagcgatttaaaactcacgcacttccagttgaaagtctttgggttgataatttccagtttcaagcgtattatcttcttggacgcagataactatgcggtgaaaaaccttgaccttgcttttaacactacatccttcaacgatactggcctgatattgtggcccgatttttggagacgtgtcacccctcccgccttttacaacattataggatctagcattaacatcggcaaaagagtccgttttgttagtgacgatatttcccccgtgtcacgttatgatccatttgttagtaactcaaacgattacactccaaaggagagacaggagcatttcctgaaacatgttcccttacatgatctggacggcacgatgccagacttgagctctgaatcaggccagatggtgattgataagattcgccatttcaacactctattactggcgctatactataatgtttatgggcctacctggtattataagatgatttctcaaggcactgccggtgaaggtgacaaagacactttcgtcgctgctgcccatgccttgaatatgccatactatcaagtgaggactaactttgaatttgatggtttcttctatcaaaaagatgattacaagggtctcgccttgctccagcatgattttgaacaagattacaagcaataccaaaaggcgcagcagaaagttaaagccaacattgaggaattttccaaactggatccagattatactttggacaatggtttcttgaaaactttgatggttaatgatgacggttctgatttggatatcatgttcattcatgccagtttctacaaggcagatccatggactctttatcatgaaaacagatttatcggtccaaatggcgaacaagtacggggcttcaggaagccgcatcgctatggaatggattttgaattgtttttattcaatgatatgagggggtccttctgtaccactccgaaaagccaagttattaaattcaagtattttaccgataaagttaataccccagaatgggatgcaatgtgtgagtatttgaccaatcatgttaattatctggagagcacacacaaagaagctatgggggagaaaaactaa

SEQ ID NO: 5780 - DNA, 1761 bp, Artificial Sequence
  Description of Artificial Sequence: Synthetic polynucleotide
atgttgattaggttaaagaagagaaaaatcttacaggtcatcgtgagcgcagtagtgttgattttatttttttgttctgtgcataatgatgtgtcttctagttggttatacggtaaaaagcttagattgccggttttgacaaggtctaaccttaaaaacaatttttacacaacattggtacaagccatcgtggaaaacaagccggcagattcttctccggacttgagtaagttgcatggggcggaagggtgtagctttgcaaataacgttgctgcacacgactctggacacgatagtgacttaagttacgagagcttgagtaaatgctataatttgaataaaacagtacaagaaagcttaagagaagtgcacagtaagtttacagacaccttaagtgggaaattgaatttttccatcccacaaagagaggcacttttctctggttctgagggcattgtcaccattggaggtggaaagtattctgtgctcgcgtatacgatgatcaaaaagttgagggacacgggtactacattgcctattgaagtcatcattccgcctcaggacgaaggcgaggatgatttttgtaagaactggttgccgaaattcaatggtaagtgcatttatttcagtgatatcgttccttctaagccattaagcgatttaaaactcacgcacttccagttgaaagtctttgggttgataatttccagtttcaagcgtattatcttcttggacgcagataactatgcggtgaaaaaccttgaccttgcttttaacactacatccttcaacgatactggcttgatattgtggcccgatttttggagacgtgtcacccctcccgccttttacaacattataggatctagcattaacatcggcaaaagagtccgttttgttagtgacgatatttcccccgtgtctcgttatgatccatttgttagtaactccaacgattacactccaaaggagagacaggagcatttcttgaaacatgttcccttacatgatttggacggcacgatgccagacttgagctctgaaagtggccagatggtgattgataagattcgccatttcaacactttattattggcgttgtactataatgtttatgggcctacctggtattataagatgatttctcaaggcactgccggtgaaggtgacaaagacactttcgtcgctgctgcccatgccttgaatatgccatactatcaagtgaggactaactttgaatttgatggtttcttctatcaaaaagatgattacaagggtctcgccttgctccagcatgattttgaacaagattacaagcaataccaaaaggcgcagcagaaagttaaagccaacattgaggaattttccaaattggatccagattatactttggacaatggtttcttgaaaactttgatggttaatgatgacggttctgatttggatatcatgttcattcatgccagtttctacaaggcagatccatggactctttatcatgaaaacagatttatcggtccaaatggcgaacaagtaagaggcttcaggaagccgcatcgctatggaatggattttgaattgtttttattcaatgatatgagggggtccttctgtaccactccgaaaagccaagttattaaattcaagtattttaccgataaagttaataccccagaatgggatgcaatgtgtgagtatttgaccaatcatgttaattatttggagagcacacacaaagaagctatgggggagaaaaactga

SEQ ID NO: 5781 - DNA, 882 bp, Saccharomyces cerevisiae
atggcatctgtgaacaattaccaggttgattgcgggtcaaggtctgctcgcattcaacccagaattaataacggcattcacgatgaagaatcgctatttgaagtcctggaactctcagaagaggaatttgagctagacttccatagattaaagtcattcaatgatgtaagggttatcaataacccagatttatctccagaatgtacaaatactgccattagtcgcgatgagacactggaatctgcaagtagtgccttcgaagttccttctgacgaaattgctatactgtcgatatccagtgacagcaataaaaattctccgccctcagagcagccggcgcccgctcttcgtaacattcgatcgtctagtaactctgaccggatcgatgagtggtgtttgggcagccatttatttaatgagctgcatcaaaatgtccctcaatcaagcgacggtgtcaatcatggatttcccgtttattcctttaaggaaagagaactttatacctctgcgaaattaaagaaacttacaaatgcccaaagaattgctgtgcagaaactatcaagagacttgtatccaattctaagaacatgctaccgcgagaaaactcgccggcaattattgacataccatcatgaaagaatatttgacgatataccatcttttttcccccagcgtgactttattttcaattactactcgatgcctcttgaattcgacaggttgtcagacgtagatatagattcgtcatcgcggtcacgatttacagatgagagcactggagaaacattaaaccgttcaccaagcgcagcgtcttcgtcgttggaaaacacatcttggtttggctggactttactttctaggtttttggacagagaatggtag

SEQ ID NO: 5782 - DNA, 882 bp, Artificial Sequence
  Description of Artificial Sequence: Synthetic polynucleotide
atggcatctgtgaacaattaccaggttgattgcgggtctaggtctgctcgcattcaacccagaattaataacggcattcacgatgaagaatctttatttgaagtcttggaactctctgaagaggaatttgagttggacttccatagattaaagagtttcaatgatgtaagggttatcaataacccagatttatctccagaatgtacaaatactgccattagtcgcgatgagacattagaatctgcaagtagtgccttcgaagttccttctgacgaaattgctatattatctatatccagtgacagcaataaaaattctccgccctctgagcagccggcgcccgctcttcgtaacattcgttcttctagtaactctgacagaatcgatgagtggtgtttgggcagccatttatttaatgagttacatcaaaatgtccctcaaagcagcgacggtgtcaatcatggatttcccgtttattcctttaaggaaagagaactttatacctctgcgaaattaaagaaacttacaaatgcccaaagaattgctgtgcagaaattatctagagacttgtatccaattttaagaacatgctaccgcgagaaaactcgccgtcaattattgacataccatcatgaaagaatatttgacgatataccatcttttttcccccagcgtgactttattttcaattactactccatgcctcttgaattcgacaggttgagtgacgtagatatagattcttcttccagatctagatttacagatgagagcactggagaaacattaaaccgttctccaagcgcagcgtcttcttctttggaaaacacatcttggtttggctggactttactttctaggtttttggacagagaatggtga

SEQ ID NO: 5783 - DNA, 372 bp, Saccharomyces cerevisiae
atgaaactaccggtagcacagtacagtgcaccagatggtgtggaaaaaagttttgcaccaatacgcgatgaccctcgatacatgaccacagagggaaggacaactgggcccagtgaccatgtgctaaacgctggccaaatcgatagagacaaaccttcagaaccggaacgcacgaaagatggctcacaactgacatacttaggccagctgcgcacgcagctgacggggctacaggacgatattaacgagtttttgacaggaagaatggaattggcaaaaaataagaagaaagccggcgcagacgagaagcggatccaggaagagattaaccagctattagatggtggtgacggtgacgaagatgctgtttag

SEQ ID NO: 5784 - DNA, 372 bp, Artificial Sequence
  Description of Artificial Sequence: Synthetic polynucleotide
atgaaattaccggtagcacagtacagtgcaccagatggtgtggaaaaaagttttgcaccaatacgcgatgaccctcgttacatgaccacagagggaaggacaactgggcccagtgaccatgtgttgaacgctggccaaatcgatagagacaaaccttctgaaccggaacgcacgaaagatggctctcaattgacatacttaggccagttgcgcacgcagttaacggggttgcaggacgatattaacgagtttttgacaggaagaatggaattggcaaaaaataagaagaaagccggcgcagacgagaagagaatccaggaagagattaaccagcttttagatggtggtgacggtgacgaagatgctgtttga

SEQ ID NO: 5785 - DNA, 1269 bp, Saccharomyces cerevisiae
atggcaatcaaaccaagaacgaagggcaaaacgtactcctcaagatcggtgggttcgcagtggttcaacaggcttggtttcaagcagaacaagtacggaacttgtaaatttttgtcgataataacggcctttgtttttatcctctatttcttctccaatcgcttctatccaatttctcgttccgccggtgcatcatattctccatcccatgggctgtatattaacgaaattcctgcctccagccggttgatttatccacatgtagaacatgtgcctgtgttaaaacaaatgaccgttaggggcctgtatattacgaggctagaagtggatggcagtaaaagattaattttgaaaccagaagagaatgctttgacagatgaagaaaaaaagaagactactgatcaaattctattagtgaagcactcgttcttagaccatggtaaattagtgtatcggaagagcaatgatgcacctgaagtggtcgtagtaaccctgatagattttgaaaactacgaattagaaacaattattcaaattgttcaaaatagggttgattacgctcaaaagcaccaatatggtgtatacattcgttggatacaggagtttttgcctgttcttgaaaatcagaatttggctgaaagctacgaattcattaagccattggtgataagagccgccatgcatgctttcccaactgccaagtatattcattttgttgatcaagatgctttattgatgaatctcgatctttctttacaaaaatacctgttagatccaaagattatggatttggctctattaaagaacgtccctgttgtggcgaattcaaacatcaagacatacaatcattttgaatatagttcggcaaagattatcattccacatgatgcggatggtaatattgatgcgtcctcatttgttattgccaatgacttttatggtaaagctctgatagactacttgaatgatccgttactgagaaatttcccatgggataataccggtgataagttgagtgctgctatcggtcatattttacagtggcatcctacattactgggtaagacggcaatcgtcataccaaaagttttggcaagtcagtacgatgcatccttggatcaagaaggtgagtctggaaacggtgcttctaatggcgatgtttaccattataatgaaggggacttggctgcctccttcaagggatgtagatcaagaggtacgtgtgctagtgaaataggtcacatgtaccagaaaatcaagaaatcttag

SEQ ID NO: 5786 - DNA, 1269 bp, Artificial Sequence
  Description of Artificial Sequence: Synthetic polynucleotide
atggcaatcaaaccaagaacgaagggcaaaacgtactccagcagatctgtgggttctcagtggttcaacaggcttggtttcaagcagaacaagtacggaacttgtaaatttttgagcataataacggcctttgtttttatcctctatttcttctccaatcgcttctatccaatttctcgttccgccggtgcaagttattctccatcccatgggttatatattaacgaaattcctgcctccagcagattgatttatccacatgtagaacatgtgcctgtgttaaaacaaatgaccgttaggggcttgtatattacgaggttagaagtggatggcagtaaaagattaattttgaaaccagaagagaatgctttgacagatgaagaaaaaaagaagactactgatcaaattttattagtgaagcactctttcttagaccatggtaaattagtgtatagaaagagcaatgatgcacctgaagtggtcgtagtaaccttaatagattttgaaaactacgaattagaaacaattattcaaattgttcaaaatagggttgattacgctcaaaagcaccaatatggtgtatacattcgttggatacaggagtttttgcctgttcttgaaaatcagaatttggctgaaagctacgaattcattaagccattggtgataagagccgccatgcatgctttcccaactgccaagtatattcattttgttgatcaagatgctttattgatgaatctcgatctttctttacaaaaatacttattagatccaaagattatggatttggctttattaaagaacgtccctgttgtggcgaatagcaacatcaagacatacaatcattttgaatatagttctgcaaagattatcattccacatgatgcggatggtaatattgatgcgtcctcttttgttattgccaatgacttttatggtaaagctttaatagactacttgaatgatccgttattaagaaatttcccatgggataataccggtgataagttgagtgctgctatcggtcatattttacagtggcatcctacattattgggtaagacggcaatcgtcataccaaaagttttggcaagtcagtacgatgcatccttggatcaagaaggtgagtctggaaacggtgcttctaatggcgatgtttaccattataatgaaggggacttggctgcctccttcaagggatgtagatctagaggtacgtgtgctagtgaaataggtcacatgtaccagaaaatcaagaaatcttga

SEQ ID NO: 5787 - DNA, 1836 bp, Saccharomyces cerevisiae
atggagatattcaaggaagaagaagaagaagctttttcggcgatagaaggtataatatatgcctgtgaggtgtatgaccctgtaccccgtcatttacataaaagcaaaacaaagatcatcaatgctgctaaattaattatagaaacgcatctttcatattatacaatactcaataacatttcagatatacaagcctatctttctacttggcttagggatcttggaacgacaggtccataccaaacaattctttcagaaagtatttctctcatgtttgaccgcactgtatctatcttcaggaaatgtacgatagagggaggttttccacatttgatcgcacgtctttatctcagattgaaaagctaccagaagctcttaaacgatgcaggattaaagaattttttttcaagctacgattatgctttcggggttgcatacaaccttgtaaattgctctgaatacaggtatgacgaagttcattacatatcgaacggcacttactcattagttgcatcgatgaagatagatcctgctgaagtcattaaaagggaacattttaggcttacaattccgaaatttaacatatctaatatattaattgaaatttttcatttgctcgatggattagcattttttaaggtgaaccctgatagtttatctatatctacagcttcagcagaaacaatctttcgcagtatctccgaaggtaatcatcaggtcctagaattggggagaagtttaatgtttccattgttgaggactggagattttgaaatctgtcgtattgacgacgcgggagctgtcataacatttacagaagcgaaggatgtaaaactagaaataatcagtctggatgaagtttcctgggtaatgcagtggaaatcttgtcttcaaaattatgagagaagggcagcaaatgacagttcatttatcaaaacacacctacaatttaagaaggccaacaatttcaatgaagataataatgggctaggactaattgtagacagaaatattccaacagatgattttacgctagcttctacaaaccgtcaaagtcccccgccttcaaatactggttgttcattacacaggtctaaacccttgcatatccctttatcatctgttattcgtgaagacttttatgatagctctctaaatgagcgtatatctaaagacggagatagcagttgtgaatccttcagtggcgccgaaagtatcttatcagactacgattttcatgataatgaattttttaacaaccagtcacctcattatttttcagaacacatagacaataactcgagagaggtggtaataacagatgaaaatacgataatatctttggaaaatacccaagtaagtcggtggtcaaattactcatggcaaaaaatttcaccgcatcaattacaggtctctattatccaactgcgcatgggaaacttcattgtggcttatgattctgattataaccttcatcagttcaaaattcgtttgtgtgacgatataaaatgtatacaatccacagagcaagacatacaaatacgtgtcccgctcggcgcaataatgtgcagcgtcactggtatcttgaatattaggacgaaggacgctgacaagttgcttcgggtattaagcttttataccactgaccacacggaagctgtatcgcactcaaacaatcaagatgctactgcaagtccactttcgtcagtttcatcagcaatggatctcaagcattcattacagaaatgttcctctacaataatgccccaagagttgacgcaggacgtcatcggttcaaaatcagacctaatcagtaatattcgtcaaaaaatataa

SEQ ID NO: 5788 - DNA, 1836 bp, Artificial Sequence
  Description of Artificial Sequence: Synthetic polynucleotide
atggagatattcaaggaagaagaagaagaagctttttctgcgatagaaggtataatatatgcctgtgaggtgtatgaccctgtaccccgtcatttacataaaagcaaaacaaagatcatcaatgctgctaaattaattatagaaacgcatctttcctattatacaatactcaataacatttctgatatacaagcctatctttctacttggcttagggatcttggaacgacaggtccataccaaacaattctttctgaaagtatttctctcatgtttgaccgcactgtatctatcttcaggaaatgtacgatagagggaggttttccacatttgatcgcacgtctttatctcagattgaaaagctaccagaagctcttaaacgatgcaggattaaagaattttttttctagctacgattatgctttcggggttgcatacaaccttgtaaattgctctgaatacaggtatgacgaagttcattacataagcaacggcacttactctttagttgcatctatgaagatagatcctgctgaagtcattaaaagggaacattttaggcttacaattccgaaatttaacatatctaatatattaattgaaatttttcatttgctcgatggattagcattttttaaggtgaaccctgatagtttatctatatctacagcttctgcagaaacaatctttcgcagtatctccgaaggtaatcatcaggtcttggaattggggagaagtttaatgtttccattgttgaggactggagattttgaaatctgtcgtattgacgacgcgggagctgtcataacatttacagaagcgaaggatgtaaaattagaaataatcagtttggatgaagtttcctgggtaatgcagtggaaatcttgtcttcaaaattatgagagaagggcagcaaatgacagttcttttatcaaaacacacttgcaatttaagaaggccaacaatttcaatgaagataataatgggttgggattgattgtagacagaaatattccaacagatgattttacgttggcttctacaaaccgtcaaagtcccccgccttccaatactggttgttctttacacaggtctaaacccttgcatatccctttatcttctgttattcgtgaagacttttatgatagctctttgaatgagcgtatatctaaagacggagatagcagttgtgaatccttcagtggcgccgaaagtatcttaagtgactacgattttcatgataatgaattttttaacaaccagtctcctcattatttttctgaacacatagacaataactctagagaggtggtaataacagatgaaaatacgataatatctttggaaaatacccaagtaagtagatggtctaattactcttggcaaaaaatttctccgcatcaattacaggtctctattatccaattgcgcatgggaaacttcattgtggcttatgattctgattataaccttcatcagttcaaaattcgtttgtgtgacgatataaaatgtatacaatccacagagcaagacatacaaatacgtgtcccgctcggcgcaataatgtgcagcgtcactggtatcttgaatattaggacgaaggacgctgacaagttgcttcgtgtattaagcttttataccactgaccacacggaagctgtaagccactccaacaatcaagatgctactgcaagtccactttcttctgtttcttctgcaatggatctcaagcattctttacagaaatgttcctctacaataatgccccaagagttgacgcaggacgtcatcggttccaaaagtgacttgatcagtaatattcgtcaaaaaatatga

SEQ ID NO: 5789 - DNA, 978 bp, Saccharomyces cerevisiae
atgctgccatcattaaggaagggatgcttcattgtgaattccataagattgaaactgccccgattctactcattaaatgcccagccactggggacagacaacacgattgagaataacactcctacggaaacaaatagattgagcaaaacttcacagaagttttgggaaaaggtgtcactaaatagggatgttgagaaaggaaagattgctctacaattagatggcaggactataaaaactcctctaggaaatggaattatagttgataatgcaaagtctctcttagcatacctattaaaactggagtggtcgtccctatccagtctttccatcaaaactcactctttgccactaacttcattagtggcaagatgcatagatttacaaatgacaaatgagcctggctgtgaccctcaattagttgcaaagattggaggcaacagtgatgttataaaaaatcagttgttaagatatttagataccgatactttattggtcttttcccctatgaatgagtttgaaggaagattacgcaatgcgcaaaatgagttatatatacccatcatcaaaggaatggaagagtttttacgcaacttttcatccgagtctaatattcgactacaaattttagatgccgacatccatgggttacgaggcaatcagcagtcggatatcgttaagaatgcagcaaaaaaatatatgagcagcttatcaccatgggatcttgcaattcttgaaaaaactgtattaaccacaaagtccttcatttgcggcgtgctattattagaaaataaaaaagatactgcgaacttaattcccgccttgaaaactgatatggataatattgtacgtgccgccaccttagaaacaatcttccaagttgaaaagtggggagaggttgaagatactcatgacgttgacaaaagagacatcagaagaaaaattcatactgctgcgattgctgcttttaagcaataa

SEQ ID NO: 5790 - DNA, 978 bp, Artificial Sequence
  Description of Artificial Sequence: Synthetic polynucleotide
atgcttccatctttaaggaagggatgcttcattgtgaattccataagattgaaattgcccagattctactctttaaatgcccagccattagggacagacaacacgattgagaataacactcctacggaaacaaatagattgagcaaaacttctcagaagttttgggaaaaggtgtctttgaatagggatgttgagaaaggaaagattgctttacaattagatggcaggactataaaaactcctttgggaaatggaattatagttgataatgcaaagtctctcttagcatacttattaaaattagagtggtcttccttgtccagtctttccatcaaaactcactctttgccattgacttctttagtggcaagatgcatagatttacaaatgacaaatgagcctggctgtgaccctcaattagttgcaaagattggaggcaacagtgatgttataaaaaatcagttgttaagatatttagataccgatactttattggtcttttcccctatgaatgagtttgaaggaagattacgcaatgcgcaaaatgagttatatatacccatcatcaaaggaatggaagagtttttacgcaacttttcttccgagtctaatattagattacaaattttagatgccgacatccatgggttaagaggcaatcagcagagcgatatcgttaagaatgcagcaaaaaaatatatgagcagcttatctccatgggatcttgcaattcttgaaaaaactgtattaaccacaaagtccttcatttgcggcgtgttattattagaaaataaaaaagatactgcgaacttaattcccgccttgaaaactgatatggataatattgtacgtgccgccaccttagaaacaatcttccaagttgaaaagtggggagaggttgaagatactcatgacgttgacaaaagagacatcagaagaaaaattcatactgctgcgattgctgcttttaagcaatga

SEQ ID NO: 5791 - DNA, 330 bp, Saccharomyces cerevisiae
atgtcacagatagcacaagaaatgacagtgagcttaagaaacgccaggacacaattggatatggtcaatcagcagctagcatatttggacagacaagaaaagcttgctgaattgacaaagaaagaactagagtcttatccaacggacaaagtatggagatcttgcggtaaatcgtttatcttacaggataaatccaaatacgttaatgatttatcacatgacgaaactgttcttctggatcaaagaaaaacattaaagataaagaagaactatttagaaactactgttgaaaaaacaatagacaatctaaaggcattgatgaagaattaa

SEQ ID NO: 5792 - DNA, 330 bp, Artificial Sequence
  Description of Artificial Sequence: Synthetic polynucleotide
atgtctcagatagcacaagaaatgacagtgagcttaagaaacgccaggacacaattggatatggtcaatcagcagttagcatatttggacagacaagaaaagcttgctgaattgacaaagaaagaattagagtcttatccaacggacaaagtatggagatcttgcggtaaaagttttatcttacaggataaatccaaatacgttaatgatttatctcatgacgaaactgttcttttagatcaaagaaaaacattaaagataaagaagaactatttagaaactactgttgaaaaaacaatagacaatttgaaggcattgatgaagaattga

SEQ ID NO: 5793 - DNA, 816 bp, Saccharomyces cerevisiae
atggtatcgaagacttggatatgtggcttcatcagtataattacagtggtacaggccttgtcctgcgagaagcatgatgtattgaaaaagtatcaggtgggaaaatttagctcactaacttctacggaaagggatactccgccaagcacaactattgaaaagtggtggataaacgtttgcgaagagcataacgtagaacctcctgaagaatgtaaaaaaaatgacatgctatgtggtttaacagatgtcatcttgcccggtaaggatgctatcaccactcaaattatagattttgacaaaaacattggcttcaatgtcgaggaaactgagagtgcgcttacattgacactaaaaggcgctacgtggggcgccaattcttttgacgcaaaactagaatttcagtgtaatgacaatatgaaacaagacgagctgactagtcacacatgggccgataaaagtatccaattgaccctaaaagggccatctggctgtttgaagagcaaagatgatgacaaaaaaaatggcgacggcgataatggtaaggatggtgacagcgaggggaaaaagccagctaagaaggcaggcgggacttcgtggttcacttggttattcctatacgctctactgtttacattgatatacctgatggttgtatcattcttgaataccagaggaggctcttttcaagatttccgtgctgagttcattcaacgttctactcaatttctcacttccttacctgaattctgcaaggaagtggtttcgagaatcttaggcagaagtaccgcccaaagaggcggttatagcgccgtttaa

SEQ ID NO: 5794 - DNA, 816 bp, Artificial Sequence
  Description of Artificial Sequence: Synthetic polynucleotide
atggtatccaagacttggatatgtggcttcatcagtataattacagtggtacaggccttgtcctgcgagaagcatgatgtattgaaaaagtatcaggtgggaaaatttagctctttgacttctacggaaagggatactccgccaagcacaactattgaaaagtggtggataaacgtttgcgaagagcataacgtagaacctcctgaagaatgtaaaaaaaatgacatgctttgtggtttaacagatgtcatcttgcccggtaaggatgctatcaccactcaaattatagattttgacaaaaacattggcttcaatgtcgaggaaactgagagtgcgcttacattgacattaaaaggcgctacgtggggcgccaattcttttgacgcaaaattagaatttcagtgtaatgacaatatgaaacaagacgagttaactagtcacacatgggccgataaaagtatccaattgaccttgaaagggccatctggctgtttgaagagcaaagatgatgacaaaaaaaatggcgacggcgataatggtaaggatggtgacagcgaggggaaaaagccagctaagaaggcaggcgggacttcttggttcacttggttattcttgtacgctttactttttacattgatatacttgatggttgtatctttcttgaataccagaggaggctcttttcaagatttccgtgctgagttcattcaacgttctactcaatttctcacttccttacctgaattctgcaaggaagtggtttctagaatcttaggcagaagtaccgcccaaagaggcggttatagcgccgtttga

SEQ ID NO: 5795 - DNA, 555 bp, Saccharomyces cerevisiae
atggcaagatacggtgctacttcaaccaacccagctaaatctgcgtcagctcgtggttcttatttgcgtgtttctttcaagaacaccagggaaactgctcaagccattaatggttgggaattgactaaggctcaaaaatacttggaccaagttttggaccaccaaagagccatcccattcagaagatttaactcctctattggtagaactgcccaaggtaaggaatttggtgtcaccaaggctagatggccagctaaatctgttaagttcgttcaaggtttgttgcaaaacgccgctgccaatgctgaagctaagggtctagatgctaccaagttgtacgtttctcacatccaagttaaccaagcaccaaagcaaagaagaagaacttacagagcccacggtagaatcaacaagtacgaatcttctccatctcacattgaattggttgttaccgaaaaggaagaagctgtcgccaaggctgctgaaaagaaggttgtcagattgacttctagacaaagaggtagaattgctgcccaaaaacgtatctctgcttaa

SEQ ID NO: 5796 - DNA, 555 bp, Artificial Sequence
  Description of Artificial Sequence: Synthetic polynucleotide
atggcaagatacggtgctacttctaccaacccagctaaatctgcgtctgctcgtggttcttatttgcgtgtttctttcaagaacaccagggaaactgctcaagccattaatggttgggaattgactaaggctcaaaaatacttggaccaagttttggaccaccaaagagccatcccattcagaagatttaactcctctattggtagaactgcccaaggtaaggaatttggtgtcaccaaggctagatggccagctaaatctgttaagttcgttcaaggtttgttgcaaaacgccgctgccaatgctgaagctaagggtttggatgctaccaagttgtacgtttctcacatccaagttaaccaagcaccaaagcaaagaagaagaacttacagagcccacggtagaatcaacaagtacgaatcttctccatctcacattgaattggttgttaccgaaaaggaagaagctgtcgccaaggctgctgaaaagaaggttgtcagattgacttctagacaaagaggtagaattgctgcccaaaaacgtatctctgcttga

SEQ ID NO: 5797 - DNA, 2478 bp, Saccharomyces cerevisiae
atggagaatacactgggtgaggggtccacggtaaacgcttccgtggacgtggaccaacatggcaatgacaacaatagtgatagcaacgctaatgcagctgtggcaggggttgccaatacagatactgctggtgaagaatcgcagcaacaagatgagtctctgaaggatgaagcaactgttccgaacacacgcgatgcagaaagtgaggcgataacggtaacggcaaagcagcagccgactatgcaagcgaataagctagattcccaggaaacaccttctacagaagaaagcagggcccagaacgtctttggccaagataatgaggatagtgataatctctttggcgaaaccgagagttctgtttcgaacaatgaggcaaacactcctagtatacctacgaacccggtagacaatgaaaacaataagcctgctattaaggaagacagcacaatacaggattcaaatggtgacgttaaaaacatggaggacgtcaaaatacaaaaagaggaagaaccagagaataacactgttattgaaggtgtcaaagaagaaagtcagccagatgagaacacaaaggaaatggatgaagtggaagaagatgatgaggatgacgatcaaccgatgattagtcctgataattccatttttggagacacaaagagtgagtctaaacaactaggcaacacttcgtcggttgctaatactccatctgaaattccagatgcgcataaagctgaacaggaggatatcatagaaaagacggaaagtgtagataagaaggtagatagtggcgaagagagaaacgaacaggaacgtgaaatcatgaacgatcactccaaaagtgccaatccaaagaaaaccactatcaccagagtagaacccgaaacttttgagataccgcaagcacatgaaattgttattccaagttattctaaatggttcaatctagaaaaaattcattccattgaagttcaatcgttacctgaatttttcaccaataggattccatcaaagacacctgaagtttacatgagatacagaaacttcatggtaaattcttacaggctgaaccccaacgaatatttcagtgtcactacggcgaggagaaacgtctctggtgatgctgctgcattattcagattgcataaattcttaacaaaatgggggctaataaactatcaggttgactccaaactattacctaagaacatcgaacccccactaacgtctcaatattccacaaggcatgatgcccccagaggactattcccattcgaaagttacaaaccatctgtacaactgccggatatggcaaagcttaaaaaaatgatgaacactagtgattcggagagtactttatataaatatttgaaagaaagcaaaagaaaatatgatgaaataactcacccccccagtaccactgatgatgaaaatggtgacaaaaatgataatggtggtaaaatgaacaatgaagtaagtacgtcaacaagcatgactggtgatgccaatctattggaagaaggcgaaacttcacgtcctctgaaaaaagtcaaaattctagaacaaattgatgaaaattggtcaaaagaagatttgcaaaagctattaaagggaatacaagaattcggcgctgactggtacaaagtggccaaaaacgttggcaataagtcgcctgaacagtgtatcttacgtttccttcaattgcccattgaagataaatttttatacggtgacggcaatggcaagggtgataatgacaacgggttaggacctttgaaatatgctcctcacttgccattttcgaagagcgaaaaccccgttttatcaacaatagcattcttggtgggtttggtcaatccgaagactgtacagtcgatgacccagagagccattcagtccgcagaatcaataaaatcacaaaaagaggaaatctctgaccaaaagccaattgaacatattaaagaaggttcagaaattgccatatcatcattgggttataggagtcatattttcgctaccaacgaggaaaggcaaatgaattttttgactaacgagctaataagacttcaaatggaaaaattggacgctaaattaaatcatttaaagaaactagaaaaatttatggagctagaaaggaaaaccctagaaagacaacaggaaaacttactaattcagagattgaacttcaaccaaaactccagcaagattgtaaacgttttaagcaaatgcttgaatttaatatccgacagcaatatcaataatagttcagtggcggagaaggaggaaatcaggtcgcagatagaccatttcaaaagtatgctatcgaaacctgaaactttaagtattggaaagaatccatttaacaaacctaatattgaaacaggtgaaaaccataatggccaaagtatatctaacgagaatgatgtcaaacccatttctattgaagcacctcaattttacaggtattggtcggcataa

SEQ ID NO: 5798 - DNA, 2478 bp, Artificial Sequence
  Description of Artificial Sequence: Synthetic polynucleotide
atggagaatacattaggtgaggggtccacggtaaacgcttccgtggacgtggaccaacatggcaatgacaacaatagtgatagcaacgctaatgcagctgtggcaggggttgccaatacagatactgctggtgaagaatctcagcaacaagatgagtctttgaaggatgaagcaactgttccgaacacacgcgatgcagaaagtgaggcgataacggtaacggcaaagcagcagccgactatgcaagcgaataagttggattcccaggaaacaccttctacagaagaaagcagggcccagaacgtctttggccaagataatgaggatagtgataatctctttggcgaaaccgagagttctgtttctaacaatgaggcaaacactcctagtatacctacgaacccggtagacaatgaaaacaataagcctgctattaaggaagacagcacaatacaggattctaatggtgacgttaaaaacatggaggacgtcaaaatacaaaaagaggaagaaccagagaataacactgttattgaaggtgtcaaagaagaaagtcagccagatgagaacacaaaggaaatggatgaagtggaagaagatgatgaggatgacgatcaaccgatgattagtcctgataattccatttttggagacacaaagagtgagtctaaacaattaggcaacacttcttctgttgctaatactccatctgaaattccagatgcgcataaagctgaacaggaggatatcatagaaaagacggaaagtgtagataagaaggtagatagtggcgaagagagaaacgaacaggaacgtgaaatcatgaacgatcactccaaaagtgccaatccaaagaaaaccactatcaccagagtagaacccgaaacttttgagataccgcaagcacatgaaattgttattccaagttattctaaatggttcaatttggaaaaaattcattccattgaagttcaatctttacctgaatttttcaccaataggattccatctaagacacctgaagtttacatgagatacagaaacttcatggtaaattcttacaggttaaaccccaacgaatatttcagtgtcactacggcgaggagaaacgtctctggtgatgctgctgcattattcagattgcataaattcttaacaaaatgggggttgataaactatcaggttgactccaaattattacctaagaacatcgaacccccattaacgtctcaatattccacaaggcatgatgcccccagaggattattcccattcgaaagttacaaaccatctgtacaattgccggatatggcaaagcttaaaaaaatgatgaacactagtgattctgagagtactttatataaatatttgaaagaaagcaaaagaaaatatgatgaaataactcacccccccagtaccactgatgatgaaaatggtgacaaaaatgataatggtggtaaaatgaacaatgaagtaagtacgagtacaagcatgactggtgatgccaatttattggaagaaggcgaaacttctcgtcctttgaaaaaagtcaaaattttggaacaaattgatgaaaattggtccaaagaagatttgcaaaagcttttaaagggaatacaagaattcggcgctgactggtacaaagtggccaaaaacgttggcaataagtctcctgaacagtgtatcttacgtttccttcaattgcccattgaagataaatttttatacggtgacggcaatggcaagggtgataatgacaacgggttaggacctttgaaatatgctcctcacttgccattttccaagagcgaaaaccccgttttatctacaatagcattcttggtgggtttggtcaatccgaagactgtacagtccatgacccagagagccattcagtccgcagaaagtataaaatctcaaaaagaggaaatctctgaccaaaagccaattgaacatattaaagaaggttctgaaattgccatatcttctttgggttataggagtcatattttcgctaccaacgaggaaaggcaaatgaattttttgactaacgagttgataagacttcaaatggaaaaattggacgctaaattaaatcatttaaagaaattagaaaaatttatggagttagaaaggaaaaccttagaaagacaacaggaaaacttattgattcagagattgaacttcaaccaaaactccagcaagattgtaaacgttttaagcaaatgcttgaatttaatatccgacagcaatatcaataatagttctgtggcggagaaggaggaaatcaggagccagatagaccatttcaaaagtatgctttctaaacctgaaactttaagtattggaaagaatccatttaacaaacctaatattgaaacaggtgaaaaccataatggccaaagtatatctaacgagaatgatgtcaaacccatttctattgaagcacctcaattttacaggtattggtctgcatga

SEQ ID NO: 5799 - DNA, 831 bp, Saccharomyces cerevisiae
atgcgtttacaaagaaattccatcatatgtgctttggtgtttttagtctcatttgtgctgggagatgtgaatattgtttcccccagctccaaggcaacattcagtccaagtggtggtactgtctctgttcccgttgaatggatggataatggggcatatccctcgttaagcaagatttcaactttcacgttcagtctttgtactggtcctaataacaacattgactgtgtggccgtacttgccagtaaaattactccaagtgagctaacacaagatgataaagtttactcttacacagctgagtttgcttcgaccttaactgggaacggtcaatattacattcaagtttttgcccaggtggacggtcaaggttacactatccattatacaccaagattccagttgacttccatgggcggtgttacggcttatacatatagtgccacaactgaacctactccccagacttctattcaaacaaccactacaaacaacgcccaagccactactattgacagtcgttcatttactgttccgtacaccaagcagactggtacgtcgcgtttcgctccaatgcaaatgcagccaaatactaaagtgaccgctaccacatggacaaggaaatttgccactagtgctgtgacatattactctacctttgggtcattgccagagcaagcaactacgataactcctggctggtcttatacgatatcatcgggagtaaactacgctactcctgcatctatgccttcagataatggtggttggtacaaaccatccaagagattgtctttgtctgcaaggaaaatcaacatgagaaaagtatga

SEQ ID NO: 5800 - DNA, 831 bp, Artificial Sequence
  Description of Artificial Sequence: Synthetic polynucleotide
atgcgtttacaaagaaattccatcatatgtgctttggtgtttttagtcagttttgtgttgggagatgtgaatattgtttcccccagctccaaggcaacattcagtccaagtggtggtactgtctctgttcccgttgaatggatggataatggggcatatccctctttaagcaagatttctactttcacgttcagtctttgtactggtcctaataacaacattgactgtgtggccgtacttgccagtaaaattactccaagtgagttgacacaagatgataaagtttactcttacacagctgagtttgctagcaccttaactgggaacggtcaatattacattcaagtttttgcccaggtggacggtcaaggttacactatccattatacaccaagattccagttgacttccatgggcggtgttacggcttatacatatagtgccacaactgaacctactccccagacttctattcaaacaaccactacaaacaacgcccaagccactactattgacagtcgttcttttactgttccgtacaccaagcagactggtacgagtcgtttcgctccaatgcaaatgcagccaaatactaaagtgaccgctaccacatggacaaggaaatttgccactagtgctgtgacatattactctacctttgggtctttgccagagcaagcaactacgataactcctggctggtcttatacgatatcttctggagtaaactacgctactcctgcatctatgccttctgataatggtggttggtacaaaccatccaagagattgtctttgtctgcaaggaaaatcaacatgagaaaagtatga

SEQ ID NO: 5801 - DNA, 369 bp, Saccharomyces cerevisiae
atggccagcgaaacaccaagagttgaccccacagaaatctccaacgtcaatgctcctgtgtttaggataatagcgcaaatcaaatcacaacccactgaatctcagttgattttacaatcgccaaccatatcatcgaaaaacggcagcgaggttgaaatgattacgttgaacaatattcgtgtatctatgaataaaacatttgagatcgactcgtggtatgagtttgtttgcaggaacaatgatgacggcgagctaggatttttgattctagacgctgtactatgcaaattcaaggagaacgaagatttaagcttaaacggtgtggttgctttacagagactatgtaagaaatacccagaaatatactag

SEQ ID NO: 5802 - DNA, 369 bp, Artificial Sequence
  Description of Artificial Sequence: Synthetic polynucleotide
atggccagcgaaacaccaagagttgaccccacagaaatctccaacgtcaatgctcctgtgtttaggataatagcgcaaatcaaatctcaacccactgaatctcagttgattttacaatctccaaccatatcttctaaaaacggcagcgaggttgaaatgattacgttgaacaatattcgtgtatctatgaataaaacatttgagatcgactcttggtatgagtttgtttgcaggaacaatgatgacggcgagttaggatttttgattttggacgctgtattgtgcaaattcaaggagaacgaagatttaagcttaaacggtgtggttgctttacagagattatgtaagaaatacccagaaatatactga

SEQ ID NO: 5803 - DNA, 1731 bp, Saccharomyces cerevisiae
atgatcgccttaccagtagagaaggcccctagaaagtccctatggcaaaggcacagagcctttattagtggaatagttgcccttattatcatcggcaccttcttcctcacttcgggtctccacccagcaccacctcatgaggcaaagcgtccacaccatggaaaaggtcccatgcactcacccaaatgtgagaagattgaaccattaagtccatcattcaaacattccgtcgacacaattcttcatgaccctgcctttagaaacagctccattgagaaactgtccaatgctgttagaatccccactgtagtccaagacaaaaaccccaaccccgcagatgatccggatttctataagcatttttatgaactacacgactattttgagaagactttccctaatattcacaagcatttgaaattggagaaagtcaatgagctgggtcttctatacacatgggaaggttctgatcctgatctaaaaccattattgttaatggcccatcaagatgttgtacctgtaaacaacgaaactttatcatcctggaagttccctccattttctggtcactatgatccagaaacagattttgtttgggggcgtggttctaacgattgtaagaacttgttaattgccgagtttgaagctatcgaacaactgttgatagatggattcaagcccaacagaactattgttatgtcgcttggttttgatgaagaagcaagcggcaccctcggtgctgccagcttagcctcatttcttcacgaaagatatggtgatgatggtatttacagtatcattgacgagggtgaaggtatcatggaagtcgacaaggatgtctttgttgccactccaatcaacgctgaaaaaggctatgtcgacttcgaagtcagtattctaggccatggtggtcattcctctgtcccacctgatcataccacaatcggtatcgcttcagaactgattactgaatttgaagccaacccatttgactacgaatttgagtttgacaatccaatctatggattgttgacatgtgctgctgaacattctaaatctttaagtaaggatgtgaagaagacaattttgggcgcaccattctgtcctagaaggaaggacaagcttgttgagtacatttccaaccaatcacatttgcgcagcttaataagaacaacacaagctgttgatatcatcaatggtggtgttaaagctaatgctctgcccgaaactaccagattcttgatcaatcacagaattaatttacattcttctgtggctgaagtctttgaaagaaacatagaatatgcgaaaaagattgctgagaagtatggctatggtttatctaagaacggtgacgattacattatccctgaaaccgagttaggtcacattgacattactctcttgagagaattggaaccagcaccactttcgccaagttcaggccctgtttgggacattttggcaggtactattcaagatgtttttgaaaacggtgttctacaaaacaacgaagagttctatgtgactactggtttattctctggtaacaccgatactaaatactactggaatttgtccaagaacatttataggtttgttggctctatcattgatattgatttactgaagacattgcattcggttaatgaacacgtggatgtcccaggtcatttatctgccattgcctttgtttacgagtatatcgttaatgttaacgaatacgcttaa

SEQ ID NO: 5804 - DNA, 1731 bp, Artificial Sequence
  Description of Artificial Sequence: Synthetic polynucleotide
atgatcgccttaccagtagagaaggcccctagaaagtccttatggcaaaggcacagagcctttattagtggaatagttgcccttattatcatcggcaccttcttcctcacttctggtctccacccagcaccacctcatgaggcaaagcgtccacaccatggaaaaggtcccatgcactcccccaaatgtgagaagattgaaccattaagtccatctttcaaacattccgtcgacacaattcttcatgaccctgcctttagaaacagctccattgagaaactttccaatgctgttagaatccccactgtagtccaagacaaaaaccccaaccccgcagatgatccggatttctataagcatttttatgaattgcacgactattttgagaagactttccctaatattcacaagcatttgaaattggagaaagtcaatgagttaggtcttttatacacatgggaaggttctgatcctgatttgaaaccattattgttaatggcccatcaagatgttgtacctgtaaacaacgaaactttatcttcctggaagttccctccattttctggtcactatgatccagaaacagattttgtttgggggcgtggttctaacgattgtaagaacttgttaattgccgagtttgaagctatcgaacaattattgatagatggattcaagcccaacagaactattgttatgtctcttggttttgatgaagaagcaagcggcaccctcggtgctgccagcttagcctcttttcttcacgaaagatatggtgatgatggtatttacagtatcattgacgagggtgaaggtatcatggaagtcgacaaggatgtctttgttgccactccaatcaacgctgaaaaaggctatgtcgacttcgaagtcagtattttgggccatggtggtcattcctctgtcccacctgatcataccacaatcggtatcgcttctgaattgattactgaatttgaagccaacccatttgactacgaatttgagtttgacaatccaatctatggattgttgacatgtgctgctgaacattctaaatctttaagtaaggatgtgaagaagacaattttgggcgcaccattctgtcctagaaggaaggacaagcttgttgagtacatttccaaccaatctcatttgcgcagcttaataagaacaacacaagctgttgatatcatcaatggtggtgttaaagctaatgctcttcccgaaactaccagattcttgatcaatcacagaattaatttacattcttctgtggctgaagtctttgaaagaaacatagaatatgcgaaaaagattgctgagaagtatggctatggtttatctaagaacggtgacgattacattatccctgaaaccgagttaggtcacattgacattactctcttgagagaattggaaccagcaccactttctccaagttctggccctgtttgggacattttggcaggtactattcaagatgtttttgaaaacggtgttttgcaaaacaacgaagagttctatgtgactactggtttattctctggtaacaccgatactaaatactactggaatttgtccaagaacatttataggtttgttggctctatcattgatattgatttattgaagacattgcattctgttaatgaacacgtggatgtcccaggtcatttatctgccattgcctttgtttacgagtatatcgttaatgttaacgaatacgcttga

SEQ ID NO: 5805 - DNA, 1191 bp, Saccharomyces cerevisiae
atgttacagagtatagtcctttccgtgtgcatgtttatgttgcacacagtcgctgccagtggacctcagtcgtaccaaaagttggatttcactaatgttggttttacaggctcctacgtagatgtgaataagtttaaagatatcaccaacaatgaatcgtgtacttgcgaagtgggtgacagagtatggtttagtggtaagaacgctccactagcagactatttatccgttcatttccgtggaccattgaagttgaaacaatttgctttttacacatcccctggatttaccgtcaacaacagcagaagttcttctgattggaaccgtcttgcctactatgagtccagttccaaaaccgctgataacgttacctttctaaatcatggaggtgaagcttccccttgtttaggaaatgctttgtcctacgctagttctaacggtactggcagcgccagtgaagctaccgttttggcagatggcactttgatttcttcagatcaagaatacataatctattcgaatgtctcatgtccaaaatcaggttatgataagggttgtggggtttaccgtagtggcattccagcttactatgggtacggaggtacaacaaagatgtttttgtttgaattcgaaatgcctactgaaactgagaaaaatagcagctctattgggtactatgacttgcctgctatttggttgctaaacgatcacattgcaaggacttctcaatatccaaccaatgccaactgttcatgttgggctagtggatgtggggaatacgatatttttgaagctatgaatggtacggagaaaaaccatctctattctactttccacactttccaaggtatcgaggatttgggtactggtatccaatcttacggatacataacaagaaatactactggaacgatgaaaggtggtgttgttttcgattctagtggaaatgtcgtttctttcatatctgatgccactccattcaatggaactgtttctgctgatactgttaacgatttattggctgcaattccagaaaacgaaacctattcttctcaattgatgagcatttctgctactgcgccttcgaccacctcgaagtcgaatggtgttgctttaacgaagatgcaaaacggtgtatggtattatattttggccatattcactgcctttacgcaagtggttttgatttga

SEQ ID NO: 5806 - DNA, 1191 bp, Artificial Sequence
  Description of Artificial Sequence: Synthetic polynucleotide
atgttacagagtatagtcctttccgtgtgcatgtttatgttgcacacagtcgctgccagtggacctcagtcttaccaaaagttggatttcactaatgttggttttacaggctcctacgtagatgtgaataagtttaaagatatcaccaacaatgaaagttgtacttgcgaagtgggtgacagagtatggtttagtggtaagaacgctccattggcagactatttatccgttcatttccgtggaccattgaagttgaaacaatttgctttttacacatcccctggatttaccgtcaacaacagcagaagttcttctgattggaaccgtcttgcctactatgagtccagttccaaaaccgctgataacgttacctttttgaatcatggaggtgaagcttccccttgtttaggaaatgctttgtcctacgctagttctaacggtactggcagcgccagtgaagctaccgttttggcagatggcactttgatttcttctgatcaagaatacataatctattctaatgtctcctgtccaaaatctggttatgataagggttgtggggtttaccgtagtggcattccagcttactatgggtacggaggtacaacaaagatgtttttgtttgaattcgaaatgcctactgaaactgagaaaaatagcagctctattgggtactatgacttgcctgctatttggttgttgaacgatcacattgcaaggacttctcaatatccaaccaatgccaactgttcttgttgggctagtggatgtggggaatacgatatttttgaagctatgaatggtacggagaaaaaccatctctattctactttccacactttccaaggtatcgaggatttgggtactggtatccaatcttacggatacataacaagaaatactactggaacgatgaaaggtggtgttgttttcgattctagtggaaatgtcgtttctttcatatctgatgccactccattcaatggaactgtttctgctgatactgttaacgatttattggctgcaattccagaaaacgaaacctattcttctcaattgatgagcatttctgctactgcgccttctaccacctccaagagcaatggtgttgctttaacgaagatgcaaaacggtgtatggtattatattttggccatattcactgcctttacgcaagtggttttgatttga

SEQ ID NO: 5807 - DNA, 630 bp, Saccharomyces cerevisiae
atgactactttagcatcaagtattgagcataaaacaaaacatctagccgcgcccttcgagaacgatgagaacccttggatgaaaaaatactgttgccaatgcaaatcatgtaaaatgagtgtgcctgtccaaccttggctgccaaggttttttgtttttggaatcttgtgccccgttttctggttggtgaatcttttagcctggtggttcttacagtattggcaaccacatgaattggaattccacgacttgcaagaagacgaatacccaggattttatgaatatgaagccataactaaaagaacggtgatacccataaaggaagaagtcctccaagagattcgcgtcatgcagaatttcagtgatagcaacagcgaagaatattacgagagcaaagacggtatgccgtcgtctttcctaaacgtgaacacggaacaagtcgaggacgagaatgacaccttgaaaaaatatcgttacgcgtttttgaagaaggtagcccacgatgtgctggagtcgcacgatttattacgtaagaccttccgcgactggaatttacggtctttgcttggcctcctcatcgattctatactcataatatttgtagttctcctatgtaagaaaagccgttag

SEQ ID NO: 5808 - DNA, 630 bp, Artificial Sequence
  Description of Artificial Sequence: Synthetic polynucleotide
atgactactttagcaagtagtattgagcataaaacaaaacatttggccgcgcccttcgagaacgatgagaacccttggatgaaaaaatactgttgccaatgcaaaagttgtaaaatgagtgtgcctgtccaaccttggttaccaaggttttttgtttttggaatcttgtgccccgttttctggttggtgaatcttttagcctggtggttcttacagtattggcaaccacatgaattggaattccacgacttgcaagaagacgaatacccaggattttatgaatatgaagccataactaaaagaacggtgatacccataaaggaagaagtcctccaagagattcgcgtcatgcagaatttcagtgatagcaacagcgaagaatattacgagagcaaagacggtatgccgtcttctttcttgaacgtgaacacggaacaagtcgaggacgagaatgacaccttgaaaaaatatcgttacgcgtttttgaagaaggtagcccacgatgtgttggagtctcacgatttattacgtaagaccttccgcgactggaatttaagatctttgcttggcctcctcatcgattctatactcataatatttgtagttctcttatgtaagaaaagccgttga

SEQ ID NO: 5809 - DNA, 2202 bp, Saccharomyces cerevisiae
atgtcgaagaaccaaagtgtgagtgcgtcggaagatgaaaaagaaatactgaataacaacgctgagggccataaacctcaaaggctttttgatcaagagcctgatctcacagaggaagcattgaccaaatttgaaaacttggatgactgtatatatgcgaacaagaggatcggaacatttaagaataatgatttcatggaatgtgactgttatgaagaattctcagatggcgtcaaccatgcctgtgacgaggattctgactgtatcaatagacttacgttgatagaatgtgtcaacgatttgtgttcatcttgtggtaatgattgtcaaaatcagagatttcaaaagaagcagtacgctccgatagccatatttaaaacaaagcataaaggttatggcgtaagagccgaacaggacatagaagccaaccagttcatttacgagtacaaaggtgaggtgatcgaggagatggaatttagagataggttaatagactatgaccaacgtcatttcaagcatttttattttatgatgttacagaacggagaattcattgacgccacaataaagggttcgttggccagattttgcaatcactcttgcagccccaatgcatatgttaataaatgggttgttaaggataagctacgcatgggaatatttgctcaaagaaaaattttaaaaggtgaggaaatcacttttgattataatgtggatcgttatggtgctcaagctcagaaatgctactgtgaggagccaaattgtattgggtttctcggtggtaagactcaaacagatgcggcatctttattgccccagaacatcgctgatgccttgggagtgactgtttccatggagaaaaaatggctaaagttaaagaaattaagcggtgagccaataataaagaatgaaaacgagaacataaatattgaatttcttcaatcattggaagtccaacctatcgacagcccagtggatgtgacgaagatcatgagtgtattactacagcaagataataagataattgcatccaaactcttgaagagactttttactatcgatgatgactctcttcgtcatcaggctatcaaactacacggttacacctgttttagcaaaatgcttaaattgtttatcacggaacaacctcaggtagatggaaaaggaaacgagactgaagaagatgatataaagtttataaagggaattttagattttttgttggaattaccaaagacaactcgaaacggtattgagtcgtcacaaattgataatgtagtaaaaactctccctgcaaagtttccatttttaaagccaaactgcgatgagttattggagaaatggtcgaaatttgaaacatataaaaggataacgaagaaagacataaacgtcgcagccagcaaaatgatagatttgagaagggtgagattacctccaggctgggagatcattcacgaaaacggtcgcccattgtattataatgcagaacagaaaacgaaactacactatccaccttcgggatcatctaaggtctttagttcaaggtcaaatacacaagtaaattctccgagtagcagtggaataccaaaaacgcctggcgctttagactctaagaaacataagctgagtgacgaagaatatgagaggaagaaacaaaaaagactggaatacgaaagaattgcgctagaaagagccaaacaagaagaattggaaagcctgaagcaaaagctaaagcttgagaatgaaagaaaaagcgttttggaggatattatagcggaggccaacaaacagaaggagttacaaaaggaagaggccaaaaaactagtggaagcaaaagaggctaagcggttgaaaagaaaaacggtctcccagtcccaaagactagagcacaactggaataaattctttgcatcttttgtacccaacttaataaaaaaaaacccacaaagtaaacaatttgatcatgaaaacattaaacaatgtgctaaagacatcgtgaaaatcctaactacaaaggaacttaaaaaagattcttcaagagcgccgcctgatgacttaaccaaaggaaaaaggcataaagttaaagaattcataaattcatacatggataagattatcctcaagaagaagcaaaaaaaggcgttggcattatcatcagcatcaacaaggatgtcttctcctccaccttcaacatcatcataa

SEQ ID NO: 5810 - DNA, 2202 bp, Artificial Sequence
  Description of Artificial Sequence: Synthetic polynucleotide
atgtccaagaaccaaagtgtgagtgcgtctgaagatgaaaaagaaatattgaataacaacgctgagggccataaacctcaaaggctttttgatcaagagcctgatctcacagaggaagcattgaccaaatttgaaaacttggatgactgtatatatgcgaacaagaggatcggaacatttaagaataatgatttcatggaatgtgactgttatgaagaattcagtgatggcgtcaaccatgcctgtgacgaggattctgactgtatcaatagacttacgttgatagaatgtgtcaacgatttgtgttcttcttgtggtaatgattgtcaaaatcagagatttcaaaagaagcagtacgctccgatagccatatttaaaacaaagcataaaggttatggcgtaagagccgaacaggacatagaagccaaccagttcatttacgagtacaaaggtgaggtgatcgaggagatggaatttagagataggttaatagactatgaccaacgtcatttcaagcatttttattttatgatgttacagaacggagaattcattgacgccacaataaagggttctttggccagattttgcaatcactcttgcagccccaatgcatatgttaataaatgggttgttaaggataagttgcgcatgggaatatttgctcaaagaaaaattttaaaaggtgaggaaatcacttttgattataatgtggatcgttatggtgctcaagctcagaaatgctactgtgaggagccaaattgtattgggtttctcggtggtaagactcaaacagatgcggcatctttattgccccagaacatcgctgatgccttgggagtgactgtttccatggagaaaaaatggttaaagttaaagaaattaagcggtgagccaataataaagaatgaaaacgagaacataaatattgaatttcttcaatctttggaagtccaacctatcgacagcccagtggatgtgacgaagatcatgagtgtattattgcagcaagataataagataattgcatccaaactcttgaagagactttttactatcgatgatgactctcttcgtcatcaggctatcaaattacacggttacacctgttttagcaaaatgcttaaattgtttatcacggaacaacctcaggtagatggaaaaggaaacgagactgaagaagatgatataaagtttataaagggaattttagattttttgttggaattaccaaagacaactagaaacggtattgagtcttctcaaattgataatgtagtaaaaactctccctgcaaagtttccatttttaaagccaaactgcgatgagttattggagaaatggtccaaatttgaaacatataaaaggataacgaagaaagacataaacgtcgcagccagcaaaatgatagatttgagaagggtgagattacctccaggctgggagatcattcacgaaaacggtcgcccattgtattataatgcagaacagaaaacgaaattacactatccaccttctggatcttctaaggtctttagttctaggtctaatacacaagtaaattctccgagtagcagtggaataccaaaaacgcctggcgctttagactctaagaaacataagttgagtgacgaagaatatgagaggaagaaacaaaaaagattagaatacgaaagaattgcgttagaaagagccaaacaagaagaattggaaagcttgaagcaaaagttgaagcttgagaatgaaagaaaaagcgttttggaggatattatagcggaggccaacaaacagaaggagttacaaaaggaagaggccaaaaaattagtggaagcaaaagaggctaagagattgaaaagaaaaacggtctcccagtcccaaagattggagcacaactggaataaattctttgcatcttttgtacccaacttaataaaaaaaaacccacaaagtaaacaatttgatcatgaaaacattaaacaatgtgctaaagacatcgtgaaaatcttgactacaaaggaacttaaaaaagattcttctagagcgccgcctgatgacttaaccaaaggaaaaaggcataaagttaaagaattcataaattcttacatggataagattatcctcaagaagaagcaaaaaaaggcgttggcattatcttctgcaagcacaaggatgtcttctcctccaccttctacatcttcttga

SEQ ID NO: 5811 - DNA, 1059 bp, Saccharomyces cerevisiae
atggcttcagaaaaagaaattaggagagagagattcttgaacgttttccctaaattagtagaggaattgaacgcatcgcttttggcttacggtatgcctaaggaagcatgtgactggtatgcccactcattgaactacaacactccaggcggtaagctaaatagaggtttgtccgttgtggacacgtatgctattctctccaacaagaccgttgaacaattggggcaagaagaatacgaaaaggttgccattctaggttggtgcattgagttgttgcaggcttacttcttggtcgccgatgatatgatggacaagtccattaccagaagaggccaaccatgttggtacaaggttcctgaagttggggaaattgccatcaatgacgcattcatgttagaggctgctatctacaagcttttgaaatctcacttcagaaacgaaaaatactacatagatatcaccgaattgttccatgaggtcaccttccaaaccgaattgggccaattgatggacttaatcactgcacctgaagacaaagtcgacttgagtaagttctccctaaagaagcactccttcatagttactttcaagactgcttactattctttctacttgcctgtcgcattggccatgtacgttgccggtatcacggatgaaaaggatttgaaacaagccagagatgtcttgattccattgggtgaatacttccaaattcaagatgactacttagactgcttcggtaccccagaacagatcggtaagatcggtacagatatccaagataacaaatgttcttgggtaatcaacaaggcattggaacttgcttccgcagaacaaagaaagactttagacgaaaattacggtaagaaggactcagtcgcagaagccaaatgcaaaaagattttcaatgacttgaaaattgaacagctataccacgaatatgaagagtctattgccaaggatttgaaggccaaaatttctcaggtcgatgagtctcgtggcttcaaagctgatgtcttaactgcgttcttgaacaaagtttacaagagaagcaaatag

SEQ ID NO: 5812 - DNA, 1059 bp, Artificial Sequence
  Description of Artificial Sequence: Synthetic polynucleotide
atggcttctgaaaaagaaattaggagagagagattcttgaacgttttccctaaattagtagaggaattgaacgcatctcttttggcttacggtatgcctaaggaagcatgtgactggtatgcccactctttgaactacaacactccaggcggtaagttgaatagaggtttgtccgttgtggacacgtatgctattctctccaacaagaccgttgaacaattggggcaagaagaatacgaaaaggttgccattttgggttggtgcattgagttgttgcaggcttacttcttggtcgccgatgatatgatggacaagtccattaccagaagaggccaaccatgttggtacaaggttcctgaagttggggaaattgccatcaatgacgcattcatgttagaggctgctatctacaagcttttgaaatctcacttcagaaacgaaaaatactacatagatatcaccgaattgttccatgaggtcaccttccaaaccgaattgggccaattgatggacttaatcactgcacctgaagacaaagtcgacttgagtaagttctccttgaagaagcactccttcatagttactttcaagactgcttactattctttctacttgcctgtcgcattggccatgtacgttgccggtatcacggatgaaaaggatttgaaacaagccagagatgtcttgattccattgggtgaatacttccaaattcaagatgactacttagactgcttcggtaccccagaacagatcggtaagatcggtacagatatccaagataacaaatgttcttgggtaatcaacaaggcattggaacttgcttccgcagaacaaagaaagactttagacgaaaattacggtaagaaggactctgtcgcagaagccaaatgcaaaaagattttcaatgacttgaaaattgaacagttataccacgaatatgaagagtctattgccaaggatttgaaggccaaaatttctcaggtcgatgagtctcgtggcttcaaagctgatgtcttaactgcgttcttgaacaaagtttacaagagaagcaaatga

SEQ ID NO: 5813 - DNA, 285 bp, Saccharomyces cerevisiae
atgggtcctccaagcggtaaaacttacatgggatggtggggtcacatgggtggtccaaagcaaaaaggtataacctcatatgctgtgtctccatatgctcaaaagccattacaaggtattttccataacgctgtattcaatagttttagaagatttaagtctcaatttctatatgtattaatacctgcgggaatttattggtactggtggaagaacggtaacgagtataatgaatttctgtacagcaaagctggtagagaagagctggaaagagttaatgtttaa

SEQ ID NO: 5814 - DNA, 285 bp, Artificial Sequence
  Description of Artificial Sequence: Synthetic polynucleotide
atgggtcctccaagcggtaaaacttacatgggatggtggggtcacatgggtggtccaaagcaaaaaggtataacctcttatgctgtgtctccatatgctcaaaagccattacaaggtattttccataacgctgtattcaatagttttagaagatttaagtctcaatttttatatgtattaatacctgcgggaatttattggtactggtggaagaacggtaacgagtataatgaatttttgtacagcaaagctggtagagaagagttagaaagagttaatgtttga

SEQ ID NO: 5815 - DNA, 2568 bp, Saccharomyces cerevisiae
atgggagatgagaagctttcacgccacacatctttgaagagggccagatcgctctccgaatccattaagggtctatttaagccttcagggatatcaggcagtaataatgctgcggctccttcatctcgtcccggtcaggaccaagcacattctcatcaaacagcaagaataataactagcaacgtatcttccccgtctatatcccccgtacatagccctgttctacaagcggctcctaagcatcacaaactgggcgtccctaatattgcaaaactctcgttgtcacctagtagggaaccatctttgaattcagaaaatgaaatgttttcacaagaatctttcataagtgaaaaagatgaagatgaagccaatttgttagagagagaggatcttcaaaataaaaaggaagagaaagctcgtgcaaaacatgtacgttccaaggaagcttatgtgcctcatcaccgctatacagttggtagcgatgaggttgaaagacaaccaagggaacggctgaaaaacttcccacaaaacgcaggttcttcaaaccctgcaaatagtaatgccaaccatgttttggatcaggaaaataacttttctattgatgctatgcttgattatgacgaagaatcaaaacttagaaggagaaacagtctgggcgtacgtaatcatagcaatcgcacaagaagtaggaagaacagtttgtccacaccaaggtcaccaccaatgaaaaatggaaatggtggaatgaattcaaatgccaccaacaatgttggtaatggtacaggaaatagaatatacatgaggggaagaaatcactcagactctatcagtgcttccagcttaccgaaatttcaagaaatcgaatgtaaatgtattttggatttaggtcatttcaaagtctttgaaaacggataccacgaacattctttgagagtgctgccaattattacaaacaataaaaatgtggatagtggcgatgaaaaggatgctgacgcttctgtaaacagcggcgatgatggtgacaatgacagtgaggcaaatatgcataaacaaaaatctgtgttttctttaagtggattattcaaatctcataaggatggaaaccaacaacagcagcaacagcagcaacaagaagaaaacggcgaacaaatcaatctagaaaaagcattttcaataataccatcccagagattcatcaaatcgcagactttaaagaaatcgagaacgagtaaccttaaaaatggcaataatgatgaattgatgaaaaacgatggtaaaaatattccgcaaatcgtgaatcctaacgctgctgtaggtgttgaagagttgaagctaatcaatgcattatcggaaaaaatacgaaagggccttaaaagtgaaaatacaaaaggcaacaatggcgaaggcagaagcaatagcaataaacaggaggattctgatgacacagagggcaaggcaggaacaaccaatgacgatacatctcataaaccttgttcacaaaaatacggaaaatctattggggtcgtcggtgcaggtgcatacggggtggtcaaaatttgcgcaaggtgcaagactgctaaagatgtcctaccatacagtacctactctaatggaaaaaaactattctttgccgtcaaagagctgaagcccaagccaggtgaccaaattgataaattttgcacgagattaacctctgagttcattattggacactcactgagccatccgcattttgaggcaaatgcgatgatagcaggaaatgtttcaagaaccactccaccaaaacatgtcttcaatgccccaaacattttgaaaattttggacctaatggaatatagcaattccttcgtagaagtgatggaattttgtgcttcaggtgatttatattcgttgctaacaaggaataacatctcaaatgaatcgaataacgggagttcaagattgatccaaactgttaaagaaggttctgggagtccgttgcacccattagaagcagactgttttatgaaacagcttttgaatggtgttcaatacatgcatgatcatggtatagcacactgtgatttgaaacccgaaaatatccttttccaacctaatgggttgttaaaaatttgtgattttggtactagttcagtttttcagactgcctgggagaaacacgtccacttccagagtggagccatgggttcagagccatatgtggcacctgaagaatttataagggatgcagaatacgatccgcgtctggtagattgttggagttgtggtattgtttactgtacaatggtcatgggacagtatctttggaaaatcgccattcctgaaaaggattctctttttaaatcatttctcagtgaaattaaagatgatggacagttttatctatttgaggaattaagacatgttagtagcgaactgaataggttgaggaaaattgcactatatagaacgttccaggtcgaccccacgaagagaatcaccattgaacaattactacaaagctcctggatgaggaaaacaaaatgctgtgtagtttatagacacttacataccaaggttagtaaataa

SEQ ID NO: 5816 - DNA, 2568 bp, Artificial Sequence
  Description of Artificial Sequence: Synthetic polynucleotide
atgggagatgagaagctttcccgccacacatctttgaagagggccagaagtctctccgaatccattaagggtttatttaagccttctgggatatctggcagtaataatgctgcggctccttcttctcgtcccggtcaggaccaagcacattctcatcaaacagcaagaataataactagcaacgtatcttccccgtctatatcccccgtacatagccctgttttgcaagcggctcctaagcatcacaaattgggcgtccctaatattgcaaaactctctttgtctcctagtagggaaccatctttgaattctgaaaatgaaatgttttctcaagaatctttcataagtgaaaaagatgaagatgaagccaatttgttagagagagaggatcttcaaaataaaaaggaagagaaagctcgtgcaaaacatgtacgttccaaggaagcttatgtgcctcatcaccgctatacagttggtagcgatgaggttgaaagacaaccaagggaaagattgaaaaacttcccacaaaacgcaggttcttccaaccctgcaaatagtaatgccaaccatgttttggatcaggaaaataacttttctattgatgctatgcttgattatgacgaagaaagtaaacttagaaggagaaacagtttgggcgtacgtaatcatagcaatcgcacaagaagtaggaagaacagtttgtccacaccaaggtctccaccaatgaaaaatggaaatggtggaatgaatagtaatgccaccaacaatgttggtaatggtacaggaaatagaatatacatgaggggaagaaatcactctgactctatcagtgcttccagcttaccgaaatttcaagaaatcgaatgtaaatgtattttggatttaggtcatttcaaagtctttgaaaacggataccacgaacattctttgagagtgttaccaattattacaaacaataaaaatgtggatagtggcgatgaaaaggatgctgacgcttctgtaaacagcggcgatgatggtgacaatgacagtgaggcaaatatgcataaacaaaaatctgtgttttctttaagtggattattcaaatctcataaggatggaaaccaacaacagcagcaacagcagcaacaagaagaaaacggcgaacaaatcaatttggaaaaagcattttccataataccatcccagagattcatcaaatctcagactttaaagaaatctagaacgagtaaccttaaaaatggcaataatgatgaattgatgaaaaacgatggtaaaaatattccgcaaatcgtgaatcctaacgctgctgtaggtgttgaagagttgaagttaatcaatgcattatctgaaaaaataagaaagggccttaaaagtgaaaatacaaaaggcaacaatggcgaaggcagaagcaatagcaataaacaggaggattctgatgacacagagggcaaggcaggaacaaccaatgacgatacatctcataaaccttgttctcaaaaatacggaaaatctattggggtcgtcggtgcaggtgcatacggggtggtcaaaatttgcgcaaggtgcaagactgctaaagatgtcttgccatacagtacctactctaatggaaaaaaattattctttgccgtcaaagagttgaagcccaagccaggtgaccaaattgataaattttgcacgagattaacctctgagttcattattggacactctttaagccatccgcattttgaggcaaatgcgatgatagcaggaaatgtttctagaaccactccaccaaaacatgtcttcaatgccccaaacattttgaaaattttggacttgatggaatatagcaattccttcgtagaagtgatggaattttgtgcttctggtgatttatattctttgttgacaaggaataacatctctaatgaaagtaataacgggagtagtagattgatccaaactgttaaagaaggttctgggagtccgttgcacccattagaagcagactgttttatgaaacagcttttgaatggtgttcaatacatgcatgatcatggtatagcacactgtgatttgaaacccgaaaatatccttttccaacctaatgggttgttaaaaatttgtgattttggtactagttctgtttttcagactgcctgggagaaacacgtccacttccagagtggagccatgggttctgagccatatgtggcacctgaagaatttataagggatgcagaatacgatccgcgtttagtagattgttggagttgtggtattgtttactgtacaatggtcatgggacagtatctttggaaaatcgccattcctgaaaaggattctctttttaaaagttttctcagtgaaattaaagatgatggacagttttatttatttgaggaattaagacatgttagtagcgaattgaataggttgaggaaaattgcattatatagaacgttccaggtcgaccccacgaagagaatcaccattgaacaattattacaaagctcctggatgaggaaaacaaaatgctgtgtagtttatagacacttacataccaaggttagtaaatga

SEQ ID NO: 5817 - DNA, 1194 bp, Saccharomyces cerevisiae
atgtcgactgaagaacaaaatggaggtggtcaaaagtctctagatgatagacaaggtgaggaatcacaaaaaggtgagactagtgaaagggaaacaacagccacagagagcggtaacgaaagtaagtctgtagaaaaagagggtggagaaacccaagaaaaaccgaagcagccacatgtcacttattacaatgaggagcagtataaacagtttattgcccaagcgagagttacaagtgggaagtatagtttacaagactttcagatattaaggacactgggtacgggttcttttggtagggtccatttgattagatcaagacataatggcagatactacgccatgaaagttttgaaaaaggaaatcgtggtaagattgaaacaggtggagcataccaacgacgagcgattgatgctttctatcgtaacacatccgtttattattagaatgtgggggactttccaagatgctcagcaaattttcatgattatggattatattgaaggtggagaattgttttctttgttaaggaaatcccaaagatttcccaacccagttgctaaattttacgcagcggaagtttgtttagctttggagtacttgcatagcaaggacattatttatagggatttgaaaccggaaaatatcttgcttgataaaaacgggcatataaagataacagatttcgggtttgccaaatacgttcctgacgtcacatatacattatgcggtactcccgactacatagcacccgaggtcgttagtactaaaccatataataaatctatcgattggtggagtttcggtattctgatttacgaaatgctagcaggatacacgccattttacgactctaacacgatgaaaacctatgagaaaatcttgaatgccgaattgagatttccaccatttttcaacgaagatgtaaaggacctgttgagtagattgatcacaagagacttaagtcaaagactaggtaatttacaaaatggtacagaagatgtcaaaaaccacccctggttcaaagaagttgtctgggaaaaattattatctagaaacatagaaacgccgtatgaaccgcccattcaacagggacaaggtgacacctcacagttcgataagtacccggaagaagacatcaactacggtgttcaaggtgaagacccatatgctgatcttttccgggacttctaa

SEQ ID NO: 5818 - DNA, 1194 bp, Artificial Sequence
  Description of Artificial Sequence: Synthetic polynucleotide
atgtctactgaagaacaaaatggaggtggtcaaaagtctttagatgatagacaaggtgaggaatctcaaaaaggtgagactagtgaaagggaaacaacagccacagagagcggtaacgaaagtaagtctgtagaaaaagagggtggagaaacccaagaaaaaccgaagcagccacatgtcacttattacaatgaggagcagtataaacagtttattgcccaagcgagagttacaagtgggaagtatagtttacaagactttcagatattaaggacattaggtacgggttcttttggtagggtccatttgattagatctagacataatggcagatactacgccatgaaagttttgaaaaaggaaatcgtggtaagattgaaacaggtggagcataccaacgacgagagattgatgctttctatcgtaacacatccgtttattattagaatgtgggggactttccaagatgctcagcaaattttcatgattatggattatattgaaggtggagaattgttttctttgttaaggaaatcccaaagatttcccaacccagttgctaaattttacgcagcggaagtttgtttagctttggagtacttgcatagcaaggacattatttatagggatttgaaaccggaaaatatcttgcttgataaaaacgggcatataaagataacagatttcgggtttgccaaatacgttcctgacgtcacatatacattatgcggtactcccgactacatagcacccgaggtcgttagtactaaaccatataataaatctatcgattggtggagtttcggtattttaatttacgaaatgttagcaggatacacgccattttacgactctaacacgatgaaaacctatgagaaaatcttgaatgccgaattgagatttccaccatttttcaacgaagatgtaaaggacttgttgagtagattgatcacaagagacttaagtcaaagattaggtaatttacaaaatggtacagaagatgtcaaaaaccacccctggttcaaagaagttgtctgggaaaaattattatctagaaacatagaaacgccgtatgaaccgcccattcaacagggacaaggtgacacctctcagttcgataagtacccggaagaagacatcaactacggtgttcaaggtgaagacccatatgctgatcttttcagggacttctga

SEQ ID NO: 5819 - DNA, 1668 bp, Saccharomyces cerevisiae
atgtcaaacgaggatgaaacaactcgtttaatgtcttcagatgagatggactatttattggaaacggctgggatcaacgccttggaagaaatcattagtcaaaatgacagtactggaataaatttggatactaatgaaacagctcaggacagtagctatgactctatccggcgctcccccagtattttgagtgttgccaaaagcgttgagggagagcatggacgtagaaaactattatgcctttacggccttgttatgattatctgtattgcggagtctatttctatgactgctacaataccgttggtgatggacaaggtagcggaaggaatttcagatgagaatggacattatgattccgtggctgtacagacaatagtttccagcatttcttcatccactatgatgatagcaggggcaatcagtattttcatggctggtaagtggggagaattatccgatagaataggaagagtgcgtgttttcaaatacatgagcggcatcagggtcatagggcttcttacgcacgtctttaccctatcatcgaaaatgaagtatcacaaatgggctattgttcttactgcgtgtatcgtaccatcattcggtggcttgtttgcgctagtggcgaatggaaatagttacgtttcagatatagtgaaaactgagcacagaatggtgacaataggaataatgatgagttgtatatatgccactatgggcgtaggcccaatgtttgggtcctttctggtgaagtggactcatggaaacgggttcattcctatttacacatcaatagcgtttgttatactggcgcttataatatgtgagacaatcatggtggaaccgcgccatgaaacccaaatggcccattcacaatcaacttatacaaagaggagagagaaactaagatcacaatcgggttctgacgatgcaagaaattaccaatccgttacttatggaaaatttcaaataatgaggttaatggacctgctcgctccagtaaaaaagttatggctgaagcccgacagtgcagggtctttagtaccccggcataccgtaatattactcattgtactcgatatactatttgtctgtggaacgacatcgtgtatgccagcattgattttgttttctacatatgagtacaaatggcatgcagtagagctaggttatttcatatcgatactgggtatcggaagaggtgttgtgttactggtcgtatcacctacattactgtacacgctaaagaggatttatcaacacttgaaccattcgatagacaagatagacatcttttgcatacagttttctatgattgttataacactgagtctctttgtcatgatacgatttggcgagaaaactcccacatccatgataatattcgctcttttacaggcattgagcgcgttttgttcaccaactttgcagtctggtatcataaagtacacctctaagaaacatacaggcgagatgttcggagcaatggctttggtaaggtcctgtgttatgcttgtcatccctcccatcctccttaagctatatggaagtactgtctccgttaatcctagtctgtttatgtatataccgttctcaacaagtattgttgccatcttgttgacattcttcctaagaatttacaagaaccctccgctggacgggccttaa

SEQ ID NO: 5820 - DNA, 1668 bp, Artificial Sequence
  Description of Artificial Sequence: Synthetic polynucleotide
atgtccaacgaggatgaaacaactcgtttaatgtcttctgatgagatggactatttattggaaacggctgggatcaacgccttggaagaaatcattagtcaaaatgacagtactggaataaatttggatactaatgaaacagctcaggacagtagctatgactctatcagacgctcccccagtattttgagtgttgccaaaagcgttgagggagagcatggacgtagaaaattattatgcctttacggccttgttatgattatctgtattgcggagtctatttctatgactgctacaataccgttggtgatggacaaggtagcggaaggaatttctgatgagaatggacattatgattccgtggctgtacagacaatagtttccagcatttcttcttccactatgatgatagcaggggcaatcagtattttcatggctggtaagtggggagaattatccgatagaataggaagagtgcgtgttttcaaatacatgagcggcatcagggtcatagggcttcttacgcacgtctttaccttatcttctaaaatgaagtatcacaaatgggctattgttcttactgcgtgtatcgtaccatctttcggtggcttgtttgcgttagtggcgaatggaaatagttacgtttctgatatagtgaaaactgagcacagaatggtgacaataggaataatgatgagttgtatatatgccactatgggcgtaggcccaatgtttgggtcctttttagtgaagtggactcatggaaacgggttcattcctatttacacatctatagcgtttgttatattggcgcttataatatgtgagacaatcatggtggaaccgcgccatgaaacccaaatggcccattctcaatctacttatacaaagaggagagagaaattgagatctcaatctggttctgacgatgcaagaaattaccaatccgttacttatggaaaatttcaaataatgaggttaatggacttactcgctccagtaaaaaagttatggttaaagcccgacagtgcagggtctttagtaccccgtcataccgtaatattactcattgtactcgatatattgtttgtctgtggaacgacatcttgtatgccagcattgattttgttttctacatatgagtacaaatggcatgcagtagagttaggttatttcatatccatattaggtatcggaagaggtgttgtgttattggtcgtatctcctacattattgtacacgttgaagaggatttatcaacacttgaaccattccatagacaagatagacatcttttgcatacagttttctatgattgttataacattgagtctctttgtcatgataagatttggcgagaaaactcccacatccatgataatattcgctcttttacaggcattgagcgcgttttgttctccaactttgcagtctggtatcataaagtacacctctaagaaacatacaggcgagatgttcggagcaatggctttggtaaggtcctgtgttatgcttgtcatccctcccatcctccttaagctttatggaagtactgtctccgttaatcctagtttatttatgtatataccgttcagtacaagtattgttgccatcttgttgacattcttcttaagaatttacaagaaccctccgttagacgggccttga

SEQ ID NO: 5821 - DNA, 1752 bp, Saccharomyces cerevisiae
atgtcacaggtaatagaaccacaattagatagaacaacctattattccatattaggcttgacatcaaatgcgacttcctccgaagtacataaatcatatctaaaactggccagattacttcacccagataaaacaaaatctgataagtctgaggaattattcaaagctgtggtgcatgcacattcaattttaactgatgaagatcaaaaacttcgatatgatcgagatttgaaaatcaaaggtttacacacttaccagccgaagaaaaactgtcatattttcaagaccaaggcaaaggaatcacaaggggctagtcccacacttggtcaatcagaagcttatcataggcaaaataaaccttatgagcaacagccctacggtttcggtgtaggcaaaaaaatgacctcaagctctaagagtaaggttccgatattcaagtccttcaatttaaaaagctaccaacgaaaccactattattcatccaaaaaggaaaggaaacatggaagtcctgatattgattctttgttccatgaaaccaatggagcctcaaaagtaagaatgactgatgccggtaaaatggatacgaactctcagttccaagaaatatgggaaatattgggtaaaaatgcgtacacacataaatcttactctgaagatccaaattcatgtttgggatcagcactaagcgatcatgaagaagaagaagaagcaggaaaacaacaacagcaacagcagcaacaacagcaacagcagcaacattatggaatgacgtcgaagtctagcagtcctgatgaagaaaaaaaaaataataaagaaccgaaaagggaaagcagagtctctccagaggaaaatggcgaagaagaaacgggacacaaacaatttaaattgcccaagaccagtactttttctagtggatcccatgattcaaatttgcaatctcctttttacaatcatgagtatcgacattacgcaagaagtaaattcgaatgcaagaatcagtttagaaagtcagtttctcccattaaagagatacctgcaacaactagtgccaatgaaggatggaacattttgagagacattattgaaaaactcaatataagcaatgtagacgatcgaaataaagacttgctgtttcgtcgggatgaaataggtgataaaaatcacagcgactcaatcgacatagaaaatttatctatcaaagaacctaaagggatgaaaaggagaaagaaagatgatatatctttagaagaattgttccaatctttaccaagagaaaaagattattttatgatggatgcaattaatgactcgttagaatcaatcaatctttttaaaaagccgaagaccactcagagtcacgaacaaggtggaacttttgcccaagcagaaagtaatcgtgcaaaattcaaaccgttactagaacagtgtggaattacacccgagatcttagatttggaaataccagagattccggaatttgatgcagtggctgaccttgaaacattgaagcttaacgtgcagctgtttaataaccaatgtaacaaacttaaagaaacaatacatcaagtatcattacagcgcctgagagcagatacgcagttcagtgatatgttaacccaaaagcaaagtattatggtttggaaaacatacctagaatttgataaaagtttaatggacaaattgaacatcttacaagaaagacagatgcaggtcattaaaattttttccgaaagatgtgacggtaaagtataa

SEQ ID NO: 5822 - DNA, 1752 bp, Artificial Sequence
  Description of Artificial Sequence: Synthetic polynucleotide
atgtctcaggtaatagaaccacaattagatagaacaacctattattccatattaggcttgacaagtaatgcgacttcctccgaagtacataaaagttatttgaaattggccagattacttcacccagataaaacaaaatctgataagtctgaggaattattcaaagctgtggtgcatgcacattctattttaactgatgaagatcaaaaacttcgttatgatagagatttgaaaatcaaaggtttacacacttaccagccgaagaaaaactgtcatattttcaagaccaaggcaaaggaatctcaaggggctagtcccacacttggtcaaagtgaagcttatcataggcaaaataaaccttatgagcaacagccctacggtttcggtgtaggcaaaaaaatgaccagtagctctaagagtaaggttccgatattcaagtccttcaatttaaaaagctaccaaagaaaccactattattcttccaaaaaggaaaggaaacatggaagtcctgatattgattctttgttccatgaaaccaatggagcctccaaagtaagaatgactgatgccggtaaaatggatacgaactctcagttccaagaaatatgggaaatattgggtaaaaatgcgtacacacataaatcttactctgaagatccaaattcttgtttgggaagtgcattaagcgatcatgaagaagaagaagaagcaggaaaacaacaacagcaacagcagcaacaacagcaacagcagcaacattatggaatgacgtccaagtctagcagtcctgatgaagaaaaaaaaaataataaagaaccgaaaagggaaagcagagtctctccagaggaaaatggcgaagaagaaacgggacacaaacaatttaaattgcccaagaccagtactttttctagtggatcccatgattctaatttgcaatctcctttttacaatcatgagtatagacattacgcaagaagtaaattcgaatgcaagaatcagtttagaaagtctgtttctcccattaaagagatacctgcaacaactagtgccaatgaaggatggaacattttgagagacattattgaaaaactcaatataagcaatgtagacgatagaaataaagacttgttatttcgtcgtgatgaaataggtgataaaaatcacagcgactctatcgacatagaaaatttatctatcaaagaacctaaagggatgaaaaggagaaagaaagatgatatatctttagaagaattgttccaatctttaccaagagaaaaagattattttatgatggatgcaattaatgactctttagaaagtatcaatctttttaaaaagccgaagaccactcagagtcacgaacaaggtggaacttttgcccaagcagaaagtaatcgtgcaaaattcaaaccgttattggaacagtgtggaattacacccgagatcttagatttggaaataccagagattccggaatttgatgcagtggctgaccttgaaacattgaagcttaacgtgcagttatttaataaccaatgtaacaaacttaaagaaacaatacatcaagtatctttacagcgcttgagagcagatacgcagttcagtgatatgttaacccaaaagcaaagtattatggtttggaaaacatacttggaatttgataaaagtttaatggacaaattgaacatcttacaagaaagacagatgcaggtcattaaaattttttccgaaagatgtgacggtaaagtatga

SEQ ID NO: 5823 - DNA, 543 bp, Saccharomyces cerevisiae
atgctatacacaaggttgttacgtcacaactcacaattcaccaagttttcaggcacatcgcccaatcttggctcaaaacctttattttcgaagggtaatttgtacactagtcttttagtgacaacactgtatgggacaggtctggcatgcctatatctagaatcaaatagcttgaataagtccaaagagcaagaagatccccatgccatcgcagaagacgacattgtaaatatagtccatgacgctcccaatagaatattcaagccagcacttgatacctatcaagagaaagagcttgacttacaaaagagtgacctccataaagtacttcattctttgacgtacagtgatgtctctcaattttcgattgtttgggggtttctcattcaactttcgagcctaataggcaattccaccttaggcaaaaaatccattctttataagggaagtgtcgttagtgttttagggttcccaccgttgatttatatggcacttaaacttaggatgaaacagctggaaaaagctggagtgcgctttgagtaa

SEQ ID NO: 5824 - DNA, 543 bp, Artificial Sequence
  Description of Artificial Sequence: Synthetic polynucleotide
atgctttacacaaggttgttacgtcacaactctcaattcaccaagttttctggcacatctcccaatcttggctctaaacctttattttccaagggtaatttgtacactagtcttttagtgacaacattatatgggacaggtttggcatgcttatatttggaaagtaatagcttgaataagtccaaagagcaagaagatccccatgccatcgcagaagacgacattgtaaatatagtccatgacgctcccaatagaatattcaagccagcacttgatacctatcaagagaaagagcttgacttacaaaagagtgacctccataaagtacttcattctttgacgtacagtgatgtctctcaattttctattgtttgggggtttctcattcaactttctagcttgataggcaattccaccttaggcaaaaaatccattctttataagggaagtgtcgttagtgttttagggttcccaccgttgatttatatggcacttaaacttaggatgaaacagttagaaaaagctggagtgcgctttgagtga

SEQ ID NO: 5825 - DNA, 864 bp, Saccharomyces cerevisiae
atgcattacaagaaagcatttctagcatctctattaagtagtattgcgctaactgcgtacgctccacctgaaccctgggcaactttaactccaagctctaaaatggatggtggcacaacagagtaccggacctcattcggtctcgctgttatacctttcaccgttactgaaagtaaggtcaaaagaaacgtcatttcacaaattaatgacggtcaagtgcaagtaacgacacaaaaattacctcatccagtttcgcaaattggagacggccaaatacaagttacaacgcagaaggtgcctccagtagtgtcacatattgtgtcacaaataggcgatggtcaattacaaataactacagctaaaaatgttgtcacaaagtccacaattgctgttccaagtaaaactgtaactgcgacagcaacttcaaccgcaactgctgtttctcagattcatgatggtcaagtgcaagttactatttcttcagccagtagtagttctgtgctttccaagagtaagttagagccaacaaagaaaccaaataatgaaaaagtgatcaaggtgcaagcctgtaaaagttctggcaccttggcaataacgttacaaggaggtgttcttattgactccagtggtagaattggatcgatagtagcaaacagacagttccaatttgatggtccacctccacaggcgggcgctatttacgctggcggctggtcgataacgaagcatggcactttagctattggtgataatgacgtgttttaccaatgtctgtcgggcactttctataacctttacgatcagtctatcgggggccagtgcaatcccgttcatttacaaacagttggtctcgtcgattgttga

SEQ ID NO: 5826 - DNA, 864 bp, Artificial Sequence
  Description of Artificial Sequence: Synthetic polynucleotide
atgcattacaagaaagcatttttggcatctttattaagtagtattgcgttgactgcgtacgctccacctgaaccctgggcaactttaactccaagctctaaaatggatggtggcacaacagagtacaggaccagtttcggtctcgctgttatacctttcaccgttactgaaagtaaggtcaaaagaaacgtcatttctcaaattaatgacggtcaagtgcaagtaacgacacaaaaattacctcatccagtttctcaaattggagacggccaaatacaagttacaacgcagaaggtgcctccagtagtgtctcatattgtgagtcaaataggcgatggtcaattacaaataactacagctaaaaatgttgtcacaaagtccacaattgctgttccaagtaaaactgtaactgcgacagcaacttctaccgcaactgctgtttctcagattcatgatggtcaagtgcaagttactatttcttctgccagtagtagttctgtgctttccaagagtaagttagagccaacaaagaaaccaaataatgaaaaagtgatcaaggtgcaagcctgtaaaagttctggcaccttggcaataacgttacaaggaggtgttcttattgactccagtggtagaattggatccatagtagcaaacagacagttccaatttgatggtccacctccacaggcgggcgctatttacgctggcggctggtccataacgaagcatggcactttagctattggtgataatgacgtgttttaccaatgtctttctggcactttctataacctttacgatcagtctatcgggggccagtgcaatcccgttcatttacaaacagttggtctcgtcgattgttga

SEQ ID NO: 5827 - DNA, 1242 bp, Saccharomyces cerevisiae
atgcaatacaaaaagactttggttgcctctgctttggccgctactacattggccgcctatgctccatctgagccttggtccactttgactccaacagccacttacagcggtggtgttaccgactacgcttccaccttcggtattgccgttcaaccaatctccactacatccagcgcatcatctgcagccaccacagcctcatctaaggccaagagagctgcttcccaaattggtgatggtcaagtccaagctgctaccactactgcttctgtctctaccaagagtaccgctgccgccgtttctcagatcggtgatggtcaaatccaagctactactaagactaccgctgctgctgtctctcaaattggtgatggtcaaattcaagctaccaccaagactacctctgctaagactaccgccgctgccgtttctcaaatcagtgatggtcaaatccaagctaccaccactactttagccccaaagagcaccgctgctgccgtttctcaaatcggtgatggtcaagttcaagctaccaccactactttagccccaaagagcaccgctgctgccgtttctcaaatcggtgatggtcaagttcaagctactactaagactaccgctgctgctgtctctcaaattggtgatggtcaagttcaagctaccaccaagactactgctgccgccgtttctcaaatcggtgatggtcaagttcaagctactaccaagactaccgctgctgctgtctctcaaatcggtgatggtcaagttcaagcaactaccaaaaccactgccgcagctgtttcccaaattactgacggtcaagttcaagccactacaaaaaccactcaagcagccagccaagtaagcgatggccaagtccaagctactactgctacttccgcttctgcagccgctacctccactgacccagtcgatgctgtctcctgtaagacttctggtaccttagaaatgaacttaaagggcggtatcttaactgacggtaagggtagaattggttctattgttgctaacagacaattccaatttgacggtccaccaccacaagctggtgccatctacgctgctggttggtctataactccagacggtaacttggctattggtgacaatgatgtcttctaccaatgtttgtccggtactttctacaacttgtacgacgaacacattggtagtcaatgtactccagtccacttggaagctatcgatttgatagactgttaa

SEQ ID NO: 5828 - DNA, 1242 bp, Artificial Sequence
  Description of Artificial Sequence: Synthetic polynucleotide
atgcaatacaaaaagactttggttgcctctgctttggccgctactacattggccgcctatgctccatctgagccttggtccactttgactccaacagccacttacagcggtggtgttaccgactacgcttccaccttcggtattgccgttcaaccaatctccactacatccagcgcatcttctgcagccaccacagcctcttctaaggccaagagagctgcttcccaaattggtgatggtcaagtccaagctgctaccactactgcttctgtctctaccaagagtaccgctgccgccgtttctcagatcggtgatggtcaaatccaagctactactaagactaccgctgctgctgtctctcaaattggtgatggtcaaattcaagctaccaccaagactacctctgctaagactaccgccgctgccgtttctcaaatcagtgatggtcaaatccaagctaccaccactactttagccccaaagagcaccgctgctgccgtttctcaaatcggtgatggtcaagttcaagctaccaccactactttagccccaaagagcaccgctgctgccgtttctcaaatcggtgatggtcaagttcaagctactactaagactaccgctgctgctgtctctcaaattggtgatggtcaagttcaagctaccaccaagactactgctgccgccgtttctcaaatcggtgatggtcaagttcaagctactaccaagactaccgctgctgctgtctctcaaatcggtgatggtcaagttcaagcaactaccaaaaccactgccgcagctgtttcccaaattactgacggtcaagttcaagccactacaaaaaccactcaagcagccagccaagtaagcgatggccaagtccaagctactactgctacttccgcttctgcagccgctacctccactgacccagtcgatgctgtctcctgtaagacttctggtaccttagaaatgaacttaaagggcggtatcttaactgacggtaagggtagaattggttctattgttgctaacagacaattccaatttgacggtccaccaccacaagctggtgccatctacgctgctggttggtctataactccagacggtaacttggctattggtgacaatgatgtcttctaccaatgtttgtccggtactttctacaacttgtacgacgaacacattggtagtcaatgtactccagtccacttggaagctatcgatttgatagactgttga

SEQ ID NO: 5829 - DNA, 684 bp, Saccharomyces cerevisiae
atgcaattcaaaaacgtcgccctagctgcctccgttgctgctctatccgccactgcttctgctgaaggttacactccaggtgaaccatggtccaccttaaccccaaccggctccatctcttgtggtgctgccgaatacactaccacctttggtattgctgttcaagctattacctcttcaaaagctaagagagacgttatctctcaaattggtgacggtcaagtccaagccacttctgctgctactgctcaagccaccgatagtcaagcccaagctactactaccgctaccccaaccagctccgaaaagatctcttcctctgcatctaaaacatctactaatgccacatcatcttcttgtgccactccatctttgaaagatagctcatgtaagaattctggtaccttagaattgaccttgaaggacggtgttttgactgatgccaagggtagaattggttctattgttgctaacagacaattccaatttgacggtccaccaccacaagccggcgccatctacgctgccggttggtccattactgaagatggttacttggctttgggtgacagtgacgttttctaccaatgtctatccggcaatttctacaacttgtatgatcaaaacgtcgccgaacaatgtagtgccattcatttggaagctgtttctttggtcgactgttaa

SEQ ID NO: 5830 - DNA, 684 bp, Artificial Sequence
  Description of Artificial Sequence: Synthetic polynucleotide
atgcaattcaaaaacgtcgccttagctgcctccgttgctgctttgtccgccactgcttctgctgaaggttacactccaggtgaaccatggtccaccttaaccccaaccggctccatctcttgtggtgctgccgaatacactaccacctttggtattgctgttcaagctattacctcttctaaagctaagagagacgttatctctcaaattggtgacggtcaagtccaagccacttctgctgctactgctcaagccaccgatagtcaagcccaagctactactaccgctaccccaaccagctccgaaaagatctcttcctctgcatctaaaacatctactaatgccacatcttcttcttgtgccactccatctttgaaagatagcagttgtaagaattctggtaccttagaattgaccttgaaggacggtgttttgactgatgccaagggtagaattggttctattgttgctaacagacaattccaatttgacggtccaccaccacaagccggcgccatctacgctgccggttggtccattactgaagatggttacttggctttgggtgacagtgacgttttctaccaatgtttatccggcaatttctacaacttgtatgatcaaaacgtcgccgaacaatgtagtgccattcatttggaagctgtttctttggtcgactgttga

SEQ ID NO: 5831 - DNA, 2493 bp, Saccharomyces cerevisiae
atgaagacaccaacaagagtttcgtttgaaaaaaaaatacacactccaccaagtggagatcgtgacgctgaaagatcaccaccgaagaaatttctaagaggtttatcgggtaaagtttttagaaagacaccagaatttaagaagcaacagatgcccacatttgggtatattgaagagagtcaatttactccaaatcttggcctaatgatgtccaaaagaggcaatattcctaaaccactgaatctttccaagcctatatctcccccaccaagtttgaagaaaacagcgggatcagtagcatctggtttttcgaaaacaggacaacttagcgctttacaatcgccagtaaatatcacaagtagcaacaaatacaacatcaaagctacaaatttaactactagtttactccgagagtcgatttctgattctacaactatgtgtgatactttgtcagacatcaatttaacggttatggatgaagattatcgcattgacggcgattcatattacgaagaagattcaccaactttcatgatcagcctggaaagaaacataaaaaaatgcaattcacaattcagtccaaaaaggtacataggtgagaaatgtttaatctgtgaggaaagtattagttccacatttaccggtgaaaaggttgtggagtctacgtgttcacacactagccactataactgttatttgatgctatttgaaactctttatttccaaggcaagtttcctgagtgtaagatatgtggcgaagtgagcaagccaaaggataaagacattgttcctgaaatggtatccaaacttctaacgggcgcaggcgctcatgatgatggtccgtcatccaatatgcaacagcaatggattgatttgaaaacggcgagaagcttcacaggtgaatttcctcagtttacaccacaggagcagctcattcgtactgctgatatttcatgtgatgggttcaggacaccacgcttatcgaatagcaatcaatttgaggccgttagctatcttgatagcccatttttaaattcaccattcgttaataaaatggcaactacagacccttttgatttaagtgatgatgaaaaactggactgtgatgatgaaatagacgaaagtgctgctgaagtgtggtttagtaaaacgggtggtgaacatgttatggtcagtgtgaagtttcaagaaatgcggaccagtgatgatttaggggtcttgcaagatgtgaatcatgtggaccacgaagaactagaggaaagggaaaaggaatggaaaaagaaaattgatcaatatatcgaaacaaatgtggataaggatagcgaatttggcagtttgatcttgtttgacaaactaatgtattctgatgatggcgaacaatgggtagacaataaccttgtaatattattctccaaatttctagttttgtttgattttgaagaaatgaagatcctgggtaagattcctagagaccagttttaccaggtaatcaagttcaatgaggacgtactactttgtagtttgaagagcactaatatacctgaaatatacttgaggttcaacgaaaactgcgaaaagtggttgcttcccaaatggaagtattgtctagaaaattcttcactggagacactaccattaagtgagattgtttctacagtgaaggaactctctcatgtgaatataataggcgctttaggagcgccgcctgatgttatatcagcacaatcccatgattctcgtctaccgtggaaaagattgcacagtgatacgccgctaaaacttattgtatgtttgaatttgtcgcatgctgatggggaactgtatcgcaagagagttctaaagagtgttcatcaaatattggatggattaaacacagacgatttactgggaatagttgttgttggaagagatggatccggtgtagtaggcccatttggcaccttcatcggaatgataaataaaaattgggacggatggacaactttcttggataatttagaagtggttaatccaaacgtcttccgcgatgaaaagcaacagtataaggtaacattacaaacttgtgaaagattagcgtcaacaagtgcatacgtggatacagatgaccatattgcaactggatacgccaagcaaatcttggtcctcaacgggagtgacgttgttgacattgagcatgatcagaaattaaaaaaggcctttgaccagttatcttaccattggagatacgaaatttcgcaacgccgcatgactccattgaacgctagcattaagcagtttttagaggagctgcacactaagcgttatctagatgtaactcttcgtctaccacaagctacattcgagcaagtatatttgggggatatggctgcgggtgaacaaaaaacgcgtctaattatggatgaacacccgcattctagtttgatagaaatagaatattttgacctggtaaagcagcaaagaattcatcagaccctggaagttcccaacctctag

SEQ ID NO: 5832 - DNA, 2493 bp, Artificial Sequence
  Description of Artificial Sequence: Synthetic polynucleotide
atgaagacaccaacaagagtttcttttgaaaaaaaaatacacactccaccaagtggagatcgtgacgctgaaagatctccaccgaagaaatttttaagaggtttatctggtaaagtttttagaaagacaccagaatttaagaagcaacagatgcccacatttgggtatattgaagagagtcaatttactccaaatcttggcttaatgatgtccaaaagaggcaatattcctaaaccattgaatctttccaagcctatatctcccccaccaagtttgaagaaaacagcgggaagtgtagcatctggtttttccaaaacaggacaacttagcgctttacaatctccagtaaatatcacaagtagcaacaaatacaacatcaaagctacaaatttaactactagtttactcagagagtctatttctgattctacaactatgtgtgatactttgagtgacatcaatttaacggttatggatgaagattatcgcattgacggcgattcttattacgaagaagattctccaactttcatgatcagcttggaaagaaacataaaaaaatgcaattctcaattcagtccaaaaaggtacataggtgagaaatgtttaatctgtgaggaaagtattagttccacatttaccggtgaaaaggttgtggagtctacgtgttctcacactagccactataactgttatttgatgttatttgaaactctttatttccaaggcaagtttcctgagtgtaagatatgtggcgaagtgagcaagccaaaggataaagacattgttcctgaaatggtatccaaacttttgacgggcgcaggcgctcatgatgatggtccgtcctccaatatgcaacagcaatggattgatttgaaaacggcgagaagcttcacaggtgaatttcctcagtttacaccacaggagcagctcattcgtactgctgatattagttgtgatgggttcaggacaccacgcttatccaatagcaatcaatttgaggccgttagctatcttgatagcccatttttaaattctccattcgttaataaaatggcaactacagacccttttgatttaagtgatgatgaaaaattagactgtgatgatgaaatagacgaaagtgctgctgaagtgtggtttagtaaaacgggtggtgaacatgttatggtcagtgtgaagtttcaagaaatgagaaccagtgatgatttaggggtcttgcaagatgtgaatcatgtggaccacgaagaattagaggaaagggaaaaggaatggaaaaagaaaattgatcaatatatcgaaacaaatgtggataaggatagcgaatttggcagtttgatcttgtttgacaaattaatgtattctgatgatggcgaacaatgggtagacaataaccttgtaatattattctccaaatttttggttttgtttgattttgaagaaatgaagatcttgggtaagattcctagagaccagttttaccaggtaatcaagttcaatgaggacgtattgctttgtagtttgaagagcactaatatacctgaaatatacttgaggttcaacgaaaactgcgaaaagtggttgcttcccaaatggaagtattgtttagaaaattcttctttggagacattaccattaagtgagattgtttctacagtgaaggaactctctcatgtgaatataataggcgctttaggagcgccgcctgatgttatatctgcacaatcccatgattctcgtttaccgtggaaaagattgcacagtgatacgccgttaaaacttattgtatgtttgaatttgtctcatgctgatggggaattgtatcgcaagagagttttgaagagtgttcatcaaatattggatggattaaacacagacgatttattaggaatagttgttgttggaagagatggatccggtgtagtaggcccatttggcaccttcatcggaatgataaataaaaattgggacggatggacaactttcttggataatttagaagtggttaatccaaacgtcttccgcgatgaaaagcaacagtataaggtaacattacaaacttgtgaaagattagcgtctacaagtgcatacgtggatacagatgaccatattgcaactggatacgccaagcaaatcttggtcctcaacgggagtgacgttgttgacattgagcatgatcagaaattaaaaaaggcctttgaccagttatcttaccattggagatacgaaatttctcaacgccgcatgactccattgaacgctagcattaagcagtttttagaggagttgcacactaagcgttatttggatgtaactcttcgtttgccacaagctacattcgagcaagtatatttgggggatatggctgcgggtgaacaaaaaacgcgtttaattatggatgaacacccgcattctagtttgatagaaatagaatattttgacttggtaaagcagcaaagaattcatcagaccttagaagttcccaacctctga

SEQ ID NO: 5833 - DNA, 2100 bp, Saccharomyces cerevisiae
atggtcagattttttggtttaaacaagaaaaagaacgaagaaaaggaaaatacagacttgcctgcagacaatgaacaaaacgcagcagaaacgtcgtctagcaacgtatctggaaatgaagaaagaatagacccaaacagtcatgatacgaaccctgaaaatgcaaacaatgatgatgcgtctacgacttttggttcgtccatacaatcgtcatccatattttctagaggaagaatgacttacggaacgggagcctcttctagtatggccacatcagaaatgcgtagtcacagtagcggacatagtggatctaagaatagtaaaaatttacagggtttcaaagatgttgggaaaccattaagagcggtgagcttcttgagtcctgttaaggaggaggaatctcaggatacgcagaatactttagacgtcagctcttcaacgtcctcaacattagccacttcagaaaatgcgagagaaaacagtttcacttccagaagaagtatcactttggagtacattcacaaaagtttgtctgagctagaggaaaatttggttgatataatggatgatattcatcaggatgtcatcagtatttcaaaagcggttattgaagccatcgaatattttaaagaattcttaccgacaacacgagacaggataccgtacaggataagtttagaaaaatcgtcttcattacgaaaaattaataaaattgtattacattttctggataatttattggtttccgacgcattttcgaattctaggtcgatactgttacgaagattttacttcttcctgaagaaactaaaccttattacggatgacgatttgatatcagaatcgggcgttttaccatgcttatcagtcttttgtattggcagccattgcaacttaccaagtatggataaattaggcatgattctagatgagttgaccaaaatggattcttcaataatctctgaccaggaaggtgcttttatagcacctatacttagaggtataaccccaaagagttcaattcttacaataatgtttggcttacccaacttgcaacatgaacactatgaaatgataaaggttctttattcgttgttcccagatgtacacatgtattgtgtgaaagattacattaaaaaagctgcatcagcagtaggcagtattccgtctcataccgcagcaactatcgatacaatagccccaactaaatttcagttttcccccccatatgcagtttcagagaatccacttgaattgccaatttctatgtctttatccactgagacaagcgctaaaattacaggtactttagggggttatctattccctcagactggtagtgataaaaaattttctcaatttgcaagctgctcatttgccattacttgcgcccacgttgtattatctgagaagcaagattatccaaacgtcatggtaccttctaatgttttacagacttcttacaagaaagttttaacgaaagaatcagataggtatcctgatggttcggtggagaaaacagcatttttggaggaagtgcaaagaatagatcaaaacttgaactggcagaaatcaaacaaatttggtcaagtagtttggggcgagagagcaatcgtagatcacagattatcagattttgctattatcaaagttaattcatcattcaaatgtcagaataccctaggtaatggcttaaaatcattcccagatccaacattaagatttcaaaatttacatgtgaaacgaaaaatttttaaaatgaagcctgggatgaaagtatttaaaataggggcttctacgggatacacttcaggcgagttaaattctacaaaattagtttattgggccgacggaaagttacaaagtagcgagtttgtcgttgcatctccaactcctttatttgctagtgcgggggattcaggcgcatggatcttgaccaagttagaagatcgtctaggtttggggcttgttggtatgttgcattcatacgatggtgaacagaggcagtttggtttgttcacacctataggtgatatcctggagagactacatgctgtaactaaaattcaatgggacattgatccacaactagatggatga

SEQ ID NO: 5834 - DNA, 2100 bp, Artificial Sequence
  Description of Artificial Sequence: Synthetic polynucleotide
atggtcagattttttggtttaaacaagaaaaagaacgaagaaaaggaaaatacagacttgcctgcagacaatgaacaaaacgcagcagaaacgtcttctagcaacgtatctggaaatgaagaaagaatagacccaaacagtcatgatacgaaccctgaaaatgcaaacaatgatgatgcgtctacgacttttggttcttccatacaatcttcttccatattttctagaggaagaatgacttacggaacgggagcctcttctagtatggccacaagtgaaatgcgtagtcacagtagcggacatagtggatctaagaatagtaaaaatttacagggtttcaaagatgttgggaaaccattaagagcggtgagcttcttgagtcctgttaaggaggaggaatctcaggatacgcagaatactttagacgtcagctcttctacgtcctctacattagccacttctgaaaatgcgagagaaaacagtttcacttccagaagaagtatcactttggagtacattcacaaaagtttgtctgagttagaggaaaatttggttgatataatggatgatattcatcaggatgtcatcagtatttccaaagcggttattgaagccatcgaatattttaaagaattcttaccgacaacaagagacaggataccgtacaggataagtttagaaaaatcttcttctttaagaaaaattaataaaattgtattacattttttggataatttattggtttccgacgcattttctaattctaggtctatattattaagaagattttacttcttcttgaagaaattgaaccttattacggatgacgatttgatatctgaaagtggcgttttaccatgcttaagtgtcttttgtattggcagccattgcaacttaccaagtatggataaattaggcatgattttagatgagttgaccaaaatggattcttctataatctctgaccaggaaggtgcttttatagcacctatacttagaggtataaccccaaagagttctattcttacaataatgtttggcttacccaacttgcaacatgaacactatgaaatgataaaggttctttattctttgttcccagatgtacacatgtattgtgtgaaagattacattaaaaaagctgcatctgcagtaggcagtattccgtctcataccgcagcaactatcgatacaatagccccaactaaatttcagttttcccccccatatgcagtttctgagaatccacttgaattgccaatttctatgtctttatccactgagacaagcgctaaaattacaggtactttagggggttatcttttccctcagactggtagtgataaaaaattttctcaatttgcaagctgctcttttgccattacttgcgcccacgttgtattatctgagaagcaagattatccaaacgtcatggtaccttctaatgttttacagacttcttacaagaaagttttaacgaaagaaagtgataggtatcctgatggttctgtggagaaaacagcatttttggaggaagtgcaaagaatagatcaaaacttgaactggcagaaaagtaacaaatttggtcaagtagtttggggcgagagagcaatcgtagatcacagattaagtgattttgctattatcaaagttaattcttctttcaaatgtcagaataccttgggtaatggcttaaaatctttcccagatccaacattaagatttcaaaatttacatgtgaaaagaaaaatttttaaaatgaagcctgggatgaaagtatttaaaataggggcttctacgggatacacttctggcgagttaaattctacaaaattagtttattgggccgacggaaagttacaaagtagcgagtttgtcgttgcatctccaactcctttatttgctagtgcgggggattctggcgcatggatcttgaccaagttagaagatcgtttgggtttggggcttgttggtatgttgcattcttacgatggtgaacagaggcagtttggtttgttcacacctataggtgatatcttggagagattacatgctgtaactaaaattcaatgggacattgatccacaattggatggatga

SEQ ID NO: 5835 - DNA, 1359 bp, Saccharomyces cerevisiae
atggggtacagtactatttccaacgataatgatatcaaagtatgtgtgataatggttggcctaccagctagaggaaagtcttttatttcccaaaaaattatcaggtacttatcgtggttatccataaaagccaagtgttttaatgtgggaaattacagaagagacgtgagtggaaatgtcccaatggatgctgagttttttaacttcgaaaatacagataattttaaactcagagaattggctgcccaaaatgccataaaagatattgttaatttttttactaaagaagacggatctgtggcagttttcgatgctactaatagtacacgtaaaagaaggaaatggcttaaagatatatgtgaaaagaataatattcaaccgatgtttttagagagctggagtaacgatcatgaactgattataaataacgctaaggatatcggtagcacatctcctgattatgaaaactctgaacctcatgtggcggaagctgattttttggaaagaattagacaatatgaaagattttatgaacctttggacccccaaaaagataaggatatgacgttcattaagttggtcaatattattgaagaagtagtaattaataagatcagaacatatttggaaagtaggattgtattttatgttatgaatattcgtcctaaaccaaaatatatctggctctcccgtcacggcgaatcgatctataacgtagagaaaaaaattggcggggattcatcactgtctgaaagaggctttcagtacgctaaaaaattggagcagttagtgaaagagagcgcaggagaaataaatttgaccgtgtggacttccaccttaaaaagaacacaacaaacggcaaattatcttccctataagaaactgcaatggaaagcacttgatgaattagacgctggcgtttgtgacggaatgacgtatgaggaaattgaaaaagaatatcctgaagattttaaagcacgtgataatgacaaatacgagtacagatatcgtggtggagaatcatacagagatgtagtgattcgtttagagcccgtcattatggaattggagcgccaagaaaatgttctcattataactcatcaagccgtacttcggtgtatatatgcatattttatgaacgttccacaggaggaatccccttggatgtcaatcccactacacacattgatcaagctggagcctagggcctatggcacaaaggtcaccaaaattaaagcaaacatccctgcagtgagtacatataaagagaagggtacaagccaagtaggtgagctttctcaaagctcaactaaacttcatcaactgctcaatgactctcctttggaagacaaattttaa

SEQ ID NO: 5836 - DNA, 1359 bp, Artificial Sequence
  Description of Artificial Sequence: Synthetic polynucleotide
atggggtacagtactatttccaacgataatgatatcaaagtatgtgtgataatggttggcttaccagctagaggaaagtcttttatttcccaaaaaattatcaggtacttatcttggttatccataaaagccaagtgttttaatgtgggaaattacagaagagacgtgagtggaaatgtcccaatggatgctgagttttttaacttcgaaaatacagataattttaaactcagagaattggctgcccaaaatgccataaaagatattgttaatttttttactaaagaagacggatctgtggcagttttcgatgctactaatagtacacgtaaaagaaggaaatggcttaaagatatatgtgaaaagaataatattcaaccgatgtttttagagagctggagtaacgatcatgaattgattataaataacgctaaggatatcggtagcacatctcctgattatgaaaactctgaacctcatgtggcggaagctgattttttggaaagaattagacaatatgaaagattttatgaacctttggacccccaaaaagataaggatatgacgttcattaagttggtcaatattattgaagaagtagtaattaataagatcagaacatatttggaaagtaggattgtattttatgttatgaatattcgtcctaaaccaaaatatatctggctctcccgtcacggcgaaagtatctataacgtagagaaaaaaattggcggggattcttctttatctgaaagaggctttcagtacgctaaaaaattggagcagttagtgaaagagagcgcaggagaaataaatttgaccgtgtggacttccaccttaaaaagaacacaacaaacggcaaattatcttccctataagaaattacaatggaaagcacttgatgaattagacgctggcgtttgtgacggaatgacgtatgaggaaattgaaaaagaatatcctgaagattttaaagcacgtgataatgacaaatacgagtacagatatcgtggtggagaatcttacagagatgtagtgattcgtttagagcccgtcattatggaattggagcgccaagaaaatgttctcattataactcatcaagccgtacttcgctgtatatatgcatattttatgaacgttccacaggaggaatccccttggatgtccatcccattacacacattgatcaagttggagcctagggcctatggcacaaaggtcaccaaaattaaagcaaacatccctgcagtgagtacatataaagagaagggtacaagccaagtaggtgagctttctcaaagctctactaaacttcatcaattgctcaatgactctcctttggaagacaaattttga

SEQ ID NO: 5837 - DNA, 2835 bp, Saccharomyces cerevisiae
atggcgtatgcggactcaccagaaaatgcgatcgctgttatcaagcagcgaaccgcactaatgaaccggtgtctatctcaacacaaactaatggaatcattacagcatacttccataatgttgaccgaattgagaaatccaaacttatcgccgaagaaatactacgaactttatgtcattattttcgactcattgactaatctatctacgtacctcatagaaaaccatcctcaaaatcaccacttagctgatctttatgagttggttcaatataccggtaacgtggtacccaggctttacttgatgatcacagttgggaccagctatctcactttcaatgaagcgcccaagaaggaaatcttaaaggatatgattgagatgtgtcgtggtgtgcaaaacccaataagaggtttgtttttacgctattatttatcccagagaaccaaagaattacttccggaggacgatccgtcgtttaactctcaatttattatgaataatttcatcgagatgaacaagttgtgggtgagattacaacaccaggggccacttcgtgagagggaaaccagaacacgtgaaagaaaagagctgcaaattttagtggggtctcaactagtacgtctttcgcagattattgatgataatttccaaatgtataagcaagatattcttcccaccattttggaacaagtcatacaatgtagagatttagtatcccaagaatatcttttggacgtcatctgccaagtgttcgcagacgagttccatttgaaaaccttggatactttactgcaaactactttgcatttgaaccctgatgtttcgataaacaagattgttctcactttggtcgatcgattaaacgattatgttacaagacagttggaggacgatccaaacgccacctccacgaatgcttatttagatatggacgtgtttggtacgttctgggactatttgaccgtattgaatcatgaaagaccagatctatcattacaacagtttattcctctagttgagagtgtgattgttttaagtttgaaatggtatcctaataattttgataatttgaacaaactctttgaattagtcttacaaaaaactaaggattatggtcagaaaaatatttctttagagtccgagcatttatttttggttctgttatctttccagaatagtaaacttcagctaacctcatcgaccactgcgccaccaaactcaccagttacttcgaaaaagcattttatctttcaattaatctcccagtgccaggcttacaaaaacatcctggctttgcagagcattagtctacaaaaaaaagttgtcaatgaaattattgacatcttaatggatagagaagtggaagaaatggccgataatgattcagaatcgaaactgcatcctccagggcattccgcttatttagttattgaggacaaactccaagttcagcgcctgctttcaatctgtgagcccttaataatatcaagaagcggaccgcccgcaaatgttgcatcctcggatacaaatgtagacgaagtgttttttaatcgacatgatgaagaagaatcctggatactggacccaatacaggaaaagttggcacatttgattcattggataatgaacactacttctcggaaacaaacaatgaaaaacaaaattcaatttagcttagaagcccaattggaaatattacttcttattaaatcttcgttcattaaaggtggcatcaatgttaaatacacttttccagcaataatcacaaatttttggaaactgatgaggaaatgccgtatgatacaagagtaccttttgaaaaaaagacccgataacaagacgttactttcccattattccaatcttttaaagcaaatgtttaaatttgtttctcgttgtatcaatgatatctttaattcttgcaacaactcatgcacagatctgattctgaaactgaatttacaatgtgccattctagctgatcaattgcaattaaacgaaatttcatatgattttttctcacaggccttcacaatatttgaagagtctctaagtgattcaaagactcagttacaggctttaatatatattgctcagtctttacaaaagacaagatcactctacaaagaagcttattatgattctttgattgtcagatgcacactccatggatccaaattattaaagaaacaagaccaatgtcgtgctgtttatttatgctcccacctctggtgggcaacggaaatttcaaatattggtgaggaagaaggtatcacagacaacttctacagagatggtaaacgggtgttagaatgtctacaaaggtctctccgtgtggcggattctataatggataacgaacagagttgtgagctaatggtcgaaatattaaatagatgcctctactattttattcacggggatgagtccgaaactcatatatcgataaaatacatcaatggtctgatcgaactaatcaaaacaaacttaaaatcgctaaaactagaagataacagtgcctctatgattaccaactcaatcagtgatttgcacatcaccggagaaaataatgtgaaggcaagcagtaatgctgacgatggctctgtaatcacagataaggaatcaaatgttgccataggatcggatggtacgtatattcaattaaatactctgaacggatcttccacgctaatacgcggagtcgtagcaactgcttcaggtagtaaattactgcaccaactgaagtatatcccaatccaccattttcgacgcacttgtgagtacattgaaagtcaaagagaagttgacgatcgtttcaaagtcatatatgtatag

SEQ ID NO: 5838 - DNA, 2835 bp, Artificial Sequence
  Description of Artificial Sequence: Synthetic polynucleotide
atggcgtatgcggactctccagaaaatgcgatcgctgttatcaagcagcgtaccgcattaatgaacagatgtttgtctcaacacaaattaatggaatctttacagcatacttccataatgttgaccgaattgagaaatccaaacttatctccgaagaaatactacgaactttatgtcattattttcgactctttgactaatttatctacgtacctcatagaaaaccatcctcaaaatcaccacttagctgatctttatgagttggttcaatataccggtaacgtggtacccaggctttacttgatgatcacagttgggaccagctatctcactttcaatgaagcgcccaagaaggaaatcttaaaggatatgattgagatgtgtcgtggtgtgcaaaacccaataagaggtttgtttttacgctattatttatcccagagaaccaaagaattacttccggaggacgatccgtcctttaactctcaatttattatgaataatttcatcgagatgaacaagttgtgggtgagattacaacaccaggggccacttcgtgagagggaaaccagaacacgtgaaagaaaagagttacaaattttagtggggtctcaattggtacgtctttctcagattattgatgataatttccaaatgtataagcaagatattcttcccaccattttggaacaagtcatacaatgtagagatttagtatcccaagaatatcttttggacgtcatctgccaagtgttcgcagacgagttccatttgaaaaccttggatactttattacaaactactttgcatttgaaccctgatgtttctataaacaagattgttctcactttggtcgatagattaaacgattatgttacaagacagttggaggacgatccaaacgccacctccacgaatgcttatttagatatggacgtgtttggtacgttctgggactatttgaccgtattgaatcatgaaagaccagatttatctttacaacagtttattcctttggttgagagtgtgattgttttaagtttgaaatggtatcctaataattttgataatttgaacaaactctttgaattagtcttacaaaaaactaaggattatggtcagaaaaatatttctttagagtccgagcatttatttttggttttattatctttccagaatagtaaacttcagttgacctcttccaccactgcgccaccaaactctccagttacttctaaaaagcattttatctttcaattaatctcccagtgccaggcttacaaaaacatcttggctttgcagagcattagtttacaaaaaaaagttgtcaatgaaattattgacatcttaatggatagagaagtggaagaaatggccgataatgattctgaaagtaaattgcatcctccagggcattccgcttatttagttattgaggacaaactccaagttcagcgcttactttctatctgtgagcccttaataatatctagaagcggaccgcccgcaaatgttgcatccagtgatacaaatgtagacgaagtgttttttaatagacatgatgaagaagaatcctggatattggacccaatacaggaaaagttggcacatttgattcattggataatgaacactacttctagaaaacaaacaatgaaaaacaaaattcaatttagcttagaagcccaattggaaatattacttcttattaaatcttctttcattaaaggtggcatcaatgttaaatacacttttccagcaataatcacaaatttttggaaattaatgaggaaatgccgtatgatacaagagtaccttttgaaaaaaagacccgataacaagacgttactttcccattattccaatcttttaaagcaaatgtttaaatttgtttctcgttgtatcaatgatatctttaattcttgcaacaactcttgcacagatttgattttgaaattgaatttacaatgtgccattttggctgatcaattgcaattaaacgaaatttcttatgattttttctctcaggccttcacaatatttgaagagtctttgagtgattctaagactcagttacaggctttaatatatattgctcagtctttacaaaagacaagaagtctctacaaagaagcttattatgattctttgattgtcagatgcacactccatggatccaaattattaaagaaacaagaccaatgtcgtgctgtttatttatgctcccacctctggtgggcaacggaaatttctaatattggtgaggaagaaggtatcacagacaacttctacagagatggtaaaagagtgttagaatgtttgcaaaggtctctccgtgtggcggattctataatggataacgaacagagttgtgagttgatggtcgaaatattaaatagatgcctctactattttattcacggggatgagtccgaaactcatatatccataaaatacatcaatggtttgatcgaattgatcaaaacaaacttaaaatctttgaaattagaagataacagtgcctctatgattaccaactctatcagtgatttgcacatcaccggagaaaataatgtgaaggcaagcagtaatgctgacgatggctctgtaatcacagataaggaaagtaatgttgccataggaagtgatggtacgtatattcaattaaatactttgaacggatcttccacgttgatacgcggagtcgtagcaactgcttctggtagtaaattattacaccaattgaagtatatcccaatccaccattttaggcgcacttgtgagtacattgaaagtcaaagagaagttgacgatcgtttcaaagtcatatatgtatga

SEQ ID NO: 5839 - DNA, 1602 bp, Saccharomyces cerevisiae
atgacagaagataatattgctccaatcacctccgttaaagtagttaccgacaagtgcacgtacaaggacaacgagctgctcaccaagtacagctacgaaaatgctgtagttacgaagacagctagtggccgcttcgatgtaacgcccactgttcaagactacgtgttcaaacttgacttgaaaaagccggaaaaactaggaattatgctcattgggttaggtggcaacaatggctccactttagtggcctcggtattggcgaataagcacaatgtggagtttcaaactaaggaaggcgttaagcaaccaaactacttcggctccatgactcaatgttctaccttgaaactgggtatcgatgcggaggggaatgacgtttatgctccttttaactctctgttgcccatggttagcccaaacgactttgtcgtctctggttgggacatcaataacgcagatctatacgaagctatgcagagaagtcaagttctcgaatatgatctgcaacaacgcttgaaggcgaagatgtccttggtgaagcctcttccttccatttactaccctgatttcattgcagctaatcaagatgagagagccaataactgcatcaatttggatgaaaaaggcaacgtaaccacgaggggtaagtggacccatctgcaacgcatcagacgcgatatccagaatttcaaagaagaaaacgcccttgataaagtaatcgttctttggactgcaaatactgagaggtacgtagaagtatctcctggtgttaatgacaccatggaaaacctcttgcagtctattaagaatgaccatgaagagattgctccttccacgatctttgcagcagcatctatcttggaaggtgtcccctatattaatggttcaccgcagaatacttttgttcccggcttggttcagctggctgagcatgagggtacattcattgcgggagacgatctcaagtcgggacaaaccaagttgaagtctgttctggcccagttcttagtggatgcaggtattaaaccggtctccattgcatcctataaccatttaggcaataatgacggttataacttatctgctccaaaacaatttaggtctaaggagatttccaaaagttctgtcatagatgacatcatcgcgtctaatgatatcttgtacaatgataaactgggtaaaaaagttgaccactgcattgtcatcaaatatatgaagcccgtcggggactcaaaagtggcaatggacgagtattacagtgagttgatgttaggtggccataaccggatttccattcacaatgtttgcgaagattctttactggctacgcccttgatcatcgatcttttagtcatgactgagttttgtacaagagtgtcctataagaaggtggacccagttaaagaagatgctggcaaattcgagaacttttatccagttttaaccttcttgagttactggttaaaagctccattaacaagaccaggatttcacccggtgaatggcttaaacaagcaaagaaccgccttagaaaattttttaagattgttgattggattgccttctcaaaacgaactaagattcgaagagagattgttgtaa

SEQ ID NO: 5840 - DNA, 1602 bp, Artificial Sequence
  Description of Artificial Sequence: Synthetic polynucleotide
atgacagaagataatattgctccaatcacctccgttaaagtagttaccgacaagtgcacgtacaaggacaacgagttactcaccaagtacagctacgaaaatgctgtagttacgaagacagctagtggccgcttcgatgtaacgcccactgttcaagactacgtgttcaaacttgacttgaaaaagccggaaaaattaggaattatgctcattgggttaggtggcaacaatggctccactttagtggcctctgtattggcgaataagcacaatgtggagtttcaaactaaggaaggcgttaagcaaccaaactacttcggctccatgactcaatgttctaccttgaaattgggtatcgatgcggaggggaatgacgtttatgctccttttaactctttgttgcccatggttagcccaaacgactttgtcgtctctggttgggacatcaataacgcagatttatacgaagctatgcagagaagtcaagttctcgaatatgatttgcaacaacgcttgaaggcgaagatgtccttggtgaagcctcttccttccatttactaccctgatttcattgcagctaatcaagatgagagagccaataactgcatcaatttggatgaaaaaggcaacgtaaccacgaggggtaagtggacccatttacaacgcatcagacgcgatatccagaatttcaaagaagaaaacgcccttgataaagtaatcgttctttggactgcaaatactgagaggtacgtagaagtatctcctggtgttaatgacaccatggaaaacctcttgcagtctattaagaatgaccatgaagagattgctccttccacgatctttgcagcagcatctatcttggaaggtgtcccctatattaatggttctccgcagaatacttttgttcccggcttggttcagttagctgagcatgagggtacattcattgcgggagacgatctcaagagtggacaaaccaagttgaagtctgttttggcccagttcttagtggatgcaggtattaaaccggtctccattgcatcctataaccatttaggcaataatgacggttataacttatctgctccaaaacaatttaggtctaaggagatttccaaaagttctgtcatagatgacatcatcgcgtctaatgatatcttgtacaatgataaattgggtaaaaaagttgaccactgcattgtcatcaaatatatgaagcccgtcggggactctaaagtggcaatggacgagtattacagtgagttgatgttaggtggccataacagaatttccattcacaatgtttgcgaagattctttattagctacgcccttgatcatcgatcttttagtcatgactgagttttgtacaagagtgtcctataagaaggtggacccagttaaagaagatgctggcaaattcgagaacttttatccagttttaaccttcttgagttactggttaaaagctccattaacaagaccaggatttcacccggtgaatggcttaaacaagcaaagaaccgccttagaaaattttttaagattgttgattggattgccttctcaaaacgaattgagattcgaagagagattgttgtga

SEQ ID NO: 5841 - DNA, 402 bp, Saccharomyces cerevisiae
atggacagagaccatattaatgaccatgaccatcgaatgagctattccatcaacaaggacgacttgttgttaatggttttggcggttttcattcccccagtggccgtctggaagcgtaagggtatgttcaacagggatacactattgaacttacttctcttcctactgttattcttcccagcaatcattcacgcttgctacgttgtatatgaaacgagtagtgaacgttcgtacgatctttcacgcagacatgcgactgcgcccgccgtagaccgtgacctggaagctcaccctgcagaggaatctcaagcacagcctccagcatatgatgaagacgatgaggccggtgccgatgtgcccttgatggacaacaaacaacagctctcttccggccgtacttag

SEQ ID NO: 5842 - DNA, 402 bp, Artificial Sequence
  Description of Artificial Sequence: Synthetic polynucleotide
atggacagagaccatattaatgaccatgaccatagaatgagctattccatcaacaaggacgacttgttgttaatggttttggcggttttcattcccccagtggccgtctggaagcgtaagggtatgttcaacagggatacattattgaacttacttctcttcttattattattcttcccagcaatcattcacgcttgctacgttgtatatgaaacgagtagtgaacgttcttacgatctttcccgcagacatgcgactgcgcccgccgtagaccgtgacttggaagctcaccctgcagaggaatctcaagcacagcctccagcatatgatgaagacgatgaggccggtgccgatgtgcccttgatggacaacaaacaacagctctcttccggccgtacttga

SEQ ID NO: 5843 - DNA, 1992 bp, Saccharomyces cerevisiae
atgccatttcaagattattttcagaagaaaaaagcagcgttcattaacagaaacaataaaagtaacgcagatgcttcagcgctacgagatattaacgatattaacataaatttcgccgccaagagcaaaaactacgtgttcccgctaacaaagctccccgatgagctcatgcaagaagtattctctcatttgccgcaaccagaccgcttgcagctttgccttgtgaacaaaaggttgaataagatcgctaccaaactgctttatagaagaatatatttgaacgactcaaatgtagtgaagagtgacttcatgcatctcgcaattaattggaccctactgaacttgccgtcttcgttgaaagaagaggagtcccgcgatatcgccaactgcaaattgaaaaaacttatagaaacactgcaaaataatattcacattactgaagtcatccagtggataaggatcaactgggatttggactctaccttgcaaaggtccattctcagcatcctttgcaatcagggcaagtccttgcaaagactagaaaacgtcactgacccggcttgtaacgatatcatctccaatggtcacttttccaggagcaacgtctcaagtttcgacatggctcctccaaattcattgcctgagatggttgttcccgaaaattacattccgaatctcaccaaatatctttcacagcgtatctcttctcggctttctcatatgactttattcatcgaccctttaaaactgttcaattatctttaccctttagatatcaagttacaaatcatcgatttaaaattgcattggaggagggagttttacaataatgattattttgttaaaaagatacgacccggcaatcctctgactaaactatcggaggtttttgacaagaggacattgaaaattcttaccatcatttcttggaatgacactttgttaaaacgcgagacagaaatgctgaaagattttaaagaatttgagaacctggaagatttgtctttgatttctattaagcaggatgttcatatcctcgtagatctttttagttcgttaaccaatttgaaaagactaaaaatggatttcttagaggagtatgtacctgaacccacaaatcctcacatatttctctccattcttttagcttgctccaaattgcaattcatagatctgagatacgacggtcttatcccacaaatcatcaatattcaagaaaataagttccaactaaatcagcaatgcaactgcacaaactgtcaaatagtattcagtgacattctgaagggcaaaatattcatgttccctgaagactactatattcacgatcttcaagacattgctgcaaaggatatttttaaaatgatgaaatacctatctttgttaccatactctaaagcttgtgatgcttatccgagcgttagaacacaaccaatgaatttgactaattttgtgaccaagatgaaccgcaaccttttggaatatagaaattctaaatcccagttggtgcccaaaatcgttaataacccacatcaacactccaccgtgacttccacatcaaccgctcatatgagcgagcccgaaatgataataatcgatgacgatgatgatgatgatgaaattaatgcggccattcctccaagtagtgatgacacagcagctacaatttccactgacctggaacttcctcatgaatcattgaccaaaagagatattattatgtgttatcacgctcttatccatcacttcaagtcgatttacgttacttttttgaaaagttttcctcatttgagattcttgatgttgaatgacattcccacaatagttatggaggagaataatgaacgtatttttgaacccgtcttttatcattatgattataagagtaatctgtatggatggtcaaaggaatcgaacaagaatctggagaacgacagcaacaacaacaataataattctgataccattgcaagaatagccactgttatgtaa

SEQ ID NO: 5844 - DNA, 1992 bp, Artificial Sequence
  Description of Artificial Sequence: Synthetic polynucleotide
atgccatttcaagattattttcagaagaaaaaagcagcgttcattaacagaaacaataaaagtaacgcagatgcttctgcgcttagagatattaacgatattaacataaatttcgccgccaagagcaaaaactacgtgttcccgttaacaaagctccccgatgagctcatgcaagaagtattctctcatttgccgcaaccagaccgcttgcagctttgccttgtgaacaaaaggttgaataagatcgctaccaaattactttatagaagaatatatttgaacgactctaatgtagtgaagagtgacttcatgcatctcgcaattaattggaccttattaaacttgccgtcttctttgaaagaagaggagtcccgcgatatcgccaactgcaaattgaaaaaacttatagaaacattacaaaataatattcacattactgaagtcatccagtggataaggatcaactgggatttggactctaccttgcaaaggtccattctcagcatcctttgcaatcagggcaagtccttgcaaagattagaaaacgtcactgacccggcttgtaacgatatcatctccaatggtcacttttccaggagcaacgtctctagtttcgacatggctcctccaaattctttgcctgagatggttgttcccgaaaattacattccgaatctcaccaaatatctttctcagcgtatctcttctaggctttctcatatgactttattcatcgaccctttaaaattattcaattatctttaccctttagatatcaagttacaaatcatcgatttaaaattgcattggaggagggagttttacaataatgattattttgttaaaaagataaggcccggcaatcctttaactaaattatctgaggtttttgacaagaggacattgaaaattcttaccatcatttcttggaatgacactttgttaaaacgcgagacagaaatgttgaaagattttaaagaatttgagaacttggaagatttgtctttgatttctattaagcaggatgttcatatcctcgtagatctttttagttctttaaccaatttgaaaagattgaaaatggatttcttagaggagtatgtacctgaacccacaaatcctcacatatttctctccattcttttagcttgctccaaattgcaattcatagatttgagatacgacggtcttatcccacaaatcatcaatattcaagaaaataagttccaattgaatcagcaatgcaactgcacaaactgtcaaatagtattcagtgacattttgaagggcaaaatattcatgttccctgaagactactatattcacgatcttcaagacattgctgcaaaggatatttttaaaatgatgaaatacttgtctttgttaccatactctaaagcttgtgatgcttatccgagcgttagaacacaaccaatgaatttgactaattttgtgaccaagatgaaccgcaaccttttggaatatagaaattctaaatcccagttggtgcccaaaatcgttaataacccacatcaacactccaccgtgacttccacatctaccgctcatatgagcgagcccgaaatgataataatcgatgacgatgatgatgatgatgaaattaatgcggccattcctccaagtagtgatgacacagcagctacaatttccactgacttggaacttcctcatgaatctttgaccaaaagagatattattatgtgttatcacgctcttatccatcacttcaagtctatttacgttacttttttgaaaagttttcctcatttgagattcttgatgttgaatgacattcccacaatagttatggaggagaataatgaacgtatttttgaacccgtcttttatcattatgattataagagtaatttatatggatggtccaaggaatctaacaagaatttggagaacgacagcaacaacaacaataataattctgataccattgcaagaatagccactgttatgtga

SEQ ID NO: 5845 - DNA, 702 bp, Saccharomyces cerevisiae
atgtccaagctttcgaaagattacgtatcagattcagactctgatgatgaagtgatatcaaacgagttcagcataccagatggtttcaagaaatgtaaacatttaaagaatttccctctcaacggtgataacaaaaaaaaagcgaaacagcaacaggtttggctgatcaaattcccatcaaatgtggacatctccaagttaaaatctctgcctgtagattttgaatcctctacaaccatgacaattgataaacacgattataaaatcatggacgatacagatattgagtcctcgttaacacaggataacctcagtaatatgactttattggttccttcggaaagtaaggaaagtcttaaaattgctagcactgccaaggataatgcaccattacagtttgacaaggtattttctgtcagcgaaaccgctaaaatcccagctattgattacagtaaggtaagagttccacgtaaagatgttccaaaagtagaaggcttgaagttggagcattttgctactggttatgatgccgaagatttccatgtggctgaggaagttaaagaaaataagaaagaaccaaagaagcgttcacatcacgacgatgaagaggagtctagtgaaaagaagaaaaagaagaaggagaagagggagaagagggagaagaaggataaaaaggataagaaaaagaaacatagagattga

SEQ ID NO: 5846 - DNA, 702 bp, Artificial Sequence
  Description of Artificial Sequence: Synthetic polynucleotide
atgtccaagctttctaaagattacgtatctgattctgactctgatgatgaagtgataagcaacgagttcagcataccagatggtttcaagaaatgtaaacatttaaagaatttccctctcaacggtgataacaaaaaaaaagcgaaacagcaacaggtttggttgatcaaattcccatccaatgtggacatctccaagttaaaatctttgcctgtagattttgaatcctctacaaccatgacaattgataaacacgattataaaatcatggacgatacagatattgagtcctctttaacacaggataacctcagtaatatgactttattggttccttctgaaagtaaggaaagtcttaaaattgctagcactgccaaggataatgcaccattacagtttgacaaggtattttctgtcagcgaaaccgctaaaatcccagctattgattacagtaaggtaagagttccacgtaaagatgttccaaaagtagaaggcttgaagttggagcattttgctactggttatgatgccgaagatttccatgtggctgaggaagttaaagaaaataagaaagaaccaaagaagcgttctcatcacgacgatgaagaggagtctagtgaaaagaagaaaaagaagaaggagaagagggagaagagggagaagaaggataaaaaggataagaaaaagaaacatagagattga

SEQ ID NO: 5847 - DNA, 1149 bp, Saccharomyces cerevisiae
atgaggaggactttttctcagttagcaacccgactattgaagtcgaaagatgatgagctgaaatcaactctaaaatacttgaccaaaggtccagtgaagttgttggggcctttgtttgaatcttctgaagttaatgaacaaggttccttattgaatcgttcacgcactaaagaaaataatcttcaaaatcaccatatagagaacatcctgagaatactgaattcaaatctaccggaagtagagtccaagaaacaaaaagtagctgttcattacgatgtgcttttctcacatttgaactcaatagttacccaggcaacggataacaaaagttcttcttcgaaggaactacaaggttcatcgtccgaggatctatatgataggctgctgcttttgcagtatgtgggcaagttaactaatgtgcgtcaaataacagaaattttgctctcaaaaaagttcaacaaattcgataaagtatgggagcacagagccttgtttgacgaataccaaagagtagtgatatccatcctgttgtattatagaacgcacgatgtgcaaataagaaaagactacgagcctcgttggttgtccgattacagtgatctaccgtttcctctgcgacgtcttttgtggagatgtctaacttctaacgtatctgaagataatattcgtcaaaatataattcattacattaagcttttaggcgcaaattggaggaataacgatttgattttaatttatcaatctttgtatgaaaagtcacatatattgcctgatttaacggtcctgaaccacaataaagatgatggtttctctttcacccaaaatcaaatcctgcttgttcgtattttaagggctatttcgaaatgcgttgaagaggaaccaaaattggtcaaaaaatggttaattgatatcgtaaaattgagtatacaaagcaaaataatgctggagtcaccgaagaaaccgtccacaccaataatggaccaatacaaatttattagatccttagatatttctatacggagtatccatcggacgtgccaggataaactaatctttgaagatttacaggtcaaccttggaagtgtattaaagatgattaatgaagaagaacacgagttaaaaacacacttaccattgaacctcatataa

SEQ ID NO: 5848 - DNA, 1149 bp, Artificial Sequence
  Description of Artificial Sequence: Synthetic polynucleotide
atgaggaggactttttctcagttagcaaccagattattgaagagtaaagatgatgagttgaaatctactttgaaatacttgaccaaaggtccagtgaagttgttggggcctttgtttgaatcttctgaagttaatgaacaaggttccttattgaatcgttcccgcactaaagaaaataatcttcaaaatcaccatatagagaacatcttaagaatattgaatagtaatttaccggaagtagagtccaagaaacaaaaagtagctgttcattacgatgtgcttttctctcatttgaacagcatagttacccaggcaacggataacaaaagttcttcttccaaggaattacaaggttcttcttccgaggatttatatgataggttattacttttgcagtatgtgggcaagttaactaatgtgcgtcaaataacagaaattttgctctctaaaaagttcaacaaattcgataaagtatgggagcacagagccttgtttgacgaataccaaagagtagtgatatccatcttgttgtattatagaacgcacgatgtgcaaataagaaaagactacgagcctcgttggttgtccgattacagtgatttaccgtttcctttgagacgtcttttgtggagatgtttaacttctaacgtatctgaagataatattcgtcaaaatataattcattacattaagcttttaggcgcaaattggaggaataacgatttgattttaatttatcaatctttgtatgaaaagagtcatatattgcctgatttaacggtcttgaaccacaataaagatgatggtttctctttcacccaaaatcaaatcttacttgttcgtattttaagggctatttccaaatgcgttgaagaggaaccaaaattggtcaaaaaatggttaattgatatcgtaaaattgagtatacaaagcaaaataatgttagagtctccgaagaaaccgtccacaccaataatggaccaatacaaatttattagatccttagatatttctataagaagtatccatagaacgtgccaggataaattaatctttgaagatttacaggtcaaccttggaagtgtattaaagatgattaatgaagaagaacacgagttaaaaacacacttaccattgaacctcatatga

SEQ ID NO: 5849 - DNA, 1410 bp, Saccharomyces cerevisiae
atggataatcagcaggaaagtatatctgaagatatcaccggtgatctggccgctgctgtgagaaagtcatggtccgagtcacaagataatccattactgttaaattttaataattctcccataggtactcccactgataggtactcccctgaaccagcaacgatgatggaaggaaatgcaatgaatctttcatcacttgcgagagggtcgacacagcagcagcaaaggctttatggatcttctcaaacacgcgaaaaatctgatcaacagcagcaggattatcagctgttcaaacatcattattctttgggacaggagacgagagagtctgtttcagatatccttaacgatttgactctaggatctccggaaccaagcgaaagggcatcaccaataaggcaaccatcggtggatgttccacctttaactacaaggcgtagttctatacaggacgttcagtggataagacatttactgaacccaagaagttcgttttccggcgcatcttccaatgaaccaaccaactctcctggggattttcttaatcagagcagggcttggataacaatactgcacgattcatcggcagaatctttacaggctgtcatcgtattggccgagtcattgaagaatgtcaattctcagtataatctctgggtattgcattccagtgaagtcaacgcctttcaattggcccaggtaggaatcaagacgctgataatagatgaatatatcaatttattcatgaatttcggcactggctcgggatttagcgcaagttcgcaatcgaccgaaaccaagggcgaattgaattttaagtggtgcaagctatttctttttttttcgttaattgatcgattcgaattgatttgctatttatcccctacatgcctggtactgcaaaatattgatgagcttctagagagcactgaagtatctgacgagattgataacgaaacttgtgtattgttatcgaataaggtaaattatataaatgaagatctcgttagcgtgaaccaagaccaatcttccgctgaaaattatgatgacgatcctcaaattattatactgaagccgaacagggcagtagcaatgtgcattaaggaatactttactatttacgggaacgattttgaaggtgaaagtaaaaggtcgatgtttcatcaaatgaacgatttacagattatgaaagcattgtttggcgataaatggagttatatagatagcgttggatactgtgctgttcccatagctagcgtgccagcgaatagattgaattataagataatcgaatttaaaatcctgaaaccttgggaaagacaaaactacattgctgccggtcaacatcgagaatctattatgaacaagtggctagatctttggcgagactttttgaaccaagcaaactaa

SEQ ID NO: 5850 - DNA, 1410 bp, Artificial Sequence
  Description of Artificial Sequence: Synthetic polynucleotide
atggataatcagcaggaaagtatatctgaagatatcaccggtgatttggccgctgctgtgagaaagtcttggtccgagtctcaagataatccattattattaaattttaataattctcccataggtactcccactgataggtactcccctgaaccagcaacgatgatggaaggaaatgcaatgaatctttcttctcttgcgagagggtctacacagcagcagcaaaggctttatggatcttctcaaacacgcgaaaaatctgatcaacagcagcaggattatcagttattcaaacatcattattctttgggacaggagacgagagagtctgtttctgatatccttaacgatttgactttgggatctccggaaccaagcgaaagggcatctccaataaggcaaccatctgtggatgttccacctttaactacaaggcgtagttctatacaggacgttcagtggataagacatttattaaacccaagaagttctttttccggcgcatcttccaatgaaccaaccaactctcctggggattttcttaatcagagcagggcttggataacaatattacacgattcttctgcagaatctttacaggctgtcatcgtattggccgagtctttgaagaatgtcaattctcagtataatctctgggtattgcattccagtgaagtcaacgcctttcaattggcccaggtaggaatcaagacgttgataatagatgaatatatcaatttattcatgaatttcggcactggcagtggatttagcgcaagttctcaatccaccgaaaccaagggcgaattgaattttaagtggtgcaagttatttctttttttttctttaattgatagattcgaattgatttgctatttatcccctacatgcttagtattacaaaatattgatgagcttttggagagcactgaagtatctgacgagattgataacgaaacttgtgtattgttatccaataaggtaaattatataaatgaagatctcgttagcgtgaaccaagaccaatcttccgctgaaaattatgatgacgatcctcaaattattatattgaagccgaacagggcagtagcaatgtgcattaaggaatactttactatttacgggaacgattttgaaggtgaaagtaaaaggtctatgtttcatcaaatgaacgatttacagattatgaaagcattgtttggcgataaatggagttatatagatagcgttggatactgtgctgttcccatagctagcgtgccagcgaatagattgaattataagataatcgaatttaaaatcttgaaaccttgggaaagacaaaactacattgctgccggtcaacatagagaatctattatgaacaagtggcttgatctttggagagactttttgaaccaagcaaactga

SEQ ID NO: 5851 - DNA, 885 bp, Saccharomyces cerevisiae
atgaaattcgacaatgacagtgagaagcaggttttcgataagcttaaaaaagcgattcctggtattatcaaggaaaaatgtgcaggatacgatgaattgtatggttacaagttgaatcctgaaggtcttacacaagaggaggttgataaatactatgacgaaaaaatcgccgatcgtctaacctacaaactttgcaaagcctatcaatttgaatatagcaccattgtacagaacctgatcgatattttgaattggaggagggaattcaacccattgagttgtgcctacaaggaagtccataatacagaattgcaaaacgttggtattttgacattcgatgcaaacggcgacgcaaataaaaaggctgtcacttggaacttatacggccaactggtcaaaaaaaaagaattgtttcaaaatgtggataagtttgtacgctacagaatcgggctcatggaaaagggtttgagcttattagatttcaccagctccgacaacaactatatgacccaagtccacgattataaaggcgtctccgtgtggcgaatggattctgacattaaaaactgtagcaagacggtcattggaatctttcaaaaatactatccagaactgttatatgcaaagtattttgttaatgtccccaccgttttcggctgggtttacgatttaatcaaaaagttcgttgacgaaaccaccagaaagaagttcgtggtattaaccgacggcagcaagttgggtcaatacttgaaggattgcccatatgaagggtatggcgggaaagataagaagaacaatctgaccaagcaaaatgtcacaaatgtccatccaacagaatacggcctttacattttacaaaaacaaatcatcgaggacgttgagtga

SEQ ID NO: 5852 - DNA, 885 bp, Artificial Sequence
  Description of Artificial Sequence: Synthetic polynucleotide
atgaaattcgacaatgacagtgagaagcaggttttcgataagcttaaaaaagcgattcctggtattatcaaggaaaaatgtgcaggatacgatgaattgtatggttacaagttgaatcctgaaggtcttacacaagaggaggttgataaatactatgacgaaaaaatcgccgatcgtttgacctacaaactttgcaaagcctatcaatttgaatatagcaccattgtacagaacttgatcgatattttgaattggaggagggaattcaacccattgagttgtgcctacaaggaagtccataatacagaattgcaaaacgttggtattttgacattcgatgcaaacggcgacgcaaataaaaaggctgtcacttggaacttatacggccaattggtcaaaaaaaaagaattgtttcaaaatgtggataagtttgtacgctacagaatcgggctcatggaaaagggtttgagcttattagatttcaccagctccgacaacaactatatgacccaagtccacgattataaaggcgtctccgtgtggagaatggattctgacattaaaaactgtagcaagacggtcattggaatctttcaaaaatactatccagaattattatatgcaaagtattttgttaatgtccccaccgttttcggctgggtttacgatttaatcaaaaagttcgttgacgaaaccaccagaaagaagttcgtggtattaaccgacggcagcaagttgggtcaatacttgaaggattgcccatatgaagggtatggcgggaaagataagaagaacaatttgaccaagcaaaatgtcacaaatgtccatccaacagaatacggcctttacattttacaaaaacaaatcatcgaggacgttgagtga

SEQ ID NO: 5853 - DNA, 315 bp, Saccharomyces cerevisiae
atgttaaggagggaaacttcaacaatatacaggacacacaaaaaaagcaacagtagtatactcaggagccagcgggaccagactagagtggattccttggtagaggagtctcccatgggcgatttcgggatcaataaccagcctacacagcctggcgtgatatactactttgtagagctgactaatttaggcatacaggaaaacacaagcagtaataataacaacaacaataatcatggtgacgatgaaaacggcagtcgatacggccacggcagcagtctgggtggagacgttcactctcgccgttgttcatga

SEQ ID NO: 5854 - DNA, 315 bp, Artificial Sequence
  Description of Artificial Sequence: Synthetic polynucleotide
atgttaaggagggaaacttctacaatatacaggacacacaaaaaaagcaacagtagtatactcaggagccagagagaccagactagagtggattccttggtagaggagtctcccatgggcgatttcgggatcaataaccagcctacacagcctggcgtgatatactactttgtagagttaactaatttaggcatacaggaaaacacaagcagtaataataacaacaacaataatcatggtgacgatgaaaacggcagtagatacggccacggcagcagtttgggtggagacgttcactctcgccgttgtagttga

SEQ ID NO: 5855 - DNA, 477 bp, Saccharomyces cerevisiae
atgtcagccgatcattcgagagatccatgtcctatagtcatactaaatgatttcggtggtgcttttgccatgggtgccattggtggtgttgtttggcatgggattaaaggttttagaaattcgccattaggtgagcgtggttcaggagctatgagcgccattaaagcgcgtgctcccgtactgggtggtaattttggtgtgtggggtggtttattttcgacttttgattgcgctgtgaaggccgttagaaagagagaggacccatggaatgctatcattgcagggtttttcactggtggcgctttagctgtaagaggtggttggaggcatacaaggaacagttcgatcacgtgtgcttgtttgttgggtgtgattgaaggtgtgggactaatgtttcaaagatatgctgcttggcaagccaaacctatggctcctcctttgcccgaagcaccttcctctcaacctctgcaagcttag

SEQ ID NO: 5856 - DNA, 477 bp, Artificial Sequence
  Description of Artificial Sequence: Synthetic polynucleotide
atgtctgccgatcattccagagatccatgtcctatagtcatattgaatgatttcggtggtgcttttgccatgggtgccattggtggtgttgtttggcatgggattaaaggttttagaaattctccattaggtgagcgtggttctggagctatgagcgccattaaagcgcgtgctcccgtattgggtggtaattttggtgtgtggggtggtttattttccacttttgattgcgctgtgaaggccgttagaaagagagaggacccatggaatgctatcattgcagggtttttcactggtggcgctttagctgtaagaggtggttggaggcatacaaggaacagttctatcacgtgtgcttgtttgttgggtgtgattgaaggtgtgggattaatgtttcaaagatatgctgcttggcaagccaaacctatggctcctcctttgcccgaagcaccttcctctcaacctttacaagcttga

SEQ ID NO: 5857 - DNA, 393 bp, Saccharomyces cerevisiae
atgacgatgcaaaaggccagcaaagtgaatatggaagtgcgaacgactctagtaacaatgcaggccacaactatgtctataatcctagctctgccactggtggtgctgatagcgtcgacattggtgctatcagtaaaaggaaggagaatacatctggcgacatctccaataattttgctgttactcattctgttcaagaagggccaacaagcgcgttcaataaacttcacattgtcgaagaataaatcgttattttgtctgacttttcttaactacccatttcattttattacggcttggtgccataatgatatactaaataaatatgaattttgccttttcttaattttccttatacgtatagtcattacaattaataaagtaacattataa

SEQ ID NO: 5858 - DNA, 393 bp, Artificial Sequence
  Description of Artificial Sequence: Synthetic polynucleotide
atgacgatgcaaaaggccagcaaagtgaatatggaagtgaggacgactttggtaacaatgcaggccacaactatgtctataatcttggctttgccattggtggtgttgatagcgtctacattggtgctttctgtaaaaggaaggagaatacatttagcgacatctccaataattttgttattactcattcttttcaagaagggccaacaagcgcgttctataaacttcacattgtccaagaataaatctttattttgtttaacttttcttaactacccatttcattttattacggcttggtgccataatgatatattgaataaatatgaattttgccttttcttaattttccttatacgtatagtcattacaattaataaagtaacattatga

SEQ ID NO: 5859 - DNA, 2424 bp, Saccharomyces cerevisiae
atgaactcatccaataataacgactcgtccagctccaatagcaacatgaataactccttgagcccgacccttgtgacccacagtgatgctagtatgggctcgggtagagcaagcccagacaatagccatatggggagaggtatatggaatccatcgtacgtaaatcaaggctctcaaaggtctccacagcagcagcatcagaatcatcaccagcagcagcagcagcagcaacaacaacaacaacagaattctcaattttgctttgttaacccttggaatgaggaaaaagtaactaattctcaacaaaacctggtgtatccccctcaatacgatgacttaaacagtaacgaaagtctagatgcgtacagacgacgtaaatctagtctcgttgtacctccagccagggcacctgccccaaatcctttccagtacgatagttatcccgcttacaccagctctaatacgagtttggcaggaaatagcagtggccagtatccttctggctatcaacaacaacaacagcaagtataccagcagggcgctatccatccttcccaatttggatccagatttgttccctccctttatgatcgtcaagatttccaaagaaggcagagtctggctgcaactaattattcgtccaatttttcttccctaaattcaaatactaatcaaggaacaaactccataccagtcatgtcaccttacaggaggcttagcgcatatcctcctagtacaagtcccccactacaaccccctttcaagcagttacgaagagatgaagtacaaggtcagaaattgtccattcctcagatgcaactttgcaactctaaaaacgatcttcaacctgtcttaaatgctactccaaagtttagacgtgcgtcgctcaattccaagacgatatctcccctagtcagtgtcacgaaaagcctgattaccacatattctttatgttctccagaatttacctaccaaacgtccaaaaaccccaagagagtacttacgaagcccagtgaagggaaatgtaacaacggattcgacaacataaacagtgactatattctttatgtaaatgacgttttgggtgtagagcagaacagaaagtaccttgtgctagacattttgggtcaaggtacatttggtcaagtggtcaaatgtcaaaatttgctgacgaaagagatattggctgtaaaagtggttaaatcgaggacagaatatttgactcaaagtataacggaggctaaaattttagagctactgaatcaaaagatagaccctactaataaacatcattttttaaggatgtatgactcctttgtccacaagaaccacttatgtttagtgtttgaattactaagcaataatttgtacgaattattaaaacaaaacaaatttcatgggctctctatacaacttatcagaacattcaccactcaaatactggattcgttatgcgttttgaaggaaagcaaactgattcattgcgatctgaagccagagaatatcttgctctgcgcacctgataagccggaattgaaaattattgattttggctcatcttgcgaagaggcaagaaccgtttatacatacatccagtccaggttttatcgtgctcctgaaattatactgggtataccgtattcaaccagtattgacatgtggtcgttaggttgtattgttgctgaattatttttgggtataccgatcttcccaggcgcttctgaatataaccaattaacaagaataatagacacgcttggatatcctccatcgtggatgatagatatgggtaaaaactctggaaaatttatgaagaaattggcaccagaagaaagttcttcttctacacaaaagcatcgtatgaaaactattgaagagttttgcagagaatacaatatagtggaaaagcccagtaaacaatattttaagtggagaaagttaccagatattattagaaactacaggtatcctaaaagcatacagaactcccaagaacttatcgaccaagaaatgcagaatagggagtgtttgatccactttttaggcggtgtgctaaatttgaacccgttagaaagatggacaccacaacaagctatgctacaccccttcataacaaagcaggagtttacaggtgagtggtttcctccaggatcgtctttaccgggtccttcagaaaaacatgacgatgcaaaaggccagcaaagtgaatatggaagtgcgaacgactctagtaacaatgcaggccacaactatgtctataatcctagctctgccactggtggtgctgatagcgtcgacattggtgctatcagtaaaaggaaggagaatacatctggcgacatctccaataattttgctgttactcattctgttcaagaagggccaacaagcgcgttcaataaacttcacattgtcgaagaataa

SEQ ID NO: 5860 - DNA, 2424 bp, Artificial Sequence
  Description of Artificial Sequence: Synthetic polynucleotide
atgaactcttccaataataacgactcttccagctccaatagcaacatgaataactccttgagcccgacccttgtgacccacagtgatgctagtatgggcagtggtagagcaagcccagacaatagccatatggggagaggtatatggaatccatcttacgtaaatcaaggctctcaaaggtctccacagcagcagcatcagaatcatcaccagcagcagcagcagcagcaacaacaacaacaacagaattctcaattttgctttgttaacccttggaatgaggaaaaagtaactaattctcaacaaaacttggtgtatccccctcaatacgatgacttaaacagtaacgaaagtttggatgcgtacagaagacgtaaatctagtctcgttgtacctccagccagggcacctgccccaaatcctttccagtacgatagttatcccgcttacaccagctctaatacgagtttggcaggaaatagcagtggccagtatccttctggctatcaacaacaacaacagcaagtataccagcagggcgctatccatccttcccaatttggatccagatttgttccctccctttatgatcgtcaagatttccaaagaaggcagagtttggctgcaactaattattcttccaatttttcttccttgaatagtaatactaatcaaggaacaaactccataccagtcatgtctccttacaggaggcttagcgcatatcctcctagtacaagtcccccattgcaaccccctttcaagcagttaagaagagatgaagtacaaggtcagaaattgtccattcctcagatgcaactttgcaactctaaaaacgatcttcaacctgtcttaaatgctactccaaagtttagacgtgcgtctctcaattccaagacgatatctcccttggtcagtgtcacgaaaagcttaattaccacatattctttatgttctccagaatttacctaccaaacgtccaaaaaccccaagagagtacttacgaagcccagtgaagggaaatgtaacaacggattcgacaacataaacagtgactatattctttatgtaaatgacgttttgggtgtagagcagaacagaaagtaccttgtgcttgacattttgggtcaaggtacatttggtcaagtggtcaaatgtcaaaatttgttgacgaaagagatattggctgtaaaagtggttaaatctaggacagaatatttgactcaaagtataacggaggctaaaattttagagttattgaatcaaaagatagaccctactaataaacatcattttttaaggatgtatgactcctttgtccacaagaaccacttatgtttagtgtttgaattattaagcaataatttgtacgaattattaaaacaaaacaaatttcatgggctctctatacaacttatcagaacattcaccactcaaatattggattctttatgcgttttgaaggaaagcaaattgattcattgcgatttgaagccagagaatatcttgctctgcgcacctgataagccggaattgaaaattattgattttggctcttcttgcgaagaggcaagaaccgtttatacatacatccagtccaggttttatcgtgctcctgaaattatattaggtataccgtattctaccagtattgacatgtggtctttaggttgtattgttgctgaattatttttgggtataccgatcttcccaggcgcttctgaatataaccaattaacaagaataatagacacgcttggatatcctccatcttggatgatagatatgggtaaaaactctggaaaatttatgaagaaattggcaccagaagaaagttcttcttctacacaaaagcatcgtatgaaaactattgaagagttttgcagagaatacaatatagtggaaaagcccagtaaacaatattttaagtggagaaagttaccagatattattagaaactacaggtatcctaaaagcatacagaactcccaagaacttatcgaccaagaaatgcagaatagggagtgtttgatccactttttaggcggtgtgttgaatttgaacccgttagaaagatggacaccacaacaagctatgttgcaccccttcataacaaagcaggagtttacaggtgagtggtttcctccaggatcttctttaccgggtccttctgaaaaacatgacgatgcaaaaggccagcaaagtgaatatggaagtgcgaacgactctagtaacaatgcaggccacaactatgtctataatcctagctctgccactggtggtgctgatagcgtcgacattggtgctatcagtaaaaggaaggagaatacatctggcgacatctccaataattttgctgttactcattctgttcaagaagggccaacaagcgcgttcaataaacttcacattgtcgaagaatga

SEQ ID NO: 5861 - DNA, 666 bp, Saccharomyces cerevisiae
atgaatgtttctacatcaacctttcaaacaagacggagaagattgaagaaagtggaggaagaagaaaatgcagctactctacaactgggccaggaattccagctgaaacagataaatcatcagggtgaagaggaggaattgattgccttgaacctaagtgaagccaggttagtaatcaaagaagctcttgtagaacgtaggagagcatttaaaagatcgcaaaaaaaacacaagaagaagcatttgaagcacgaaaacgccaatgatgaaactacggcagtagaggatgaagatgatgatctggatgaagatgacgtcaacgctgatgatgatgattttatgcattctgaaactagggagaaggagttggagtctatcgacgttctgttagaacagacaacgggaggaaataataaagatttgaaaaataccatgcagtatttaacaaatttctcccgatttagagaccaagaaaccgtcggggcagttatacagcttctgaaaagcactgggttacatccttttgaagtggcgcaactaggttctttggcctgtgacacagctgatgaagcaaagactttaattccaagcttaaacaataaaatatcagacgatgagttggaaaggatactaaaggaattgtcaaacctagaaacactctattaa

SEQ ID NO: 5862 - DNA, 666 bp, Artificial Sequence
  Description of Artificial Sequence: Synthetic polynucleotide
atgaatgtttctacatctacctttcaaacaagaagaagaagattgaagaaagtggaggaagaagaaaatgcagctactttacaattaggccaggaattccagttgaaacagataaatcatcagggtgaagaggaggaattgattgccttgaacttgagtgaagccaggttagtaatcaaagaagctcttgtagaacgtaggagagcatttaaaagatctcaaaaaaaacacaagaagaagcatttgaagcacgaaaacgccaatgatgaaactacggcagtagaggatgaagatgatgatttggatgaagatgacgtcaacgctgatgatgatgattttatgcattctgaaactagggagaaggagttggagtctatcgacgttttattagaacagacaacgggaggaaataataaagatttgaaaaataccatgcagtatttaacaaatttctccagatttagagaccaagaaaccgtcggggcagttatacagcttttgaaaagcactgggttacatccttttgaagtggcgcaattgggttctttggcctgtgacacagctgatgaagcaaagactttaattccaagcttaaacaataaaatatctgacgatgagttggaaaggatattgaaggaattgtctaacttggaaacactctattga

SEQ ID NO: 5863 - DNA, 1287 bp, Saccharomyces cerevisiae
atggcaaaaggaggctcgctatacatcgttggcatattcttaccaatatggacctttatgatctatatttttggcaaagagttattcctcatacgaaaataccaaaagattgacagtacgtatactgctctttcccaaagagtaaaagaacaatatgatacaagtcgaagaagaaactattttcctaaagtaaaactttcccgcaatagctacgacgactacactttaaattataccagacagaatgattctgattcttttcacctacgagaaaatgcaacaattttaatgctggtgagaaattcagaattagaaggggcattggattcaatgagatcattagaggacagatttaacaacaagtatcattatgattggacttttctaaatgacgttcctttcgatcaagacttcattgaagctacaacatcaatggcgagtgggaagacccaatatgctttaataccaccagaagattggaatcggccgcaatggattaacgatacactttttgaagaaagacttcgagtcatggaggatgagggtgttttatatgggggatccaagtcatatagaaatatgtgtcggtttaattctggtttttttttccggcagtcaatactggacaactatgattactactttagggtggaacccaatgtcaagtattattgcgatttcccatatgacccgttcagagttatgagattgaagggcaaaaaatacggatttgtcatatcattatatgaatatgaagaaaccataccaaccttatgggacgcggtagaggagtatttagtggccagcgaagagaccattttacgtaaagaggacagtgcctatgcatttttgaccgattcagggctagttggtaagcattatcccgttgttgaagcaaactctgactacaatttgtgccatttttggtcgaattttgagattggcgacttgaatttcttcagaagtgacgaatataagcatttttttgaaactttagatgccaagggcggattttactacgaaaggtggggtgacgcacctgtacattcaattggtgtctccctactgctgagacctgacgaaatcattcattttgacgaacttggctattttcactcaccgtttggcacctgtccagcatcttacgctgttaggctcgatcagaggtgtagatgcaaaagcgatgatgaaagtgtcatagatataaccccacatagttgtttgatgagatggtggaaaaacggtagcggcaaatatttcttaaaagaagagcaagacgagatttaa

SEQ ID NO: 5864 - DNA, 1287 bp, Artificial Sequence
  Description of Artificial Sequence: Synthetic polynucleotide
atggcaaaaggaggctccttgtacatcgttggcatattcttaccaatatggacctttatgatctatatttttggcaaagagttattcctcataagaaaataccaaaagattgacagtacgtatactgctctttcccaaagagtaaaagaacaatatgatacaagtagaagaagaaactattttcctaaagtaaaactttcccgcaatagctacgacgactacactttaaattataccagacagaatgattctgattcttttcacttgagagaaaatgcaacaattttaatgttggtgagaaattctgaattagaaggggcattggattctatgagatctttagaggacagatttaacaacaagtatcattatgattggacttttttgaatgacgttcctttcgatcaagacttcattgaagctacaacatctatggcgagtgggaagacccaatatgctttaataccaccagaagattggaatagaccgcaatggattaacgatacactttttgaagaaagacttagggtcatggaggatgagggtgttttatatgggggatccaagagttatagaaatatgtgtagatttaattctggtttttttttcagacagagtatattggacaactatgattactactttagggtggaacccaatgtcaagtattattgcgatttcccatatgacccgttcagagttatgagattgaagggcaaaaaatacggatttgtcatatctttatatgaatatgaagaaaccataccaaccttatgggacgcggtagaggagtatttagtggccagcgaagagaccattttacgtaaagaggacagtgcctatgcatttttgaccgattctgggttggttggtaagcattatcccgttgttgaagcaaactctgactacaatttgtgccatttttggtctaattttgagattggcgacttgaatttcttcagaagtgacgaatataagcatttttttgaaactttagatgccaagggcggattttactacgaaaggtggggtgacgcacctgtacattctattggtgtctccttattattaagacctgacgaaatcattcattttgacgaacttggctattttcactctccgtttggcacctgtccagcatcttacgctgttaggctcgatcagaggtgtagatgcaaaagcgatgatgaaagtgtcatagatataaccccacatagttgtttgatgagatggtggaaaaacggtagcggcaaatatttcttaaaagaagagcaagacgagatttga

SEQ ID NO: 5865 - DNA, 1188 bp, Saccharomyces cerevisiae
atgtctgaaggtattactgatattgaagaatcccaaattcaaaccaactatgacaaggtcgtctacaagttcgatgatatggaattggacgaaaacttgttaagaggtgttttcggttacggtttcgaagaaccatctgccattcaacaacgtgccatcatgcctattattgaaggtcacgatgtcttggctcaagctcaatctggtactggtaagaccggtactttctccattgctgctttgcaaagaattgacacctctgtcaaggctcctcaagctttgatgttggctccaactagagaattggctttgcaaatccaaaaggttgtcatggctttggctttccacatggacatcaaggtccacgcttgtatcggtggtacttcctttgttgaagacgctgaaggtttgagagatgctcaaatcgtcgttggtactccaggtcgtgtttttgacaacatccaaagacgtagattcagaactgacaagatcaagatgttcatcttagatgaagctgatgaaatgttgtcttctggtttcaaggaacaaatctaccaaattttcaccttacttccaccaaccactcaagttgttctattgtccgccaccatgccaaatgacgtcttggaagttaccaccaaatttatgagaaacccagttagaattttggttaagaaggatgaattgactttggaaggtatcaaacaattctacgttaatgttgaagaagaagaatacaaatacgagtgtttgaccgatttatacgactctatctccgttactcaagctgtcatcttctgtaacaccagaagaaaggtcgaagaattgaccactaagttaagaaacgacaaatttaccgtttctgccatctattctgatttaccacaacaagaaagagacaccatcatgaaggaattcagaagtggttcttccagaattttgatctccactgatttgttggctagaggtatcgatgtccaacaagtttctttggttattaactacgacttaccagctaacaaagaaaactatattcacagaatcggtagaggtggtcgtttcggtagaaagggtgttgccatcaactttgttactaacgaagacgttggcgctatgagagaactagaaaagttctactccactcaaattgaagaattgccatccgacattgctaccttgttgaactaa

SEQ ID NO: 5866 - DNA, 1188 bp, Artificial Sequence
  Description of Artificial Sequence: Synthetic polynucleotide
atgtctgaaggtattactgatattgaagaatcccaaattcaaaccaactatgacaaggtcgtctacaagttcgatgatatggaattggacgaaaacttgttaagaggtgttttcggttacggtttcgaagaaccatctgccattcaacaacgtgccatcatgcctattattgaaggtcacgatgtcttggctcaagctcaatctggtactggtaagaccggtactttctccattgctgctttgcaaagaattgacacctctgtcaaggctcctcaagctttgatgttggctccaactagagaattggctttgcaaatccaaaaggttgtcatggctttggctttccacatggacatcaaggtccacgcttgtatcggtggtacttcctttgttgaagacgctgaaggtttgagagatgctcaaatcgtcgttggtactccaggtcgtgtttttgacaacatccaaagacgtagattcagaactgacaagatcaagatgttcatcttagatgaagctgatgaaatgttgtcttctggtttcaaggaacaaatctaccaaattttcaccttacttccaccaaccactcaagttgttttattgtccgccaccatgccaaatgacgtcttggaagttaccaccaaatttatgagaaacccagttagaattttggttaagaaggatgaattgactttggaaggtatcaaacaattctacgttaatgttgaagaagaagaatacaaatacgagtgtttgaccgatttatacgactctatctccgttactcaagctgtcatcttctgtaacaccagaagaaaggtcgaagaattgaccactaagttaagaaacgacaaatttaccgtttctgccatctattctgatttaccacaacaagaaagagacaccatcatgaaggaattcagaagtggttcttccagaattttgatctccactgatttgttggctagaggtatcgatgtccaacaagtttctttggttattaactacgacttaccagctaacaaagaaaactatattcacagaatcggtagaggtggtcgtttcggtagaaagggtgttgccatcaactttgttactaacgaagacgttggcgctatgagagaattggaaaagttctactccactcaaattgaagaattgccatccgacattgctaccttgttgaactga

SEQ ID NO: 5867 - DNA, 1143 bp, Saccharomyces cerevisiae
atggccaagaaagttgccatctgtacattgctgtattcacgggactatttacctggcgcattgactttagcgtaccaattacaaaaactcttgaaacacgctgtagtggaagatgagataaccttatgcctgctaattgaaaaaaaattgtttggagatgagtttaaacctcaggaaatagctttaattagaagtctttttaaagagattatcattattgaaccgctaaaggatcaagagaagagcatagagaagaataaggcaaatcttgaactgttgaaaaggcctgagctatctcatactttactcaaggctagactgtgggaactggtgcagttcgatcaggttttatttttagatgctgatactttaccattaaataaagaattttttgaaatcctacgattataccctgaacaaacaagattccagattgctgcggttccagacatcggatggcctgacatgttcaacaccggtgtactactactaattcctgatttagatatggcaacaagtttacaagattttttgattaaaactgtatcgattgatggtgctgatcaaggaatcttcaatcaattttttaatcctatttgcaactacagcaaagaggttttgcataaggtgtctccactcatggaatggatacgcctccccttcacctacaacgtaaccatgcccaactacggataccagtcttcaccagccatgaattttttccaacaacacatcagacttattcacttcattggaacgtttaagccatggtcccgtaatacaactgactatgacgaccactattaccagctgtggagaagtacacagcgtgaactttatagtgaatgccacttaagtaactacttcacacacttgcaattgggcaatattgaaacagagacaaatttttaccacgaacctccttgtcttcaagacctgttgaatcatggtaaaagagaaaatcaaaagcacgttgacctggatataacctcagtagatcgaaatgcttcgcagaagagtactgcagagaaacatgatattgagaaaccgacatctaagccgcaatctgcttttaaatttgattgggagtctacggattatttagaccgcgtccaaagagcattcccaaagcctgatacctga

SEQ ID NO: 5868 - DNA, 1143 bp, Artificial Sequence
  Description of Artificial Sequence: Synthetic polynucleotide
atggccaagaaagttgccatctgtacattgttatattctagagactatttacctggcgcattgactttagcgtaccaattacaaaaactcttgaaacacgctgtagtggaagatgagataaccttatgccttttgattgaaaaaaaattgtttggagatgagtttaaacctcaggaaatagctttaattagaagtctttttaaagagattatcattattgaaccgttgaaggatcaagagaagagcatagagaagaataaggcaaatcttgaattattgaaaaggcctgagctttctcatactttactcaaggctagattatgggaattagtgcagttcgatcaggttttatttttagatgctgatactttaccattaaataaagaattttttgaaatcttgagattataccctgaacaaacaagattccagattgctgcggttccagacatcggatggcctgacatgttcaacaccggtgtattattattgattcctgatttagatatggcaacaagtttacaagattttttgattaaaactgtatctattgatggtgctgatcaaggaatcttcaatcaattttttaatcctatttgcaactacagcaaagaggttttgcataaggtgtctccactcatggaatggatacgcctccccttcacctacaacgtaaccatgcccaactacggataccagtcttctccagccatgaattttttccaacaacacatcagacttattcacttcattggaacgtttaagccatggtcccgtaatacaactgactatgacgaccactattaccagttatggagaagtacacagcgtgaactttatagtgaatgccacttaagtaactacttcacacacttgcaattgggcaatattgaaacagagacaaatttttaccacgaacctccttgtcttcaagacttgttgaatcatggtaaaagagaaaatcaaaagcacgttgacttggatataacctctgtagatagaaatgcttctcagaagagtactgcagagaaacatgatattgagaaaccgacatctaagccgcaatctgcttttaaatttgattgggagtctacggattatttagaccgcgtccaaagagcattcccaaagcctgatacctga

SEQ ID NO: 5869 - DNA, 84 bp, Saccharomyces cerevisiae
atgacacgatgtataagtaaaaaaatgcttttggaggtggatgcgctatccttgatctactcccctcatctttatatgtcatag

SEQ ID NO: 5870 - DNA, 84 bp, Artificial Sequence
  Description of Artificial Sequence: Synthetic oligonucleotide
atgacaagatgtataagtaaaaaaatgcttttggaggtggatgcgctttccttgatctactcccctcatctttatatgtcctga

SEQ ID NO: 5871 - DNA, 264 bp, Saccharomyces cerevisiae
atggaaaacgataagggtcaattagttgaattatatgttccaagaaagtgttctgctaccaacagaatcatcaaagccgatgaccacgcttctgttcaaatcaacgttgccaaggttgatgaagaaggccgcgccattccaggtgaatacatcacttacgctttgtccggttacgttagatccagaggtgaatccgatgactctttgaaccgtttggctcaaaacgatggtttgttgaagaacgtttggtcttactcccgttaa

SEQ ID NO: 5872 - DNA, 264 bp, Artificial Sequence
  Description of Artificial Sequence: Synthetic polynucleotide
atggaaaacgataagggtcaattagttgaattatatgttccaagaaagtgttctgctaccaacagaatcatcaaagccgatgaccacgcttctgttcaaatcaacgttgccaaggttgatgaagaaggccgcgccattccaggtgaatacatcacttacgctttgtccggttacgttagatccagaggtgaatccgatgactctttgaaccgtttggctcaaaacgatggtttgttgaagaacgtttggtcttactcccgttga

SEQ ID NO: 5873 - DNA, 1230 bp, Saccharomyces cerevisiae
atggtagatggactgaatacctcgaacattaggaaaagagccaggactctctctaaccccaatgactttcaagagcctaattacttgctggatcccggtaatcatccctcagatcattttcgaactcgaatgtccaaatttcggtttaatattagagagaagctgttagtgtttaccaacaatcaatcattcacattaagccgctggcaaaagaagtaccgttctgcgtttaatgatctctactttacttatacttccttaatgggatcgcataccttctatgttctgtgtttacctatgcccgtgtggtttggatattttgaaacaacaaaagatatggtttatatcttgggatattctatctacttgagtggtttttttaaagattactggtgcttgcccaggcctagagcacctccattacatcgaattacgttaagtgaatatacaacgaaggaatatggtgctccaagctcccatacagcaaatgcaacaggagtgagtctcttgtttctctacaacatctggaggatgcaagaatcttctgtcatggtccaactattgttgtcatgtgtggttttattttattatatgactttggttttcggtagaatatactgtgggatgcatggcatattagatttagtaagcggtgggctcattggaatagtgtgtttcattgttaggatgtatttcaagtacaggtttccgggtttacgcattgaggagcattggtggtttcctttgtttagtgtgggatggggtcttcttcttttgtttaaacatgttaagcccgtagacgaatgtccttgcttccaagatagtgttgcgttcatgggcgttgtgtcaggtattgaatgctgtgattggttgggcaaagtgtttggagtcaccctggtgtacaatttggaacctaactgtggctggcggttaaccttagccaggctgctggtgggcctaccgtgcgttgttatctggaagtacgtgatcagcaaaccgatgatctacacgttattgatcaaagttttccatctgaaggatgacagaaacgttgcggcaagaaaaagactggaggccacgcacaaagaaggtgcaagcaagtacgaatgtccattatatattggagagcccaagattgacattctaggtagatttattatctatgctggcgttccattcaccgttgtaatgtgcagccccgtcctattttccctcttaaatatagcataa

SEQ ID NO: 5874 - DNA, 1230 bp, Artificial Sequence
  Description of Artificial Sequence: Synthetic polynucleotide
atggtagatggattgaataccagtaacattaggaaaagagccaggactctctctaaccccaatgactttcaagagcctaattacttgttggatcccggtaatcatccctctgatcattttagaactagaatgtccaaatttagatttaatattagagagaagcttttagtgtttaccaacaatcaaagtttcacattaagccgctggcaaaagaagtaccgttctgcgtttaatgatctctactttacttatacttccttaatgggatctcataccttctatgttttatgtttacctatgcccgtgtggtttggatattttgaaacaacaaaagatatggtttatatcttgggatattctatctacttgagtggtttttttaaagattactggtgcttgcccaggcctagagcacctccattacatagaattacgttaagtgaatatacaacgaaggaatatggtgctccaagctcccatacagcaaatgcaacaggagtgagtctcttgtttctctacaacatctggaggatgcaagaatcttctgtcatggtccaattattgttgagttgtgtggttttattttattatatgactttggttttcggtagaatatactgtgggatgcatggcatattagatttagtaagcggtgggctcattggaatagtgtgtttcattgttaggatgtatttcaagtacaggtttccgggtttacgcattgaggagcattggtggtttcctttgtttagtgtgggatggggtcttcttcttttgtttaaacatgttaagcccgtagacgaatgtccttgcttccaagatagtgttgcgttcatgggcgttgtgagtggtattgaatgctgtgattggttgggcaaagtgtttggagtcaccttagtgtacaatttggaacctaactgtggctggagattaaccttagccaggttattggtgggcttaccgtgcgttgttatctggaagtacgtgatcagcaaaccgatgatctacacgttattgatcaaagttttccatttgaaggatgacagaaacgttgcggcaagaaaaagattggaggccacgcacaaagaaggtgcaagcaagtacgaatgtccattatatattggagagcccaagattgacattttgggtagatttattatctatgctggcgttccattcaccgttgtaatgtgcagccccgtcttgttttccctcttaaatatagcatga

SEQ ID NO: 5875 - DNA, 225 bp, Saccharomyces cerevisiae
atgatcgcccaaagtaccagattagccgccgccgtctcttcttcagccgcctccgcgggtgtctcaaggatagccgctagcgccatggccagcactattttcaagagatctccgggcaactcgttcaactcttttaaggaatatagagaaaatgccaagacatatggtcccttgagtgcctcactagctaccagaagacacttggctcacgcgccaaagttgtag

SEQ ID NO: 5876 - DNA, 225 bp, Artificial Sequence
  Description of Artificial Sequence: Synthetic polynucleotide
atgatcgcccaaagtaccagattagccgccgccgtctcttcttctgccgcctccgcgggtgtctccaggatagccgctagcgccatggccagcactattttcaagagatctccgggcaactctttcaactcttttaaggaatatagagaaaatgccaagacatatggtcccttgagtgcctctttggctaccagaagacacttggctcacgcgccaaagttgtga

SEQ ID NO: 5877 - DNA, 945 bp, Saccharomyces cerevisiae
atggtagaaaactcgtcgagtaataattcaacaaggccaattccagcaatacctatggatctacccgattatgaggcgctccccacccacgcgccattgtaccatcaacttatagcgggtgcatttgctggtataatggaacattcagtgatgttcccgatagatgcccttaagacgcgaatacaatcagccaacgcgaaatcgctgtctgccaagaatatgctttcgcaaatatctcacatctctacttccgaaggaactctagccctatggaagggtgttcagtctgtcatactaggtgcgggacctgcgcatgcagtgtattttggtacgtatgagttctgcaaaaaaaatcttatcgattcgagtgatacgcaaacgcaccatccttttaagacagctatcagtggtgcctgtgccaccacggcatctgacgcattaatgaacccattcgacacaataaaacagagaatccaactcaatacctcggcatcagtatggcaaaccacaaagcagatttaccaatctgaaggtttggcagcattttattattcttacccaaccaccctagtaatgaacatcccatttgcagcatttaatttcgtcatatatgaatcatccacaaaatttttaaacccatcaaatgagtacaaccccctcatacattgtctgtgtggcagtatcagcggatcgacatgtgcggcgatcacaacacctttagactgcataaagacagtactgcagataaggggcagtcaaacagtttcgttggaaattatgagaaaggcggatacttttagtaaagcagccagtgccatatatcaagtttatggctggaaagggttttggagaggttggaaaccaaggatagtggcaaacatgccggctactgctatatcatggacagcttatgaatgtgcaaaacatttcctaatgacgtattag

SEQ ID NO: 5878 - DNA, 945 bp, Artificial Sequence
  Description of Artificial Sequence: Synthetic polynucleotide
atggtagaaaactcttccagtaataattctacaaggccaattccagcaatacctatggatttgcccgattatgaggcgctccccacccacgcgccattgtaccatcaacttatagcgggtgcatttgctggtataatggaacattctgtgatgttcccgatagatgcccttaagacgagaatacaatctgccaacgcgaaatctttatctgccaagaatatgctttctcaaatatctcacatctctacttccgaaggaactttggccttatggaagggtgttcagtctgtcatattaggtgcgggacctgcgcatgcagtgtattttggtacgtatgagttctgcaaaaaaaatcttatcgattctagtgatacgcaaacgcaccatccttttaagacagctatcagtggtgcctgtgccaccacggcatctgacgcattaatgaacccattcgacacaataaaacagagaatccaactcaatacctctgcatctgtatggcaaaccacaaagcagatttaccaatctgaaggtttggcagcattttattattcttacccaaccaccttggtaatgaacatcccatttgcagcatttaatttcgtcatatatgaatcttccacaaaatttttaaacccatccaatgagtacaaccccctcatacattgtttatgtggcagtatcagcggaagtacatgtgcggcgatcacaacacctttagactgcataaagacagtattacagataaggggcagtcaaacagtttctttggaaattatgagaaaggcggatacttttagtaaagcagccagtgccatatatcaagtttatggctggaaagggttttggagaggttggaaaccaaggatagtggcaaacatgccggctactgctatatcttggacagcttatgaatgtgcaaaacatttcttaatgacgtattga

SEQ ID NO: 5879 - DNA, 2253 bp, Saccharomyces cerevisiae
atgagtataattagttcttggttacttgtctctattatttgcttaactacttctattgtaacaaaattgcaagctgctggagttactacccatctattttatttaacaagaggtgctcccttaagtttaaaggaaaactattatccttggttgaaagctggttctttctttccggatgctttgtactcatgtgcaccttcaaataaggattggtctgattttgcagaattcactcattggcccaatttcttaatgattgcagtatcttattggcagcaaaagtatggtcagaacgatcgacttcggggaactcacggctcactcgcactaaagtcatttttaataggggtattcactcatcagatagttgatgtttcctggcattcgttagttaccgattatagaatgcacggactactccgagttctcagcgaaacagaatttgatggagatattgaaactgctcatacgtttttagacgttatgggtgaattcctcaccttaaataatgtaatccgtgacagtaataataacgaaaattgggattttttaactcgctctgattggaaattgcccagagaagaggatttaatggaaattataaggaacgctggactttcaaaggaaaagttgtcctacgcagaactggaattttgcgttaaaagaggaatggcagcggctattagtgaagggtacctattccgctctcaaagaaaccaattgttaactaatatttactcaacatcccccagggctaatgatctaatactgaatcattggctaggagggcagtccaatttggttgcaatgctccaaagatgcgtgcctttcttcgagactttgtttcatgacgagaatactaatgaagctcaagcagaagaactgagattatgtgctaatttaccgccagtatcacaaaaacggataaatgcacgacctttggtctcttcattaaaagcacgtaagggaaatagccacattgtcgtatctcccatgaaatcattttccgattttggcacaagcctgactatgggaaaatttcgagaagacaacaaggattatctcgctgtaagtgcaccacttgaagacacagttggtgcaatctatatagttccatgggatattctaactgtagcaagaaaagaggattttagcattttacaacccatcactgccatgtacggttcaaaggtcgggacatacaaggcaagtgatgttgactacctactcgtttcacagcctggtacctgtacaatcgacttttacttcaaaggagtaaaaatactgacaatcaaggatgagaccaccgaagaagcacatcagttacaatttgctgtaacaggtaatttttatgatgataagattcctgatttggtggtgtcaagcccaagttatggtgccaacgaaactggaattgcaacatttatcccaggatcttccataataagctatttgaccaattcagacaaatatcaagtagttgatatctcaacttttaagggcgttattaaccttgacgggtaccctatgaaaataccatttcagcatttcggggcaacaattcagatatctgacacgactgacaaacaaaagttaatatatattacatgtcaaagtcttggtactgtttttgtttattcgagtaatgatttacacgatttgtccatcccaatatattatataacgaaaaatggcgtcattccagcaaaggacagtgaccacgttgagtggcatataattccctcaaaagaacatggtatgttcggtgcagccatatattcttggaattttgaaggtatgagttttgtagccgtatctcaaccaatgtttgacactgtgtttatatatattgagaagtctgggcaaatagagtttttcttaaaactggttctaaagattaagacaaaatcagattcaatcccggatgagtttggttcatctttgctgtttaatgacgaagaaaagaaattgtacgtttcctccccaggcagtttcgatgcaagaggaagtatatggaaaattagtatggatgagctattaaaggcgggaaacgatccgaagcgcaaaacccttttgattaataatttaaggcatctcatgctcataaatcctgacaaaagtagcaagggtgtgtcaaattttggtaatagcatgattttgggtccccaaaatcaccttatagtaggcattccccaatatgggtatggaaattttgatcacatgcagctaaccggtagaatcctggtactttaa

SEQ ID NO: 5880 - DNA, 2253 bp, Artificial Sequence
  Description of Artificial Sequence: Synthetic polynucleotide
atgagtataattagttcttggttacttgtctctattatttgcttaactacttctattgtaacaaaattgcaagctgctggagttactacccatttattttatttaacaagaggtgctcccttaagtttaaaggaaaactattatccttggttgaaagctggttctttctttccggatgctttgtactcttgtgcaccttccaataaggattggtctgattttgcagaattcactcattggcccaatttcttaatgattgcagtatcttattggcagcaaaagtatggtcagaacgatagacttagaggaactcacggcagtctcgcattgaagagctttttaataggggtattcactcatcagatagttgatgtttcctggcattctttagttaccgattatagaatgcacggattactcagggttctcagcgaaacagaatttgatggagatattgaaactgctcatacgtttttagacgttatgggtgaattcctcaccttaaataatgtaatccgtgacagtaataataacgaaaattgggattttttaactcgctctgattggaaattgcccagagaagaggatttaatggaaattataaggaacgctggactttccaaggaaaagttgtcctacgcagaattggaattttgcgttaaaagaggaatggcagcggctattagtgaagggtaccttttccgctctcaaagaaaccaattgttaactaatatttactccacatcccccagggctaatgatttgatattgaatcattggttaggagggcagtccaatttggttgcaatgctccaaagatgcgtgcctttcttcgagactttgtttcatgacgagaatactaatgaagctcaagcagaagaattgagattatgtgctaatttaccgccagtatctcaaaaaagaataaatgcaagacctttggtctcttctttaaaagcacgtaagggaaatagccacattgtcgtatctcccatgaaaagtttttccgattttggcacaagcttaactatgggaaaatttagagaagacaacaaggattatctcgctgtaagtgcaccacttgaagacacagttggtgcaatctatatagttccatgggatattttgactgtagcaagaaaagaggattttagcattttacaacccatcactgccatgtacggttccaaggtcgggacatacaaggcaagtgatgttgactacttgctcgtttctcagcctggtacctgtacaatcgacttttacttcaaaggagtaaaaatattaacaatcaaggatgagaccaccgaagaagcacatcagttacaatttgctgtaacaggtaatttttatgatgataagattcctgatttggtggtgagtagcccaagttatggtgccaacgaaactggaattgcaacatttatcccaggatcttccataataagctatttgaccaatagtgacaaatatcaagtagttgatatctctacttttaagggcgttattaaccttgacgggtaccctatgaaaataccatttcagcatttcggggcaacaattcagatatctgacacgactgacaaacaaaagttaatatatattacatgtcaaagtcttggtactgtttttgtttattctagtaatgatttacacgatttgtccatcccaatatattatataacgaaaaatggcgtcattccagcaaaggacagtgaccacgttgagtggcatataattccctctaaagaacatggtatgttcggtgcagccatatattcttggaattttgaaggtatgagttttgtagccgtatctcaaccaatgtttgacactgtgtttatatatattgagaagtctgggcaaatagagtttttcttaaaattggttttgaagattaagacaaaatctgattctatcccggatgagtttggttcttctttgttatttaatgacgaagaaaagaaattgtacgtttcctccccaggcagtttcgatgcaagaggaagtatatggaaaattagtatggatgagttattaaaggcgggaaacgatccgaagcgcaaaacccttttgattaataatttaaggcatctcatgctcataaatcctgacaaaagtagcaagggtgtgagtaattttggtaatagcatgattttgggtccccaaaatcaccttatagtaggcattccccaatatgggtatggaaattttgatcacatgcagttgaccggtagaatccttgtactttga

SEQ ID NO: 5881 - DNA, 1071 bp, Saccharomyces cerevisiae
atgttaaaagttcctttgagtgatgttctttcacagaagatgctgtttttaaaaagttttagatattttcattgcacaaaatacttcagcagagacaatgcatcatctaccacagatatatttcgcaacgcaatgaaacgtaaacgtgagctggcaaatcttaaagagcaaagtcatggaaatgtggcaagaaatgctgcttttcctaaagagtatattaagcgcccgaaacaagtgccaaggaatgctactaacaggaaaaaaatcctgattacttggagcaccgggacagatcgagctaaagaggcagctaattcagttgttagtgagatattcaaaaaaaatcacaagggaaacatcaaagttgtggatcccactacccaccgaattgaagcatccaatattcggtattttgccaagggcattgatctcgataaagttggactcagtattgttaatgtagagcaaatcgataatgaaaatcaaattccacttgttaagatagtcgaaagtcgtgtagccttaaaaaaatattcagactttctggctaaaaaaaaggaaaaggaactgatggaattgggagtactgaataagtcttacaagaatttggtgactgataaaaaagaagataacttgaagcatattaaaatatcatggcagattgaaagcgatgatttaaaaaggcagaaggctcacgaaatagtttcgctattgaaaaaagggaataaagtaacgttatatcttgatgacaagaataacataaattcaaacaattggcttgaaaattttgaggagctggaccgctctcaaaaaggtgaaccacccaggctaccagaatcagttttccagaaaagagctgctgtcttggagacattgaaagagatagttagcgaatatgctaatgatcctgttctgctaggtaacatgaactcgaaaatgataatgaaacttataccaaaggacgttaaaccacaaaacaacgataagagggcgttaaaggaattgagaaagaaggagaggcaagaaaaattgcaaaaaaggattcagagaaaaaaaatgaatgaaatgtaa

SEQ ID NO: 5882 - DNA, 1071 bp, Artificial Sequence
  Description of Artificial Sequence: Synthetic polynucleotide
atgttaaaagttcctttgagtgatgttctttctcagaagatgttatttttaaaaagttttagatattttcattgcacaaaatacttcagcagagacaatgcatcttctaccacagatatatttcgcaacgcaatgaaacgtaaacgtgagttggcaaatcttaaagagcaaagtcatggaaatgtggcaagaaatgctgcttttcctaaagagtatattaagcgcccgaaacaagtgccaaggaatgctactaacaggaaaaaaatcttgattacttggagcaccgggacagatagagctaaagaggcagctaattctgttgttagtgagatattcaaaaaaaatcacaagggaaacatcaaagttgtggatcccactacccacagaattgaagcatccaatattcgttattttgccaagggcattgatctcgataaagttggactcagtattgttaatgtagagcaaatcgataatgaaaatcaaattccacttgttaagatagtcgaaagtcgtgtagccttaaaaaaatattctgactttttggctaaaaaaaaggaaaaggaattgatggaattgggagtattgaataagtcttacaagaatttggtgactgataaaaaagaagataacttgaagcatattaaaatatcttggcagattgaaagcgatgatttaaaaaggcagaaggctcacgaaatagtttctttgttgaaaaaagggaataaagtaacgttatatcttgatgacaagaataacataaatagcaacaattggcttgaaaattttgaggagttggaccgctctcaaaaaggtgaaccacccaggttaccagaatctgttttccagaaaagagctgctgtcttggagacattgaaagagatagttagcgaatatgctaatgatcctgttttgttgggtaacatgaactccaaaatgataatgaaacttataccaaaggacgttaaaccacaaaacaacgataagagggcgttaaaggaattgagaaagaaggagaggcaagaaaaattgcaaaaaaggattcagagaaaaaaaatgaatgaaatgtga

SEQ ID NO: 5883 - DNA, 6645 bp, Saccharomyces cerevisiae
atggccactattgctcccactgctccaatcacccctccaatggaatctacgggtgaccgtctggttacgttggaacttaaggacggcacggtcttacaaggttattcatttggtgctgagaaatccgtcgctggtgaattagttttccaaactggtatggttggttatcctgaatctgtgaccgatccatcttatgaaggccagatcttagtcatcacttacccattggtaggcaattatggtgtcccagatatgcacttgagagatgaattggtcgaagaattgccaagatattttgaaagtaatagaatccatattgccggtttagttatttctcactataccgacgagtactctcattatcttgctaaatcttccttaggtaaatggttacaaaatgaagggatcccagctgtttatggtgttgatacaagatcattgaccaagcatttgagagatgcaggttcaatgttgggtaggttgtctttggaaaaaagcggctctgacagaaccatctccagatcttcctcttggagaagtgcgtttgatgttcctgaatgggtggatccaaatgttcaaaacctagtttctaaggtctccatcaatgaacctaaattgtacgttcctccagcagacaataagcacatcgaattgcaaaccggacccgatggtaaagttttaaggattctagccattgacgtgggtatgaaatacaatcaaattcgttgttttatcaaaaggggtgtagaattgaaagttgttccatggaactacgatttcactaaagaagattatgatggtctgtttatttcaaatggtccaggtgatccatctgttctagatgatctatctcaaagattgtcaaatgtcctggaggctaaaaagacgccagtattcggtatttgtctcggtcatcaattgatagcaagagctgccggtgcatccaccctaaaactaaaatttggtaaccgtggtcataacataccttgtacatcaactataagtggtcgttgttacataacatctcaaaaccatgggttcgctgtggatgttgacactctaacttccggatggaagccattgtttgttaacgcgaatgatgactctaacgaaggtatctatcattctgaattaccttatttttccgtccaattccatccagaatccacacctggcccaagagatacagaattcttgtttgacgtttttatccaagcagttaaagaattcaagtatacacaagtgttgaaaccaatcgctttcccaggtggcctattagaggataacgttaaggcacaccctagaatcgaagcgaagaaggttctagttctcggttctggtggtttgtccatcggtcaagctggtgaatttgactactctggttctcaagccatcaaagctttgaaagaagaaggtatctatacaattttaattaatccaaacattgctaccatccaaacttcgaaagggttggctgataaggtttattttgttcctgttactgcagagttcgtgagaaaagttattttacatgaaaggccggacgccatttatgtgacatttggtggacaaactgctttatctgttggtatagccatgaaagatgaatttgaggcgttaggagttaaagtattgggtactccaatcgatactattattaccacggaagaccgtgaactcttcagtaatgccattgacgaaattaatgaaaaatgtgcgaaatctcaagctgctaattcagtggacgaggcattggccgctgtcaaggagatcggtttcccagttattgtacgtgctgcatatgcattgggaggtttaggttccggtttcgctaataatgaaaaagaattggttgatctatgtaatgttgcattttcatcctcacctcaagttttagtcgagaaatctatgaaaggttggaaagaagtcgaatatgaagttgttcgtgatgcttttgacaactgtattactgtttgtaatatggaaaattttgatccactaggtattcacaccggtgattccatcgttgtagccccatctcaaactttatctgatgaagattacaatatgttaagaactactgctgttaatgttattagacacttaggtgttgttggtgaatgtaatatccaatatgctttaaatcccgtttctaaggattattgcatcattgaagttaatgcgcgtttgtcacgttcctctgctttagcttctaaggctactggttacccattggcctacactgcggctaagttaggtttgaatatcccattaaatgaagttaagaattccgtcacaaaatccacatgtgcttgttttgaaccttctctagactactgtgttgtcaaaatgccaagatgggatttgaagaagttcaccagagtttctaccgaattatcttcatcaatgaaatctgttggtgaagttatgagcatcggtagaaccttcgaagaagctattcaaaaagctatcagatccacagaatatgctaacctcggattcaatgagacagatctagatatcgacattgattacgagttgaacaaccctacggatatgcgtgtcttcgccattgcaaatgcttttgctaagaagggatattctgttgataaagtctgggaaatgactagaattgataagtggtttttaaacaaactgcacgatttggtccaatttgctgagaaaattagttcatttggtactaaagaggaattaccttccttagttttaagacaggctaagcagttaggttttgatgacagacagattgcaagatttttggattccaacgaagttgccatccgtagattaagaaaagaatatggaattacaccatttgtcaaacaaattgatacagttgccgctgaattccccgcttacacgaactatttatacatgacatacaatgctgactcacacgatttatcctttgatgaccacggtgttatggtcttgggttctggtgtttaccgtatcggttcttctgtcgaatttgattggtgtgctgttactgcagttagaacattacgtgccaacaatatcaaaactatcatggtcaactataatccagaaactgtttccacagattatgatgaggctgatagactatactttgaaaccatcaaccttgaaagagttttggatatttacgagattgaaaactcaagcggtgttgtcgtatcaatgggtggtcaaacttccaacaacatcgccatgactttacatcgtgaaaatgtaaagattcttggtacatcccctgacatgattgattctgctgaaaaccgttacaagttctctcgtatgttggatcaaattggtgttgaccaaccagcttggaaagaattgacatccatggacgaagctgaatcttttgccgaaaaggtgggttatccagttttggtacgtccatcttatgtgttatccggtgccgccatgaatactgtttattctaaaaacgatttggaatcctacttaaaccaagccgtcgaagtttcacgtgattatcctgttgttatcactaaatatattgaaaacgcaaaggagattgaaatggatgcagttgcaagaaatggtgaattggttatgcatgttgtctctgagcatgttgaaaatgcaggtgtccactcgggtgatgcaacattaatcgttccacctcaagatttggctcctgaaactgtggatagaattgttgtcgccactgctaaaattggtaaggctttgaaaattacaggtccatacaacatccaattcattgcaaaggacaatgaaatcaaggtcatagaatgtaatgttcgtgcttcgagatctttcccattcatttcaaaggttgttggcgtcaatctgattgaattggcaacaaaggccataatgggtttgcctttgacgccttatcctgttgaaaaattaccagatgattatgtcgccgttaaagtaccacaattctctttcccacgtttagcaggagctgatccagtcttaggtgttgaaatggcctctactggtgaagtcgctacttttggccactcgaagtatgaagcatacttaaagtctttgttggcaaccggcttcaaacttccaaagaagaatattttattgtctattggttcttacaaggaaaaacaagaattgctttcttccgtacaaaaactatacaacatgggatataaattatttgcaacatcaggtactgctgactttttatctgaacatggtattgccgtccaatatctggaggttttaaacaaggatgatgatgatcaaaaatcagaatactcacttactcaacatttggctaataatgaaattgacctttacatcaacttgccttctgccaacaggttccgtcgtcctgcatcctatgtttcaaaggggtataaaacacgtcgtttggctgtcgattattcggttccgttggttactaacgttaaatgtgcaaaattgttgattgaagccatttcaagaaatatcactttagatgtttctgaacgtgatgcacaaacttcccacagaactattaccttacctggtttaatcaatatcgcaacttatgttccgaatgcatcccatgttatcaaaggcccagctgaactgaaggagaccacacgtctatttttggaatccggttttacatactgtcaattgatgcccagatccatcagcggacctgttattactgacgttgcatccttgaaggccgcaaactctgtttcccaagattcatcttacactgacttttctttcactattgctggtacagcacacaatgctcatagtgttacgcaatctgctagcaaagtgacagcattgtttttgcccctacgtgaattaaagaacaagatcacagcagtagctgaacttctgaatcagtggccaactgaaaagcaagtgattgcagaagctaaaactgcagatttggcatcggttttattgttaacctcccttcaaaacagatctattcacattactggtgtttcgaataaggaagatttagctttgatcatgacggtcaaggcaaaagaccctagagtgacttgtgatgtcaatatttattctttgtttattgcccaagatgactatccggaggcagttttcttgcctactaaggaagatcaagagtttttctggaacaaccttgatagtatcgatgctttctctgtcggtgctcttcctgtcgccttggcaaatgtcacaggtaacaaggttgatgttggtatgggtatcaaagattcattaccactattgttggctgctgttgaagaaggtaaattaaccattgatgatatcgtccttcgtctgcatgacaatcccgctaaaattttcaacatccctactcaggactcagttgtcgaaattgatttggattattctttcagacgtaataagagatggtcaccattcaacaaagatatgaacggtggtattgagcgtgttgtctataatggcgaaacattagttttgagcggtgaattagtttcaccaggcgccaaaggaaaatgcattgttaatccaagtccagcttccataactgcttccgcagagctccaatctactagtgctaaaagaaggttctcgatcacggaagaagcaatcgctgataatttagatgccgcggaggatgcaattccagaacagcctttggaacaaaaattgatgtcttcaaggccaccaagagaacttgttgctccaggcgccatccagaatttgatccgtagtaacaatccattccgcggaagacatatattgtctatcaaacaattcaaacgttctgatttccatgtgttgtttgctgttgcacaagaactaagggcagctgtcgcaagagaaggtgtcttagatttaatgaaaggccacgttattactacaattttctttgaaccatctactcgtacttgttcttcattcattgctgctatggaacgtttgggtggtagaattgtaaatgttaatccattggtgtcttctgtcaagaaaggtgaaacccttcaagatactatcagaactttggcttgttacagtgatgccattgtcatgcgtcattcagaagaaatgtctgttcatatcgccgctaaatattctcctgttccaattattaatggtggtaatggttctcgcgagcatcctacgcaggccttcttggatttgtttacgattcgtgaagaaatcggtactgttaatggtattactgttactttcatgggtgatctcaaacatggtagaaccgtacattcattgtgtcgtttgttaatgcactatcaagtcagaattaatcttgtttctcctccggaattgaggttaccagaaggattaagagaagagctaagaaaagctggcttacttggtgttgagagcattgaattaacccctcatatcatctcaaagaccgatgttctgtattgtacaagggtccaagaagaaagattcaatagccctgaagaatatgcacgtctgaaggatacttatatcgtggacaacaagatcttggcacacgccaaagaaaatatggctatcatgcatccattgcctcgtgtaaatgaaatcaaagaggaagtggactacgatcatcgtgctgcttacttcagacaaatgaagtatggtttgttcgtcagaatggctttgttggccatggtcatgggtgttgatatgtga

SEQ ID NO: 5884 - DNA, 6645 bp, Artificial Sequence
  Description of Artificial Sequence: Synthetic polynucleotide
atggccactattgctcccactgctccaatcacccctccaatggaatctacgggtgaccgtttagttacgttggaacttaaggacggcacggtcttacaaggttattcttttggtgctgagaaatccgtcgctggtgaattagttttccaaactggtatggttggttatcctgaatctgtgaccgatccatcttatgaaggccagatcttagtcatcacttacccattggtaggcaattatggtgtcccagatatgcacttgagagatgaattggtcgaagaattgccaagatattttgaaagtaatagaatccatattgccggtttagttatttctcactataccgacgagtactctcattatcttgctaaatcttccttaggtaaatggttacaaaatgaagggatcccagctgtttatggtgttgatacaagaagtttgaccaagcatttgagagatgcaggttctatgttgggtaggttgtctttggaaaaaagcggctctgacagaaccatctccagatcttcctcttggagaagtgcgtttgatgttcctgaatgggtggatccaaatgttcaaaacttggtttctaaggtctccatcaatgaacctaaattgtacgttcctccagcagacaataagcacatcgaattgcaaaccggacccgatggtaaagttttaaggattttagccattgacgtgggtatgaaatacaatcaaattcgttgttttatcaaaaggggtgtagaattgaaagttgttccatggaactacgatttcactaaagaagattatgatggtttatttatttctaatggtccaggtgatccatctgttttggatgatttatctcaaagattgagcaatgtcttggaggctaaaaagacgccagtattcggtatttgtctcggtcatcaattgatagcaagagctgccggtgcatccaccttgaaattgaaatttggtaaccgtggtcataacataccttgtacatctactataagtggtcgttgttacataacatctcaaaaccatgggttcgctgtggatgttgacactttaacttccggatggaagccattgtttgttaacgcgaatgatgactctaacgaaggtatctatcattctgaattaccttatttttccgtccaattccatccagaatccacacctggcccaagagatacagaattcttgtttgacgtttttatccaagcagttaaagaattcaagtatacacaagtgttgaaaccaatcgctttcccaggtggcttattagaggataacgttaaggcacaccctagaatcgaagcgaagaaggttttggttctcggttctggtggtttgtccatcggtcaagctggtgaatttgactactctggttctcaagccatcaaagctttgaaagaagaaggtatctatacaattttaattaatccaaacattgctaccatccaaacttctaaagggttggctgataaggtttattttgttcctgttactgcagagttcgtgagaaaagttattttacatgaaaggccggacgccatttatgtgacatttggtggacaaactgctttatctgttggtatagccatgaaagatgaatttgaggcgttaggagttaaagtattgggtactccaatcgatactattattaccacggaagaccgtgaactcttcagtaatgccattgacgaaattaatgaaaaatgtgcgaaatctcaagctgctaattctgtggacgaggcattggccgctgtcaaggagatcggtttcccagttattgtacgtgctgcatatgcattgggaggtttaggttccggtttcgctaataatgaaaaagaattggttgatttatgtaatgttgcattttcttcctcccctcaagttttagtcgagaaatctatgaaaggttggaaagaagtcgaatatgaagttgttcgtgatgcttttgacaactgtattactgtttgtaatatggaaaattttgatccattgggtattcacaccggtgattccatcgttgtagccccatctcaaactttatctgatgaagattacaatatgttaagaactactgctgttaatgttattagacacttaggtgttgttggtgaatgtaatatccaatatgctttaaatcccgtttctaaggattattgcatcattgaagttaatgcgcgtttgtctcgttcctctgctttagcttctaaggctactggttacccattggcctacactgcggctaagttaggtttgaatatcccattaaatgaagttaagaattccgtcacaaaatccacatgtgcttgttttgaaccttctttggactactgtgttgtcaaaatgccaagatgggatttgaagaagttcaccagagtttctaccgaattatcttcttctatgaaatctgttggtgaagttatgagcatcggtagaaccttcgaagaagctattcaaaaagctatcagatccacagaatatgctaacctcggattcaatgagacagatttggatatcgacattgattacgagttgaacaaccctacggatatgcgtgtcttcgccattgcaaatgcttttgctaagaagggatattctgttgataaagtctgggaaatgactagaattgataagtggtttttaaacaaattacacgatttggtccaatttgctgagaaaattagttcttttggtactaaagaggaattaccttccttagttttaagacaggctaagcagttaggttttgatgacagacagattgcaagatttttggattccaacgaagttgccatccgtagattaagaaaagaatatggaattacaccatttgtcaaacaaattgatacagttgccgctgaattccccgcttacacgaactatttatacatgacatacaatgctgactctcacgatttatcctttgatgaccacggtgttatggtcttgggttctggtgtttaccgtatcggttcttctgtcgaatttgattggtgtgctgttactgcagttagaacattacgtgccaacaatatcaaaactatcatggtcaactataatccagaaactgtttccacagattatgatgaggctgatagattatactttgaaaccatcaaccttgaaagagttttggatatttacgagattgaaaactccagcggtgttgtcgtatctatgggtggtcaaacttccaacaacatcgccatgactttacatcgtgaaaatgtaaagattcttggtacatcccctgacatgattgattctgctgaaaaccgttacaagttctctcgtatgttggatcaaattggtgttgaccaaccagcttggaaagaattgacatccatggacgaagctgaatcttttgccgaaaaggtgggttatccagttttggtacgtccatcttatgtgttatccggtgccgccatgaatactgtttattctaaaaacgatttggaatcctacttaaaccaagccgtcgaagtttctcgtgattatcctgttgttatcactaaatatattgaaaacgcaaaggagattgaaatggatgcagttgcaagaaatggtgaattggttatgcatgttgtctctgagcatgttgaaaatgcaggtgtccactctggtgatgcaacattaatcgttccacctcaagatttggctcctgaaactgtggatagaattgttgtcgccactgctaaaattggtaaggctttgaaaattacaggtccatacaacatccaattcattgcaaaggacaatgaaatcaaggtcatagaatgtaatgttcgtgcttccagatctttcccattcatttccaaggttgttggcgtcaatttaattgaattggcaacaaaggccataatgggtttgcctttgacgccttatcctgttgaaaaattaccagatgattatgtcgccgttaaagtaccacaattctctttcccacgtttagcaggagctgatccagtcttaggtgttgaaatggcctctactggtgaagtcgctacttttggccactccaagtatgaagcatacttaaagtctttgttggcaaccggcttcaaacttccaaagaagaatattttattgtctattggttcttacaaggaaaaacaagaattgctttcttccgtacaaaaactttacaacatgggatataaattatttgcaacatctggtactgctgactttttatctgaacatggtattgccgtccaatatttggaggttttaaacaaggatgatgatgatcaaaaaagtgaatactctcttactcaacatttggctaataatgaaattgacctttacatcaacttgccttctgccaacaggttccgtcgtcctgcatcctatgtttccaaggggtataaaacacgtcgtttggctgtcgattattctgttccgttggttactaacgttaaatgtgcaaaattgttgattgaagccatttctagaaatatcactttagatgtttctgaacgtgatgcacaaacttcccacagaactattaccttacctggtttaatcaatatcgcaacttatgttccgaatgcatcccatgttatcaaaggcccagctgaattgaaggagaccacacgtttgtttttggaatccggttttacatactgtcaattgatgcccagatccatcagcggacctgttattactgacgttgcatccttgaaggccgcaaactctgtttcccaagattcttcttacactgacttttctttcactattgctggtacagcacacaatgctcatagtgttacgcaatctgctagcaaagtgacagcattgtttttgcccttacgtgaattaaagaacaagatcacagcagtagctgaacttttgaatcagtggccaactgaaaagcaagtgattgcagaagctaaaactgcagatttggcatctgttttattgttaacctcccttcaaaacagatctattcacattactggtgtttctaataaggaagatttagctttgatcatgacggtcaaggcaaaagaccctagagtgacttgtgatgtcaatatttattctttgtttattgcccaagatgactatccggaggcagttttcttgcctactaaggaagatcaagagtttttctggaacaaccttgatagtatcgatgctttctctgtcggtgctcttcctgtcgccttggcaaatgtcacaggtaacaaggttgatgttggtatgggtatcaaagattctttaccattgttgttggctgctgttgaagaaggtaaattaaccattgatgatatcgtccttcgtttgcatgacaatcccgctaaaattttcaacatccctactcaggactctgttgtcgaaattgatttggattattctttcagacgtaataagagatggtctccattcaacaaagatatgaacggtggtattgagcgtgttgtctataatggcgaaacattagttttgagcggtgaattagtttctccaggcgccaaaggaaaatgcattgttaatccaagtccagcttccataactgcttccgcagagctccaatctactagtgctaaaagaaggttctccatcacggaagaagcaatcgctgataatttagatgccgcggaggatgcaattccagaacagcctttggaacaaaaattgatgtcttccaggccaccaagagaacttgttgctccaggcgccatccagaatttgatccgtagtaacaatccattccgcggaagacatatattgtctatcaaacaattcaaacgttctgatttccatgtgttgtttgctgttgcacaagaattgagggcagctgtcgcaagagaaggtgtcttagatttaatgaaaggccacgttattactacaattttctttgaaccatctactcgtacttgttcttctttcattgctgctatggaacgtttgggtggtagaattgtaaatgttaatccattggtgtcttctgtcaagaaaggtgaaacccttcaagatactatcagaactttggcttgttacagtgatgccattgtcatgcgtcattctgaagaaatgtctgttcatatcgccgctaaatattctcctgttccaattattaatggtggtaatggttctcgcgagcatcctacgcaggccttcttggatttgtttacgattcgtgaagaaatcggtactgttaatggtattactgttactttcatgggtgatctcaaacatggtagaaccgtacattctttgtgtcgtttgttaatgcactatcaagtcagaattaatcttgtttctcctccggaattgaggttaccagaaggattaagagaagagttaagaaaagctggcttacttggtgttgagagcattgaattaacccctcatatcatctccaagaccgatgttttatattgtacaagggtccaagaagaaagattcaatagccctgaagaatatgcacgtttgaaggatacttatatcgtggacaacaagatcttggcacacgccaaagaaaatatggctatcatgcatccattgcctcgtgtaaatgaaatcaaagaggaagtggactacgatcatcgtgctgcttacttcagacaaatgaagtatggtttgttcgtcagaatggctttgttggccatggtcatgggtgttgatatgtga

SEQ ID NO: 5885 - DNA, 3708 bp, Saccharomyces cerevisiae
atgcattttagaagaacgatgagtagagtgcccacattggcatctcttgaaatacgatataaaaaatctttcggccataaatttcgtgattttattgctctatgtggtcactattttgctccagttaaaaaatatatcttccccagttttatcgcggttcactacttctacacgatatccctgacattaataacttcaatcctgctatatcccattaagaataccagatacattgatacattgtttttagcagcgggcgcagttacacaaggtggcttaaatactgtggatatcaacaatctaagcttataccaacaaattgttctgtatatcgtatgctgcatatcaacaccaattgcagttcatagttgcttggcatttgtacggctttactggtttgagcgctacttcgatggtattagagactcttctagacgaaattttaagatgagaagaacgaaaacaatcttagaaagggaactaacagcaagaaccatgaccaagaatagaacaggtacccaaagaacgtcttatcctaggaaacaagctaaaacagatgatttccaagaaaaattgttcagcggagaaatggttaatagagatgagcaggactcagttcacagcgaccagaattctcatgacattagtagggacagcagcaataataatacgaatcacaatggtagcagtggcagtttagatgatttcgttaaggaagacgaaacggatgacaatggagaatatcaggagaacaactcctactcgacggtaggtagttcgtctaacacagttgcagacgaaagtttaaatcagaagcccaagccaagcagtcttcggtttgatgagccacacagcaaacaaagacccgcaagagttccctcagagaaatttgcaaaaagaaggggttcaagagatattagcccagccgatatgtatcgatccattatgatgctacaaggtaagcatgaagcaactgctgaagatgaaggtccccctttagtcatcgggtcccctgcggatggcacaagatataaaagtaatgtcaataagctaaagaaggccaccggcataaatggtaacaaaatcaagattcgagataagggaaatgaaagtaacactgatcaaaattccgtgtcaagtgaagcaaacagtacggcgagcgtttcggacgaaagctcgttacacacaaattttggtaacaaagtaccttcattaagaacaaatactcatagatcaaattcgggcccgatagccattactgataacgcagaaacagacaaaaagcatgggccatcaattcaattcgatataactaaacctcctagaaaaatttcaaaaagagtttcaaccttcgatgatttgaacccaaaatcttccgttctttatcgaaaaaaagcatcgaagaagtacctcatgaaacattttcctaaagcgcggcgaatacggcaacaaattaagagaaggctttctactggttcaattgagaaaaacagcagtaacaatgtttcagatagaaaacctattactgatatggatgatgatgatgatgacgatgacaacgacggcgataacaacgaagaatactttgctgacaacgaaagcggcgatgaagatgaacgagtacagcagtctgaaccacattctgattcagaactcaaatcgcaccaacaacagcaagaaaaacaccaactgcagcagaacctgcaccgcatgtataaaaccaaatcatttgatgataatcgttcaagagcagttcctatggaacgttccaggaccatcgatatggcagaggctaaggatctaaatgagctcgcaaggacgcctgattttcaaaaaatggtctatcaaaattggaaagcccatcatagaaaaaaaccgaactttaggaagaggggatggaataacaagatatttgaacatggtccctatgcatctgacagcgatcgcaattatcctgataatagtaatactggaaacagtattcttcattacgcagagtctattttacatcatgatggctctcataaaaatggaagcgaagaagcctcttccgactctaatgagaatatctattccacgaatggaggaagcgaccacaatggtcttaacaactatcctacttacaacgacgatgaagaaggctattatggtttacatttcgataccgattatgacctagatcctcgtcatgatttatctaaaggcagtggtaaaacgtatctatcatggcaaccaactattggacgtaactcaaacttccttggattaacaagagcccagaaagatgaattaggtggtgtcgagtacagagcaatcaaacttttatgcaccatattggttgtctactacgttggatggcatattgttgcttttgttatgttagtaccttggattattttgaaaaagcattatagtgaagttgttagagatgatggtgtttcacctacatggtggggattttggacagcaatgagtgcatttaatgatttaggtttgacattaactccaaattcaatgatgtcgtttaacaaagctgtatacccattgatcgttatgatttggtttatcattatcggaaatacagggtttcccatccttcttagatgcatcatttggataatgtttaaaatttctcctgatttatcacagatgagagaaagtttaggttttctcttagaccatccacgtcgttgtttcaccttgctatttcctaaggcagctacatggtggctacttttaacgcttgcaggattgaatataactgattggattttatttattattctagattttggctcaacagttgtgaaatcattatcgaaaggctatagagtccttgtcggcctgtttcaatctgttagcacaagaactgctggattcagcgttgtcgatttaagtcaactgcatccttctatccaagtctcctatatgctaatgatgtatgtctccgtattaccattggccatctctattcgacggacaaatgtttacgaggagcaatctttaggactatatggagatatggggggagaaccagaagatacggatactgaagacgatggtaacgatgaagatgacgacgaggaaaacgagagtcacgaaggtcaaagtagtcaaagaagtagttcgaacaacaacaacaataacaacaggaaaaagaaaaagaaaaagaaaactgaaaatccaaatgaaatatctacaaaatcctttatcggtgcccatttaaggaaacagctttcatttgacttgtggtttctatttttagggttatttatcatttgcatttgtgaaggggacaagataaaggacgtacaagaaccaaactttaatatatttgcaattctttttgaaattgttagcgcttacggtacagttgggctatcgctaggttatccggacaccaaccaatcgttttcaagacagtttactacattatctaagttggtgatcatagctatgctgatcagaggcaagaatagaggtctaccatactcactggatcgtgcaattatcttgcctagtgatagacttgaacatattgaccaccttgagggcatgaaattgaagagacaggctagaaccaatacagaagacccaatgacggaacatttcaagagaagtttcactgatgtgaaacatcgttggggagctcttaagcgtaagaccacacattcccgaaatcctaaaaggagcagcacaacgctctaa

SEQ ID NO: 5886 - DNA, 3708 bp, Artificial Sequence
  Description of Artificial Sequence: Synthetic polynucleotide
atgcattttagaagaacgatgagtagagtgcccacattggcatctcttgaaataagatataaaaaatctttcggccataaatttcgtgattttattgctctttgtggtcactattttgctccagttaaaaaatatatcttccccagttttatcgcggttcactacttctacacgatatccttaacattaataacttctatcttattatatcccattaagaataccagatacattgatacattgtttttagcagcgggcgcagttacacaaggtggcttaaatactgtggatatcaacaatttgagcttataccaacaaattgttttatatatcgtatgctgcatatctacaccaattgcagttcatagttgcttggcatttgtacgtctttactggtttgagcgctacttcgatggtattagagactcttctagaagaaattttaagatgagaagaacgaaaacaatcttagaaagggaattaacagcaagaaccatgaccaagaatagaacaggtacccaaagaacgtcttatcctaggaaacaagctaaaacagatgatttccaagaaaaattgttcagcggagaaatggttaatagagatgagcaggactctgttcacagcgaccagaattctcatgacattagtagggacagcagcaataataatacgaatcacaatggtagcagtggcagtttagatgatttcgttaaggaagacgaaacggatgacaatggagaatatcaggagaacaactcctactctacggtaggtagttcttctaacacagttgcagacgaaagtttaaatcagaagcccaagccaagcagtcttagatttgatgagccacacagcaaacaaagacccgcaagagttccctctgagaaatttgcaaaaagaaggggttccagagatattagcccagccgatatgtatagatccattatgatgttacaaggtaagcatgaagcaactgctgaagatgaaggtccccctttagtcatcgggtcccctgcggatggcacaagatataaaagtaatgtcaataagttgaagaaggccaccggcataaatggtaacaaaatcaagattagagataagggaaatgaaagtaacactgatcaaaattccgtgtccagtgaagcaaacagtacggcgagcgtttctgacgaaagctctttacacacaaattttggtaacaaagtaccttctttaagaacaaatactcatagatctaatagtggcccgatagccattactgataacgcagaaacagacaaaaagcatgggccatctattcaattcgatataactaaacctcctagaaaaatttccaaaagagtttctaccttcgatgatttgaacccaaaatcttccgttctttatagaaaaaaagcatccaagaagtacctcatgaaacattttcctaaagcgagaagaataagacaacaaattaagagaaggctttctactggttccattgagaaaaacagcagtaacaatgtttctgatagaaaacctattactgatatggatgatgatgatgatgacgatgacaacgacggcgataacaacgaagaatactttgctgacaacgaaagcggcgatgaagatgaaagagtacagcagtctgaaccacattctgattctgaactcaaatctcaccaacaacagcaagaaaaacaccaattgcagcagaacttgcaccgcatgtataaaaccaaaagttttgatgataatcgttccagagcagttcctatggaacgttccaggaccatcgatatggcagaggctaaggatttgaatgagctcgcaaggacgcctgattttcaaaaaatggtctatcaaaattggaaagcccatcatagaaaaaaaccgaactttaggaagaggggatggaataacaagatatttgaacatggtccctatgcatctgacagcgatcgcaattatcctgataatagtaatactggaaacagtattcttcattacgcagagtctattttacatcatgatggctctcataaaaatggaagcgaagaagcctcttccgactctaatgagaatatctattccacgaatggaggaagcgaccacaatggtcttaacaactatcctacttacaacgacgatgaagaaggctattatggtttacatttcgataccgattatgacttggatcctcgtcatgatttatctaaaggcagtggtaaaacgtatttatcttggcaaccaactattggacgtaactccaacttccttggattaacaagagcccagaaagatgaattaggtggtgtcgagtacagagcaatcaaacttttatgcaccatattggttgtctactacgttggatggcatattgttgcttttgttatgttagtaccttggattattttgaaaaagcattatagtgaagttgttagagatgatggtgtttctcctacatggtggggattttggacagcaatgagtgcatttaatgatttaggtttgacattaactccaaattctatgatgagttttaacaaagctgtatacccattgatcgttatgatttggtttatcattatcggaaatacagggtttcccatccttcttagatgcatcatttggataatgtttaaaatttctcctgatttatctcagatgagagaaagtttaggttttctcttagaccatccacgtcgttgtttcaccttgttatttcctaaggcagctacatggtggttacttttaacgcttgcaggattgaatataactgattggattttatttattattttagattttggctctacagttgtgaaatctttatccaaaggctatagagtccttgtcggcttatttcaatctgttagcacaagaactgctggattcagcgttgtcgatttaagtcaattgcatccttctatccaagtctcctatatgttaatgatgtatgtctccgtattaccattggccatctctattagaagaacaaatgtttacgaggagcaatctttaggattgtatggagatatggggggagaaccagaagatacggatactgaagacgatggtaacgatgaagatgacgacgaggaaaacgagagtcacgaaggtcaaagtagtcaaagaagtagtagtaacaacaacaacaataacaacaggaaaaagaaaaagaaaaagaaaactgaaaatccaaatgaaatatctacaaaatcctttatcggtgcccatttaaggaaacagctttcttttgacttgtggtttttgtttttagggttatttatcatttgcatttgtgaaggggacaagataaaggacgtacaagaaccaaactttaatatatttgcaattctttttgaaattgttagcgcttacggtacagttgggctttctttgggttatccggacaccaaccaaagtttttccagacagtttactacattatctaagttggtgatcatagctatgttgatcagaggcaagaatagaggtttgccatactctttagatcgtgcaattatcttgcctagtgatagacttgaacatattgaccaccttgagggcatgaaattgaagagacaggctagaaccaatacagaagacccaatgacggaacatttcaagagaagtttcactgatgtgaaacatcgttggggagctcttaagcgtaagaccacacattccagaaatcctaaaaggagcagcacaacgctctga

SEQ ID NO: 5887 - DNA, 2007 bp, Saccharomyces cerevisiae
atggaagacaagtttgctaacctcagtctccatgagaaaactggtaagtcatctatccaattaaacgagcaaacaggctcagataatggctctgctgtcaagagaacatcttcgacgtcctcgcactacaataacatcaacgctgaccttcatgctcgtgtaaaagcttttcaagaacaacgtgcattgaaaaggtctgccagcgtgggcagtaatcaaagcgagcaagacaaaggcagttcacaatcacctaaacatattcagcagattgttaataagccattgccgcctcttcccgtagcaggaagttctaaggtttcacaaagaatgagtagccaagtcgtgcaagcgtcctccaagagcactcttaagaacgttctggacaatcaagaaacacaaaacattaccgacgtaaatattaacatcgatacaaccaaaattaccgccacaacaattggtgtaaatactggcctacctgctactgacattacgccgtcagtttctaatactgcatcagcaacacataaggcgcaattgctgaatcctaacagaagggcaccaagaaggccgctttctacccagcaccctacaagaccaaatgttgccccgcataaggcccctgctataatcaacacaccaaaacaaagtttaagtgcccgtcgagggctcaaattaccaccaggaggaatgtcattaaaaatgcccactaaaacagctcaacagccgcagcagtttgccccaagcccttcaaacaaaaaacatatagaaaccttatcaaacagcaaagttgttgaagggaaaagatcgaatccgggttctttgataaatggtgtgcaaagcacatccacctcatcaagtaccgaaggcccacatgacactgtaggcactacacccagaactggaaacagcaacaactcttcaaattctggtagtagtggtggtggtggtcttttcgcaaatttctcgaaatacgtggatatcaaatccggctctttgaattttgcaggcaaactatcgctatcctctaaaggaatagatttcagcaatggttctagttcgagaattacattggacgaactagaatttttggatgaactgggtcatggtaactatggtaacgtctcaaaggtactgcataagcccacaaatgttattatggcgacgaaggaagtccgtttggagctagatgaggctaaatttagacaaattttaatggaactagaagttttgcataaatgcaattctccctatattgtggatttttatggtgcattctttattgagggcgccgtctacatgtgtatggaatacatggatggtggttccttggataaaatatacgacgaatcatctgaaatcggcggcattgatgaacctcagctagcgtttattgccaatgctgtcattcatggactaaaagaactcaaagagcagcataatatcatacacagagatgtcaaaccaacaaatattttatgttcagccaaccaaggcaccgtaaagctgtgcgatttcggtgtttctggtaatttggtggcatctttagcgaagactaatattggttgtcagtcatacatggcacctgaacgaatcaaatcgttgaatccagatagagccacctataccgtacagtcagacatctggtctttaggtttaagcattctggaaatggcactaggtagatatccgtatccaccagaaacatacgacaacattttctctcaattgagcgctattgttgatgggccgccaccgagattaccttcagataaattcagttctgacgcacaagattttgtttctttatgtctacaaaagattccggaaagaagacctacatacgcagctttaacagagcatccttggttagtaaaatacagaaaccaggatgtccacatgagtgagtatatcactgaacgattagaaaggcgcaacaaaatcttacgggaacgtggtgagaatggtttatctaaaaatgtaccggcattacatatgggtggtttatag

SEQ ID NO: 5888 - DNA, 2007 bp, Artificial Sequence
  Description of Artificial Sequence: Synthetic polynucleotide
atggaagacaagtttgctaacctcagtctccatgagaaaactggtaagtcttctatccaattaaacgagcaaacaggcagtgataatggctctgctgtcaagagaacatcttctacgtcctcccactacaataacatcaacgctgaccttcatgctcgtgtaaaagcttttcaagaacaacgtgcattgaaaaggtctgccagcgtgggcagtaatcaaagcgagcaagacaaaggcagttctcaaagtcctaaacatattcagcagattgttaataagccattgccgcctcttcccgtagcaggaagttctaaggtttctcaaagaatgagtagccaagtcgtgcaagcgtcctccaagagcactcttaagaacgttttggacaatcaagaaacacaaaacattaccgacgtaaatattaacatcgatacaaccaaaattaccgccacaacaattggtgtaaatactggcttacctgctactgacattacgccgtctgtttctaatactgcatctgcaacacataaggcgcaattgttgaatcctaacagaagggcaccaagaaggccgctttctacccagcaccctacaagaccaaatgttgccccgcataaggcccctgctataatcaacacaccaaaacaaagtttaagtgcccgtcgtgggctcaaattaccaccaggaggaatgtctttaaaaatgcccactaaaacagctcaacagccgcagcagtttgccccaagcccttccaacaaaaaacatatagaaaccttatctaacagcaaagttgttgaagggaaaagatctaatccgggttctttgataaatggtgtgcaaagcacatccacctcttccagtaccgaaggcccacatgacactgtaggcactacacccagaactggaaacagcaacaactcttccaattctggtagtagtggtggtggtggtcttttcgcaaatttctccaaatacgtggatatcaaatccggctctttgaattttgcaggcaaattaagtttatcctctaaaggaatagatttcagcaatggttctagtagtagaattacattggacgaattggaatttttggatgaattgggtcatggtaactatggtaacgtctccaaggtattacataagcccacaaatgttattatggcgacgaaggaagtccgtttggagttagatgaggctaaatttagacaaattttaatggaattggaagttttgcataaatgcaattctccctatattgtggatttttatggtgcattctttattgagggcgccgtctacatgtgtatggaatacatggatggtggttccttggataaaatatacgacgaaagctctgaaatcggcggcattgatgaacctcagcttgcgtttattgccaatgctgtcattcatggattgaaagaactcaaagagcagcataatatcatacacagagatgtcaaaccaacaaatattttatgttctgccaaccaaggcaccgtaaagttgtgcgatttcggtgtttctggtaatttggtggcatctttagcgaagactaatattggttgtcagtcttacatggcacctgaaagaatcaaatctttgaatccagatagagccacctataccgtacagagtgacatctggtctttaggtttaagcattttggaaatggcattgggtagatatccgtatccaccagaaacatacgacaacattttctctcaattgagcgctattgttgatgggccgccaccgagattaccttctgataaattcagttctgacgcacaagattttgtttctttatgtttgcaaaagattccggaaagaagacctacatacgcagctttaacagagcatccttggttagtaaaatacagaaaccaggatgtccacatgagtgagtatatcactgaaagattagaaaggcgcaacaaaatcttaagagaacgtggtgagaatggtttatctaaaaatgtaccggcattacatatgggtggtttatga

SEQ ID NO: 5889 - DNA, 159 bp, Saccharomyces cerevisiae
atgattttctttttcaaccagatccgttcaatatttacagctttgcatacgccaactcaacagatccaattatcaagaagggcctttttccaattcttaggctatttgggtagttgtgttgtgatttcattagcagctcaatcgaaatacgtgcagtaa

SEQ ID NO: 5890 - DNA, 159 bp, Artificial Sequence
  Description of Artificial Sequence: Synthetic polynucleotide
atgattttctttttcaaccagatccgttctatatttacagctttgcatacgccaactcaacagatccaattatctagaagggcctttttccaattcttaggctatttgggtagttgtgttgtgatttctttagcagctcaaagtaaatacgtgcagtga

SEQ ID NO: 5891 - DNA, 1923 bp, Saccharomyces cerevisiae
atgctaaatcagcacacaagttcagtaccggatgacgaacatctgcagatggcacaccaaaatagcagttcagaagtgagaaatgaggcagcggtcccagatcaacttttgactcctttacaaccgtataccattttattgaaagatggagaaacaatagctacgatgtatcctatacctgcgtatcctgatttattgccgctagggctcttaaatttccttctagatgaatttaacatggaagtggaaaagggagatagttttccttattacgagactttatcactagaagaattcaaaaatgtctggtttcataatgatggtcacgtttgtattatggtgttaggcgaaataccagaactggattatagtatggatactgaagcggacacaaatgataattttggaacagaaatagaaaccacgaagcacaccacccaatataagaaacgaaaagaacgtcgcaatttaaatctaagtatgcagtgggagaagcaatgtctaggcatatttgacctcaaaccagcataccctggacggtcagcgcatgtggtcacaggaacatttctggtcaatgctggtattcgtggaaaaggtattgggaaaacactaatggaaacattcatagaatggtcaaagaaattaggatttacgtcctcctttttcccgttaatttacggaacgaacgtaggaatcagaagaattttggaaggattgaactttaggcggattggaaagctgcctgaagccgggattctcaagggctttgatgtcccagtagattctttcatgtatggtaaagagttcacacatattacgaaaagtatagatttgttacgagatcctcaaaagagtatcgaaattgggaaatatgaacgattaaagcattttctggaaacaggcaagtatcctttacattgtgatagaaacgaaaaggctagattaagagtactttccaaaactcattcggtattgaatggcaagttgatgacaaaaggaaaagaaatcatttatgacacggatcaacaaatccagattgcattagagatacatttaatggaacatttaggcatcaacaaggtgacctccaaaattggtgaaaaataccattggagaggaatcaagagtactgtttcggaggtaatctctcggtgccaaaaatgcaagatgaggtacaaagacgggacaggggtaataattgaacaaaagagagcagttaagcaggcgcatatgctaccgacgcagcatatagaaactatcaacaatccaagaaaaagcaagaagcatgataatgcgttattgggacaggcaataaatttccctcaaaatattatttccagtacgctgaatgatgtggagggtgaacccactccgccagacactaatatcgtacaacccacattccagaacgccacgaatagtcccgcaacaacagctgaagccaacgaagcgaataaaagatccgagtttctttcctcaatacagagcacgccactattggacgacgaacagtcaatgaattccttcaatagattcgtggaggaagaaaactcaagaaaaagacgaaaatacttggatgttgcctccaacggaattgtaccccatttaacgaataacgaatcgcaggatcacgcgaaccccgtcaaccgtgatgaacgagatatgaaccattcagttcccgatttagatagaaatgaccatactataatgaacgatgctatgttgagcctcgaagataacgtcatggccgctctagaaatggtccaaaaggaacaacaacagaagataaatcatcgaggtgaagatgtgactggccaacaaatcgatttgaacaacagtgaaggtaatgagaattcagtcactaagattgttaacaacgaatctaatacatttacagagcacaattctaatatttattattaa

SEQ ID NO: 5892 - DNA, 1923 bp, Artificial Sequence
  Description of Artificial Sequence: Synthetic polynucleotide
atgttgaatcagcacacaagttctgtaccggatgacgaacatttacagatggcacaccaaaatagcagttctgaagtgagaaatgaggcagcggtcccagatcaacttttgactcctttacaaccgtataccattttattgaaagatggagaaacaatagctacgatgtatcctatacctgcgtatcctgatttattgccgttagggctcttaaatttccttttagatgaatttaacatggaagtggaaaagggagatagttttccttattacgagactttaagtttagaagaattcaaaaatgtctggtttcataatgatggtcacgtttgtattatggtgttaggcgaaataccagaattagattatagtatggatactgaagcggacacaaatgataattttggaacagaaatagaaaccacgaagcacaccacccaatataagaaaagaaaagaacgtcgcaatttaaatttgagtatgcagtgggagaagcaatgtttgggcatatttgacctcaaaccagcataccctggaagatctgcgcatgtggtcacaggaacatttttagtcaatgctggtattcgtggaaaaggtattgggaaaacattgatggaaacattcatagaatggtccaagaaattaggatttacgtcctcctttttcccgttaatttacggaacgaacgtaggaatcagaagaattttggaaggattgaactttaggagaattggaaagttacctgaagccgggattctcaagggctttgatgtcccagtagattctttcatgtatggtaaagagttcacacatattacgaaaagtatagatttgttaagagatcctcaaaagagtatcgaaattgggaaatatgaaagattaaagcattttttggaaacaggcaagtatcctttacattgtgatagaaacgaaaaggctagattaagagtactttccaaaactcattctgtattgaatggcaagttgatgacaaaaggaaaagaaatcatttatgacacggatcaacaaatccagattgcattagagatacatttaatggaacatttaggcatcaacaaggtgacctccaaaattggtgaaaaataccattggagaggaatcaagagtactgtttctgaggtaatctctaggtgccaaaaatgcaagatgaggtacaaagacgggacaggggtaataattgaacaaaagagagcagttaagcaggcgcatatgttaccgacgcagcatatagaaactatcaacaatccaagaaaaagcaagaagcatgataatgcgttattgggacaggcaataaatttccctcaaaatattatttccagtacgttgaatgatgtggagggtgaacccactccgccagacactaatatcgtacaacccacattccagaacgccacgaatagtcccgcaacaacagctgaagccaacgaagcgaataaaagatccgagtttctttcctccatacagagcacgccattgttggacgacgaacagtccatgaattccttcaatagattcgtggaggaagaaaactctagaaaaagaagaaaatacttggatgttgcctccaacggaattgtaccccatttaacgaataacgaatctcaggatcacgcgaaccccgtcaaccgtgatgaaagagatatgaaccattctgttcccgatttagatagaaatgaccatactataatgaacgatgctatgttgagcctcgaagataacgtcatggccgctttggaaatggtccaaaaggaacaacaacagaagataaatcatagaggtgaagatgtgactggccaacaaatcgatttgaacaacagtgaaggtaatgagaattctgtcactaagattgttaacaacgaatctaatacatttacagagcacaattctaatatttattattga

SEQ ID NO: 5893 - DNA, 924 bp, Saccharomyces cerevisiae
atgactagtaaattaaaacgggttgctgtcgcacaattatgttcatccgctgacctgaccaaaaacttaaaagtggtaaaagaattgatatctgaagccattcaaaaaaaggcggatgtcgtttttctccctgaggcaagtgactatctttctcaaaaccctcttcattccaggtatttggcacagaaaagccccaaatttattcggcaattacagtcaagcattaccgaccttgtcagagataattcacggaatatagatgtttccattggggtacacttgccgccctcagaacaagatttacttgaaggcaatgatcgagtcagaaacgttctattatatatcgatcatgaagggaaaatattgcaagaataccaaaaactgcatttgtttgacgtagacgtgccaaatggaccgatattgaaagaatcaaaatctgtccagcctggcaaagccattcctgacattatagagtctccattgggaaaattgggcagtgccatttgttatgatattcgctttcccgaattttctttgaaattacgatcaatgggggctgaaatcttatgttttcccagtgcgttcactattaaaacaggggaagcacattgggagttactaggcagagcaagagcggttgacactcaatgctatgtgctcatgccagggcaggttggaatgcacgatctcagtgatccagagtgggagaaacaatcacatatgagcgctctcgaaaaaagctccaggagagaatcttggggacactcaatggtcattgatccttggggtaaaataatagcgcatgccgatccctctactgttggaccacaactaattctcgctgatttggatcgtgagcttttgcaagaaataaggaacaaaatgcccttatggaaccagagaagagacgatttatttcattga

SEQ ID NO: 5894 - DNA, 924 bp, Artificial Sequence
  Description of Artificial Sequence: Synthetic polynucleotide
atgactagtaaattaaaaagagttgctgtcgcacaattatgttcttccgctgacttgaccaaaaacttaaaagtggtaaaagaattgatatctgaagccattcaaaaaaaggcggatgtcgtttttctccctgaggcaagtgactatctttctcaaaaccctcttcattccaggtatttggcacagaaaagccccaaatttattagacaattacagagtagcattaccgaccttgtcagagataattccagaaatatagatgtttccattggggtacacttgccgcccagtgaacaagatttacttgaaggcaatgatagggtcagaaacgttttattatatatcgatcatgaagggaaaatattgcaagaataccaaaaattgcatttgtttgacgtagacgtgccaaatggaccgatattgaaagaaagtaaatctgtccagcctggcaaagccattcctgacattatagagtctccattgggaaaattgggcagtgccatttgttatgatattcgctttcccgaattttctttgaaattaagaagtatgggggctgaaatcttatgttttcccagtgcgttcactattaaaacaggggaagcacattgggagttattaggcagagcaagagcggttgacactcaatgctatgtgctcatgccagggcaggttggaatgcacgatctcagtgatccagagtgggagaaacaatctcatatgagcgctctcgaaaaaagctccaggagagaatcttggggacactccatggtcattgatccttggggtaaaataatagcgcatgccgatccctctactgttggaccacaattgattctcgctgatttggatcgtgagcttttgcaagaaataaggaacaaaatgcccttatggaaccagagaagagacgatttatttcattga

SEQ ID NO: 5895 - DNA, 1152 bp, Saccharomyces cerevisiae
atgtcaacaaattgtttttccggttacaaagacctcatcaaggaaggcgatttaactctaatatgggtttctagagataacatcaaaccggtaaggatgcattccgaagaggtattcaatactcgttatggttcatttcctcataaggatatcataggtaaaccttatggttctcaaattgctataagaacaaagggctcaaataagtttgcattcgtccatgttctgcaaccaactcctgaattgtggactttgtcgttaccacacagaactcaaattgtatatacgcccgactcttcctacatcatgcaaaggttgaattgtagccctcacagcagagtgatcgaggcaggtacaggctcaggatcattttcgcacgcttttgcaagatctgtaggtcatctttttagttttgaatttcatcacataagatacgaacaagcattagaggaattcaaagagcatggacttattgatgataacgttacgattacacatcgggatgtttgccaaggtggatttcttataaagaagggagacactacatcttacgaatttggcaataatgaaaccgccgcttcattgaatgcaaatgtagtgtttttagatctgccggctccctgggatgctatacctcatctggattctgttatttccgtagacgaaaaggtcggattgtgttgcttctccccatgcattgagcaagtagacaaaacattggatgtattagagaaatatggctggacggatgttgaaatggtggaaattcaaggtagacagtacgaaagtcgaagacaaatggtcagatcactcaatgatgccctggaaaggttgagagatattaagaggcacaaactccagggtgtagaaagacgcaagcggatgtttaacaatacaatagattctaacgatgaaaaagttggaaaaagaaacgaggatggcgtaccattaacagaaaaggccaaatttaatccttttggcaaaggttctcgaatcaaggaaggtgatagtaattataaatggaaggaggtcacaaagatggaagctgagatcaaatcccatacctcatatttgacttttgcatttaaagttgtgaatagatcaagagatgatgaaaaagttaacgaaattcttcgatccacggaaaaataa

SEQ ID NO: 5896 - DNA, 1152 bp, Artificial Sequence
  Description of Artificial Sequence: Synthetic polynucleotide
atgtctacaaattgtttttccggttacaaagacctcatcaaggaaggcgatttaactttgatatgggtttctagagataacatcaaaccggtaaggatgcattccgaagaggtattcaatactcgttatggttcttttcctcataaggatatcataggtaaaccttatggttctcaaattgctataagaacaaagggcagtaataagtttgcattcgtccatgttttgcaaccaactcctgaattgtggactttgtctttaccacacagaactcaaattgtatatacgcccgactcttcctacatcatgcaaaggttgaattgtagccctcacagcagagtgatcgaggcaggtacaggcagtggaagtttttctcacgcttttgcaagatctgtaggtcatctttttagttttgaatttcatcacataagatacgaacaagcattagaggaattcaaagagcatggacttattgatgataacgttacgattacacatagagatgtttgccaaggtggatttcttataaagaagggagacactacatcttacgaatttggcaataatgaaaccgccgcttctttgaatgcaaatgtagtgtttttagatttaccggctccctgggatgctatacctcatttggattctgttatttccgtagacgaaaaggtcggattgtgttgcttctccccatgcattgagcaagtagacaaaacattggatgtattagagaaatatggctggacggatgttgaaatggtggaaattcaaggtagacagtacgaaagtagaagacaaatggtcagaagtctcaatgatgccttggaaaggttgagagatattaagaggcacaaactccagggtgtagaaagacgcaagagaatgtttaacaatacaatagattctaacgatgaaaaagttggaaaaagaaacgaggatggcgtaccattaacagaaaaggccaaatttaatccttttggcaaaggttctagaatcaaggaaggtgatagtaattataaatggaaggaggtcacaaagatggaagctgagatcaaatcccatacctcttatttgacttttgcatttaaagttgtgaatagatctagagatgatgaaaaagttaacgaaattcttcgttccacggaaaaatga

SEQ ID NO: 5897 - DNA, 519 bp, Saccharomyces cerevisiae
atgtctgcaaatagcaaggacagaaatcagtccaatcaggatgcgaagcgacaacagcagaatttcccaaagaagatttcagaaggtgaggccgatttatatctcgaccagtataacttcactaccaccgctgctattgtaagctcagtagaccgtaaaatcttcgttcttttgcgtgatggaagaatgctattcggtgtactaagaacctttgaccaatatgcaaatttgatacttcaagattgcgtggagagaatatattttagcgaagaaaacaaatacgctgaagaagaccgcggcatattcatgattcgtggtgaaaatgttgtcatgttaggcgaagtagacatcgataaagaagatcaaccccttgaggccatggaacgcataccatttaaggaggcttggctgaccaagcaaaaaaatgatgagaaaaggtttaaagaggaaacccacaaaggtaaaaaaatggcccgccatggtatcgtttacgatttccataaatctgacatgtactaa

SEQ ID NO: 5898 - DNA, 519 bp, Artificial Sequence
  Description of Artificial Sequence: Synthetic polynucleotide
atgtctgcaaatagcaaggacagaaatcagtccaatcaggatgcgaagagacaacagcagaatttcccaaagaagatttctgaaggtgaggccgatttatatctcgaccagtataacttcactaccaccgctgctattgtaagctctgtagaccgtaaaatcttcgttcttttgcgtgatggaagaatgcttttcggtgtattaagaacctttgaccaatatgcaaatttgatacttcaagattgcgtggagagaatatattttagcgaagaaaacaaatacgctgaagaagaccgcggcatattcatgattcgtggtgaaaatgttgtcatgttaggcgaagtagacatcgataaagaagatcaaccccttgaggccatggaacgcataccatttaaggaggcttggttgaccaagcaaaaaaatgatgagaaaaggtttaaagaggaaacccacaaaggtaaaaaaatggcccgccatggtatcgtttacgatttccataaatctgacatgtactga

SEQ ID NO: 5899 - DNA, 1437 bp, Saccharomyces cerevisiae
atgtctgaaaataagaactctgaggctgaagacgtatttgaatttttagattctttgccagaagcaaagaatggcgggaaaatggttaatactgacgtaaagggtagccaagaaggcgttaagggaggttctaattctgtggcgggcaagaccgggaatgatggaaagaaaggtgacgatgatatctttgaattcttagaagagttggagaagagtaacttaagcttaactgacaagaaaggggttgaaaagaaggctcccagtgaatcagttaataataaagcacaagacgaaaaagtagaagaatcaaaagaaaacaaaaattccgagcaggacgctcacggaaaggaaaaggaaccacagcagcaggagaaagaagaagaagaggaggaagaagaagaagaagaagaggaggaggaggagaccccattgcatgacccaattgcttctatttcaaactggtggtcctcctctggatccgcaaaggtatcgagtatttggaataaaactgcagaacaagcatcccagatcaaaaaccgacttgcccaagaacagcttgatttgacttcaaagataaacacgagcacgattactgaaatagccagaaacttacagaaaatcgttgttggtgagactgaagaggtgctgcgaattcatctagtccatgatttggttaactatccctcattacaatacaatattgaaagcaagtttgatcaagttctaagctcacaagttgagggaggaatcagaatatttgtagatgaatggggccatcctaacaataatggaattacacctgtggaaaaaaagccttcagttgcagacggtgagttaggcaactctaaaaaaaaattacagtttaatctattcgacggcaaggtaacagacggtgagaaactggcatttgcaaacctggaaaatgcagtcaaactcttcaatactgcacatgaggaataccagaaacaacagaaagaggctgatgccactccagatgacgataggagttctattagcagtaacagcaataaaatcagtgatttattcatatccatcttaccaattgccattccgcaaaaacaaaaagatgccgacggtgactttcaagtgaccgactccaatacgccaggcaatttcaatttcacccttgtattgaaagacataactaacgatattaccaccataacaagatcacaaggattccctgtcaaatgggtcaattggctagaaggatccgtggagaaaacaggatcaacagcaagtgaggagaggaataagtcatacgatcaaaagaaacaaaaagaaagtgaagacgaagacgaagacgatgagatcattgatcctagtgaatgggtaaaggaatggatcgaagatggattaagcttgtcatttggggtcatggcacagaattatgtcattgaccgtatgggtctttga

SEQ ID NO: 5900 - DNA, 1437 bp, Artificial Sequence
  Description of Artificial Sequence: Synthetic polynucleotide
atgtctgaaaataagaactctgaggctgaagacgtatttgaatttttagattctttgccagaagcaaagaatggcgggaaaatggttaatactgacgtaaagggtagccaagaaggcgttaagggaggttctaattctgtggcgggcaagaccgggaatgatggaaagaaaggtgacgatgatatctttgaattcttagaagagttggagaagagtaacttaagcttaactgacaagaaaggggttgaaaagaaggctcccagtgaatctgttaataataaagcacaagacgaaaaagtagaagaaagtaaagaaaacaaaaattccgagcaggacgctcacggaaaggaaaaggaaccacagcagcaggagaaagaagaagaagaggaggaagaagaagaagaagaagaggaggaggaggagaccccattgcatgacccaattgcttctatttccaactggtggtcctcctctggatccgcaaaggtatctagtatttggaataaaactgcagaacaagcatcccagatcaaaaacaggcttgcccaagaacagcttgatttgacttctaagataaacacgagcacgattactgaaatagccagaaacttacagaaaatcgttgttggtgagactgaagaggtgttgagaattcatttggtccatgatttggttaactatccctctttacaatacaatattgaaagcaagtttgatcaagttttaagctctcaagttgagggaggaatcagaatatttgtagatgaatggggccatcctaacaataatggaattacacctgtggaaaaaaagccttctgttgcagacggtgagttaggcaactctaaaaaaaaattacagtttaatttattcgacggcaaggtaacagacggtgagaaattggcatttgcaaacttggaaaatgcagtcaaactcttcaatactgcacatgaggaataccagaaacaacagaaagaggctgatgccactccagatgacgataggagttctattagcagtaacagcaataaaatcagtgatttattcatatccatcttaccaattgccattccgcaaaaacaaaaagatgccgacggtgactttcaagtgaccgactccaatacgccaggcaatttcaatttcacccttgtattgaaagacataactaacgatattaccaccataacaagatctcaaggattccctgtcaaatgggtcaattggttagaaggatccgtggagaaaacaggaagtacagcaagtgaggagaggaataagtcctacgatcaaaagaaacaaaaagaaagtgaagacgaagacgaagacgatgagatcattgatcctagtgaatgggtaaaggaatggatcgaagatggattaagcttgagttttggggtcatggcacagaattatgtcattgaccgtatgggtctttga

SEQ ID NO: 5901 - DNA, 528 bp, Saccharomyces cerevisiae
atgccttctaaaaactccatcaacagacctaagctgacttcaaatttgcaccacaaggtgcactctttaaataagaaaagagctcaaagagaaagagctggtctcttgaagccagctagatccagcgtaaattcgaaatctggggaaataaaatcagtagcgttggacctatacttccaaaacaagaagaacgaaagtcagaattccactgctgtgacattacaaaatgcttcatcttctccggcctccatcaccacgaggacactttccaaaaagagagctaagaaaatcgagagaaacttaaaatatgctacacagagaaaattattggttgacgcaagcgctaagctagaagacgaaatggatattgatctagatggcggtaagaaagtgaaagagaatgaaaagaagagttctttgactttggttaaggaagccttatggagtgtcattgacgatactgcatcccagggattgatcatcgaaaacggacaaggcaccaccctgggcggcccatttttcccatga

SEQ ID NO: 5902 - DNA, 528 bp, Artificial Sequence
  Description of Artificial Sequence: Synthetic polynucleotide
atgccttctaaaaactccatcaacagacctaagttgacttccaatttgcaccacaaggtgcactctttaaataagaaaagagctcaaagagaaagagctggtctcttgaagccagctagatccagcgtaaattctaaatctggggaaataaaatctgtagcgttggacttgtacttccaaaacaagaagaacgaaagtcagaattccactgctgtgacattacaaaatgcttcttcttctccggcctccatcaccacgaggacactttccaaaaagagagctaagaaaatcgagagaaacttaaaatatgctacacagagaaaattattggttgacgcaagcgctaagttggaagacgaaatggatattgatttggatggcggtaagaaagtgaaagagaatgaaaagaagagttctttgactttggttaaggaagccttatggagtgtcattgacgatactgcatcccagggattgatcatcgaaaacggacaaggcaccaccttaggcggcccatttttcccatga

SEQ ID NO: 5903 - DNA, 717 bp, Saccharomyces cerevisiae
atggtcaaaccaattatagctcccagtatccttgcttctgacttcgccaacttgggttgcgaatgtcataaggtcatcaacgccggcgcagattggttacatatcgatgtcatggacggccattttgttccaaacattactctgggccaaccaattgttacctccctacgtcgttctgtgccacgccctggcgatgctagcaacacagaaaagaagcccactgcgttcttcgattgtcacatgatggttgaaaatcctgaaaaatgggtcgacgattttgctaaatgtggtgctgaccaatttacgttccactacgaggccacacaagaccctttgcatttagttaagttgattaagtctaagggcatcaaagctgcatgcgccatcaaacctggtacttctgttgacgttttatttgaactagctcctcatttggatatggctcttgttatgactgtggaacctgggtttggaggccaaaaattcatggaagacatgatgccaaaagtggaaactttgagagccaagttcccccatttgaatatccaagtcgatggtggtttgggcaaggagaccatcccgaaagccgccaaagccggtgccaacgttattgtcgctggtaccagtgttttcactgcagctgacccgcacgatgttatctccttcatgaaagaagaagtctcgaaggaattgcgttctagagatttgctagattag

SEQ ID NO: 5904 - DNA, 717 bp, Artificial Sequence
  Description of Artificial Sequence: Synthetic polynucleotide
atggtcaaaccaattatagctcccagtatccttgcttctgacttcgccaacttgggttgcgaatgtcataaggtcatcaacgccggcgcagattggttacatatcgatgtcatggacggccattttgttccaaacattactttgggccaaccaattgttacctccttacgtcgttctgtgccacgccctggcgatgctagcaacacagaaaagaagcccactgcgttcttcgattgtcacatgatggttgaaaatcctgaaaaatgggtcgacgattttgctaaatgtggtgctgaccaatttacgttccactacgaggccacacaagaccctttgcatttagttaagttgattaagtctaagggcatcaaagctgcatgcgccatcaaacctggtacttctgttgacgttttatttgaattggctcctcatttggatatggctcttgttatgactgtggaacctgggtttggaggccaaaaattcatggaagacatgatgccaaaagtggaaactttgagagccaagttcccccatttgaatatccaagtcgatggtggtttgggcaaggagaccatcccgaaagccgccaaagccggtgccaacgttattgtcgctggtaccagtgttttcactgcagctgacccgcacgatgttatctccttcatgaaagaagaagtctccaaggaattgcgttctagagatttgttggattga

SEQ ID NO: 5905 - DNA, 660 bp, Saccharomyces cerevisiae
atggcttcatgcttttcagtttcattattggcacgagtagcagtcgttgagcccatcagagtgcaactttggttaaatgtcgtaaattgtatgattgaatcatccatgcaccaatgtcctccacgggatcgccactttttttcttcatcacgccccattttgttgatccgacgttctgtatcaactgtatacagattcgttgcttctcgcaccacacaggttttacgtgcggccaagaccgttgtcaagtggttcattattgtcgacccactgataaattctattctaatcaattatctcattgataggctctgcactcttgggcatgctgtattgcgagtgaaaaagcgcaagaccgaggagagacaaccctgttctcccattatacaacacacacacgttaagagacgcaaacggcctcgtctgaggatcgtagccatcaagaggaagcggaggcgtcgaagaccacatcgcatcgagcgtccactctcaaatatgtacccaataatggaaatccagatggtggctgttccacttgctcttcccagtccaactgcactggtgcattatcagcagcagcaacagcagctcccgcaacatcatccctggtacgacctctcgctttctgaagaagccctctcgacctgctgttgtagttga

SEQ ID NO: 5906 - DNA, 660 bp, Artificial Sequence
  Description of Artificial Sequence: Synthetic polynucleotide
atggcttcttgcttttctgtttctttattggcaagagtagcagtcgttgagcccatcagagtgcaactttggttaaatgtcgtaaattgtatgattgaatcttccatgcaccaatgtcctccaagagatcgccactttttttcttcttctcgccccattttgttgatcagacgttctgtatccactgtatacagattcgttgcttctcgcaccacacaggttttacgtgcggccaagaccgttgtcaagtggttcattattgtcgacccattgataaattctattttgatcaattatctcattgataggctctgcactcttgggcatgctgtattgagagtgaaaaagcgcaagaccgaggagagacaaccctgttctcccattatacaacacacacacgttaagagacgcaaaagacctcgtttaaggatcgtagccatcaagaggaagagaaggcgtagaagaccacatcgcatcgagcgtccactctctaatatgtacccaataatggaaatccagatggtggctgttccacttgctcttcccagtccaactgcattggtgcattatcagcagcagcaacagcagctcccgcaacatcatccctggtacgacctctccctttctgaagaagccctctctacctgctgttgtagttga

SEQ ID NO: 5907 - DNA, 936 bp, Saccharomyces cerevisiae
atggcggttcaacaaagaaagaagaaagagggtagaaagtccgataaaaatgccccatcggtcccacaagtagatgcatcattagacaaaccacttgatattgatgctcctcctactatttacagtgttaatttgaaaccagaatatggtacagctgcattgaatttgtccgcggatttcatcagacaagaacaggcattggctaataagtatttgttcttccatcccgtcatccttgttgttctaaccattgggctgcttatttacttgacgccaagaattgtctttccgataaggaatacaggatccgttgctggatggttctaccagctggctcgtattaataagaaggtcgtcctcagcggtttagtgttcaccgcaattggtgcatctttcttgttcaccctcctctcacgtgtatctgactcgtatttcaagtcgaagatcaaccaacttgttggttctaaaggtgagaaagttttcggcatcaatttgaatgatttggtggcaagacatgaaacaaaggatccagtggtgaacaatacgcatatcatcgtttatagagaaacgcccattgcattgatttcgttagcccctaacatgacattaagtactgatgaaaatttagtcatgagtgttactactgtgggttgtcgtcgtgtatatgtaaaaagtggcattatcgaagatttgattgattgggctatgctacactccaaaaatattagaagcagcggcaaatacggggagaccatgaaactcttgattgatgtctactcattcgatagcacgcttaaggaaattttgaagaaaaaagggttcacttatattcaaagcattagagtctctgaaaatcgactactaggcggtttgttcggtgtgaagaaggaattatggggtttgcaattccattttaaagccgaacacaaggactag

SEQ ID NO: 5908 - DNA, 936 bp, Artificial Sequence
  Description of Artificial Sequence: Synthetic polynucleotide
atggcggttcaacaaagaaagaagaaagagggtagaaagtccgataaaaatgccccaagtgtcccacaagtagatgcatctttagacaaaccacttgatattgatgctcctcctactatttacagtgttaatttgaaaccagaatatggtacagctgcattgaatttgtccgcggatttcatcagacaagaacaggcattggctaataagtatttgttcttccatcccgtcatccttgttgttttaaccattgggttacttatttacttgacgccaagaattgtctttccgataaggaatacaggatccgttgctggatggttctaccagttagctcgtattaataagaaggtcgtcctcagcggtttagtgttcaccgcaattggtgcatctttcttgttcaccctcctcagccgtgtatctgactcttatttcaagtccaagatcaaccaacttgttggttctaaaggtgagaaagttttcggcatcaatttgaatgatttggtggcaagacatgaaacaaaggatccagtggtgaacaatacgcatatcatcgtttatagagaaacgcccattgcattgatttctttagcccctaacatgacattaagtactgatgaaaatttagtcatgagtgttactactgtgggttgtcgtcgtgtatatgtaaaaagtggcattatcgaagatttgattgattgggctatgttgcactccaaaaatattagaagcagcggcaaatacggggagaccatgaaactcttgattgatgtctactctttcgatagcacgcttaaggaaattttgaagaaaaaagggttcacttatattcaaagcattagagtctctgaaaatagattattaggcggtttgttcggtgtgaagaaggaattatggggtttgcaattccattttaaagccgaacacaaggactga

SEQ ID NO: 5909 - DNA, 1014 bp, Saccharomyces cerevisiae
atgaaaatttccgcagctttaatattgtcttccctttcttctgtcgcattttctgcccctgcacctgctccagcggacagtcaccatgaagatcatcacaaagatgaaaaaccagcggttgtcactgtcactcaatacatagattccaatgccgctactagtactgtagaatctgctgctactaccactacattgtcctcatctgagaaggatacctctgaacagaagcgtgatggcggattccaagatggtactgtcaaatgttcggacttcccttctgtaaacggtatagtttccttggactggctaggatttggtggatgggcctctgtcatggacatggatgccaacacttcgtccgaatgtaaggatggctactactgttcttatgcatgtgaacctggaatgtcaaagactcaatggccttctgaccaaccaagcgatggtaaatctgttggtggtctttactgtaaaaatggttacttgtaccgtaccaacactgataccagcgatttatgttctacggatgaaacatctgctaaggccattaacaaaaagtctgactccattgctctatgtaggacggattacccaggatcagaaaacatggtgattcccacagtggttgatggtggagattcacaaccaatttcagtcgttgatgaagacacttattatcaatggcagggtaaaaagacttctgctcagtactatattaacaacgccggtgtatctgcagaagatgggtgcatttggggtacttctggttcggatgtcggcaactgggctccactagtgttaggtgctggttccactaatggagaaacatacttgtcgttgattccaaaccccaacagtaaccaagctgccaactttaacgttaaaatagttgcatccgatggcgctaacgttcagggcagctgtgcgtatgaagatggctctttcaccggagatggttccgatggttgcacagtttctgttttatctggatctgctgaatttgttttctattaa

SEQ ID NO: 5910 - DNA, 1014 bp, Artificial Sequence
  Description of Artificial Sequence: Synthetic polynucleotide
atgaaaatttccgcagctttaatattgtcttccctttcttctgtcgcattttctgcccctgcacctgctccagcggacagtcaccatgaagatcatcacaaagatgaaaaaccagcggttgtcactgtcactcaatacatagattccaatgccgctactagtactgtagaatctgctgctactaccactacattgtcctcttctgagaaggatacctctgaacagaagcgtgatggcggattccaagatggtactgtcaaatgttctgacttcccttctgtaaacggtatagtttccttggactggttaggatttggtggatgggcctctgtcatggacatggatgccaacacttcttccgaatgtaaggatggctactactgttcttatgcatgtgaacctggaatgtccaagactcaatggccttctgaccaaccaagcgatggtaaatctgttggtggtctttactgtaaaaatggttacttgtaccgtaccaacactgataccagcgatttatgttctacggatgaaacatctgctaaggccattaacaaaaagtctgactccattgctctttgtaggacggattacccaggatctgaaaacatggtgattcccacagtggttgatggtggagattctcaaccaatttctgtcgttgatgaagacacttattatcaatggcagggtaaaaagacttctgctcagtactatattaacaacgccggtgtatctgcagaagatgggtgcatttggggtacttctggttctgatgtcggcaactgggctccattggtgttaggtgctggttccactaatggagaaacatacttgtctttgattccaaaccccaacagtaaccaagctgccaactttaacgttaaaatagttgcatccgatggcgctaacgttcagggcagctgtgcgtatgaagatggctctttcaccggagatggttccgatggttgcacagtttctgttttatctggatctgctgaatttgttttctattga

SEQ ID NO: 5911 - DNA, 840 bp, Saccharomyces cerevisiae
atgtcaattgtttcactgttaggcatcaaagtcttaaacaacccggcaaagttcactgatccatatgagtttgaaatcacttttgaatgcttagaatctttaaaacatgacttagagtggaaactaacctatgttgggtcctctcgttctctagaccatgaccaggaattggattccattctggtaggccccgttcccgtaggtgttaataaatttgtgttttctgctgaccctccctccgccgagctgattcctgcgagtgaattggttagtgtgactgttattctattaagttgttcttatgacgggagagagtttgttagggtcggttactacgtgaataatgagtacgatgaagaagagttaagagaaaatccgccagcaaaggtacaagtagatcatattgtaagaaatatactggctgaaaagccaagggtaacaaggtttaacattgtttgggataatgaaaatgaaggggatttatacccacctgaacagcccggcgtagatgatgaagaggaggaggacgatgaagaagaagatgacgatgaagatgatgaagacgacgaagatgacgatcaagaagatggagagggagaggcggaagaagcggcagaggaggaagaagaggaggaagagaagactgaagacaacgaaacgaatcttgaagaagaggaggaagacatagaaaatagtgacggcgatgaggaagaaggagaagaagaggtggggtctgtagacaagaatgaagatggtaatgataagaagaggaggaaaatagaaggggggtccacggatattgaatccactccaaaggatgcggcacgttcaacgaattaa

SEQ ID NO: 5912 - DNA, 840 bp, Artificial Sequence
  Description of Artificial Sequence: Synthetic polynucleotide
atgtctattgtttctttattaggcatcaaagtcttaaacaacccggcaaagttcactgatccatatgagtttgaaatcacttttgaatgcttagaatctttaaaacatgacttagagtggaaattgacctatgttgggtcctctcgttctttggaccatgaccaggaattggattccattttagtaggccccgttcccgtaggtgttaataaatttgtgttttctgctgaccctccctccgccgagttgattcctgcgagtgaattggttagtgtgactgttattttattaagttgttcttatgacgggagagagtttgttagggtcggttactacgtgaataatgagtacgatgaagaagagttaagagaaaatccgccagcaaaggtacaagtagatcatattgtaagaaatatattggctgaaaagccaagggtaacaaggtttaacattgtttgggataatgaaaatgaaggggatttatacccacctgaacagcccggcgtagatgatgaagaggaggaggacgatgaagaagaagatgacgatgaagatgatgaagacgacgaagatgacgatcaagaagatggagagggagaggcggaagaagcggcagaggaggaagaagaggaggaagagaagactgaagacaacgaaacgaatcttgaagaagaggaggaagacatagaaaatagtgacggcgatgaggaagaaggagaagaagaggtggggtctgtagacaagaatgaagatggtaatgataagaagaggaggaaaatagaaggggggtccacggatattgaatccactccaaaggatgcggcacgttctacgaattga

SEQ ID NO: 5913 - DNA, 2145 bp, Saccharomyces cerevisiae
atgtcagtgaacgaccaaataactcatataggaaaaacattgtccacaacggcttccgcttttttaaactaccaaaaatcgaacagcaacactcaagatgtactgaccaataatgggccttataagaatttattatcaaataccgtcaacaatgcgagctcaacttcatacttttacaagaggactgaacacggtcgctttgtaaaaaatgcatctaacacttttgaggatatttactccaagacaagaaggggcgatgtattcaggaacaagttcacagacaacaaaacatgcttcagaatgctcacgtacataagtgatgatttgttgaacgagatcccaactaaggaaggtctcaaaagtgatgcagatggcaagcttctaaccgaaggaggcgaaaatgaaaatctcaggaagaacgcatccaaaaaagaaacatcgctgtttcagggctttaaaagctacctaccaatagcggagcttgccattgaaaacactgaaagattaaactatgatacaaatggtacaagcggtacggttggtgcgaaagatgttatgtctaaaacaaatgagcgagatgaaattcacacagagcttcctaacttccaagattcatttctcataccgcctggggtagaaactaaaaaaataagctcctcttattctcctagtgcattaaaaagtttttctcaaactcttgtaaatagtttagagtttttaaatattcagaaaaattctacgttatccgaaataagagacattgaagttgaagttgagaatctgagacaaaagaaagagaaactgttgggtaaaattgcgaacatagagcaaaatcaattactattggaagacaacctcaaacagattgatgataggttggactttttagaagagtacggattggaggtgatcgaagctaatagcgacgaaaatgcagaagatgatggtatgagtgagcgaaaggcccttaaaaatgatgctataagaaatgagggtgtcaccacagagagcatatcatcagaggcttctaatctacctccaaggagaaggcaacaacttcgagacgataactcattgaatagattaggtgccttttatagcaaatccaaaaaaagacacagaaaaagcttcccaacattccagcagctttacgagccaggaacaaaaattggctctataatgtccactcacgatgatttcctcacttgcctagattttgatgcgccctttggtaccttatgtacagccggatatcttgatcacacggtaaaaatttgggatttatccaaacaaaacaaaattggagaactagcaggacatcttgctacaattaattgtatgcaaatcaatcgtgactacggaactcttgttactggtggtagagatgcggctttaaaattatggaatttgaatttagctcaacaactttaccaggaaacgcaaaatcttacctctcctacaaatcatattgattctccatgtgttcatacatttgaggcgcatacagatgaggttactgcattatcattagatcctagtttcttggtgagtggttcacaggatagaacaattaggcaatgggacttacgttccgggaagtgcttgcaaaccattgatctgagctttgcaaatgtcttaacaacatccactaatgtcgatttatcaaagagcacacttcttactcaaagaaatgagaggcctagtataggtgcactacaaagttttgatgcagcgctagcaacgggtacaaaagatggtgttgtaaggctatgggatttaagatccggaaaggtgattcgtactttgaaagggcatacagatgccataacgtcattaaaatttgattccgcgtgcctggtcacaggttcatacgacagaacagttagaatctgggacttaagaactgggttgttgaataagtttcatgcgtacagtgcgccagttctttcgttagatctcttccaagagaacgctgcagtcgttgtcgcagacgaaccaagtgtccagatatacgatagcgaaaaggatgaaagctggtcttgcgtcgaacaaggtaacgagactagcgttagtaccgttaagtataaagaaaattacatggttgagggtcgtgaaaatggggacgtaaatatttgggccgtatga

SEQ ID NO: 5914 - DNA, 2145 bp, Artificial Sequence
  Description of Artificial Sequence: Synthetic polynucleotide
atgtctgtgaacgaccaaataactcatataggaaaaacattgtccacaacggcttccgcttttttaaactaccaaaaaagtaacagcaacactcaagatgtattaaccaataatgggccttataagaatttattatccaataccgtcaacaatgcgagctctacttcttacttttacaagaggactgaacacggtcgctttgtaaaaaatgcatctaacacttttgaggatatttactccaagacaagaaggggcgatgtattcaggaacaagttcacagacaacaaaacatgcttcagaatgctcacgtacataagtgatgatttgttgaacgagatcccaactaaggaaggtctcaaaagtgatgcagatggcaagcttttaaccgaaggaggcgaaaatgaaaatctcaggaagaacgcatccaaaaaagaaacatctttatttcagggctttaaaagctacttgccaatagcggagcttgccattgaaaacactgaaagattaaactatgatacaaatggtacaagcggtacggttggtgcgaaagatgttatgtctaaaacaaatgagagagatgaaattcacacagagcttcctaacttccaagattcttttctcataccgcctggggtagaaactaaaaaaataagctcctcttattctcctagtgcattaaaaagtttttctcaaactcttgtaaatagtttagagtttttaaatattcagaaaaattctacgttatccgaaataagagacattgaagttgaagttgagaatttaagacaaaagaaagagaaacttttgggtaaaattgcgaacatagagcaaaatcaattattattggaagacaacctcaaacagattgatgataggttggactttttagaagagtacggattggaggtgatcgaagctaatagcgacgaaaatgcagaagatgatggtatgagtgagagaaaggcccttaaaaatgatgctataagaaatgagggtgtcaccacagagagcatatcttctgaggcttctaatttacctccaaggagaaggcaacaacttcgtgacgataactctttgaatagattaggtgccttttatagcaaatccaaaaaaagacacagaaaaagcttcccaacattccagcagctttacgagccaggaacaaaaattggctctataatgtccactcacgatgatttcctcacttgcttagattttgatgcgccctttggtaccttatgtacagccggatatcttgatcacacggtaaaaatttgggatttatccaaacaaaacaaaattggagaattggcaggacatcttgctacaattaattgtatgcaaatcaatcgtgactacggaactcttgttactggtggtagagatgcggctttaaaattatggaatttgaatttagctcaacaactttaccaggaaacgcaaaatcttacctctcctacaaatcatattgattctccatgtgttcatacatttgaggcgcatacagatgaggttactgcattatctttagatcctagtttcttggtgagtggttctcaggatagaacaattaggcaatgggacttacgttccgggaagtgcttgcaaaccattgatttgagctttgcaaatgtcttaacaacatccactaatgtcgatttatccaagagcacacttcttactcaaagaaatgagaggcctagtataggtgcattacaaagttttgatgcagcgttggcaacgggtacaaaagatggtgttgtaaggctttgggatttaagatccggaaaggtgattcgtactttgaaagggcatacagatgccataacgtctttaaaatttgattccgcgtgcttagtcacaggttcttacgacagaacagttagaatctgggacttaagaactgggttgttgaataagtttcatgcgtacagtgcgccagttctttctttagatctcttccaagagaacgctgcagtcgttgtcgcagacgaaccaagtgtccagatatacgatagcgaaaaggatgaaagctggtcttgcgtcgaacaaggtaacgagactagcgttagtaccgttaagtataaagaaaattacatggttgagggtcgtgaaaatggggacgtaaatatttgggccgtatga

SEQ ID NO: 5915 - DNA, 1653 bp, Saccharomyces cerevisiae
atgaactttggaagccaaacacctacaattgtggttctaaaagagggaacagacgcatctcaaggtaaaggtcaaatcatctctaatatcaatgcctgtgttgcagtccaagaggcattgaaaccaactttaggtcccttaggttctgatattttaattgtgacatcgaatcaaaagactactatttctaacgatggtgccacgatcctaaaattattagatgtagtacatcctgctgccaaaactttagtggatatttctagagctcaggatgccgaggtgggtgatggtacaactagtgtaaccattttagctggtgagttaatgaaagaagccaagccctttttggaagaaggcatttcatctcatttgattatgaagggctacagaaaggccgtttctttagctgtggagaagattaacgaattagctgtggatattacttcagagaaaagcagtggcagagaattacttgaacgctgtgctagaactgcaatgtcgtcgaaattgattcataataatgcagatttttttgttaaaatgtgtgttgacgccgtgctatcccttgatagaaacgatttggatgacaaattaataggtattaaaaaaattccaggtggtgctatggaagaatctcttttcatcaacggtgtcgcctttaagaagacattttcgtatgctggatttgaacagcaacccaaaaagttcaacaatcctaaaattttaagtttgaatgtagaactggagttgaaagcagagaaagacaatgctgaagtacgtgtagaacatgttgaagattaccaagctattgtagatgcggagtggcaattaatctttgaaaagctaagacaagtggaagaaacaggtgccaatattgtactatcaaagttacctatcggcgatttggctactcaattttttgctgatagaaatattttctgcgctggtagagtgagcgcagatgatatgaatcgtgtcatccaagctgttggaggctctatacaatctactacttcagatataaaaccagagcatttgggtacttgtgctttgtttgaggaaatgcaaatcgggtcagaacgctacaatttattccaaggttgcccacaagctaaaacatgtacattattattaagaggaggtgctgagcaagttattgccgaggttgagagatcattgcacgatgcaatcatgatagttaagagagcgttacaaaataaactgatcgttgctggtggtggtgctacagaaatggaagtatcaaaatgcttgagagattattcaaaaaccatagctggtaagcaacaaatgataatcaatgccttcgctaaggctttagaagttattccaaggcaactctgtgaaaatgctgggtttgatgctatagaaatattaaacaaactaagattggctcacagcaaaggtgagaaatggtatggtgttgtctttgaaacagaaaatattggcgataattttgccaaattcgtatgggaacctgctttagtaaaaatcaatgctttgaacagtgccacagaggctactaacttgattttatctgttgacgagacgatcactaataaaggtagtgaaagtgccaatgctggcatgatgcctccccaaggggctggaagagggagaggtatgccaatgtaa

SEQ ID NO: 5916 - DNA, 1653 bp, Artificial Sequence
  Description of Artificial Sequence: Synthetic polynucleotide
atgaactttggaagccaaacacctacaattgtggttttgaaagagggaacagacgcatctcaaggtaaaggtcaaatcatctctaatatcaatgcctgtgttgcagtccaagaggcattgaaaccaactttaggtcccttaggttctgatattttaattgtgacaagtaatcaaaagactactatttctaacgatggtgccacgatcttgaaattattagatgtagtacatcctgctgccaaaactttagtggatatttctagagctcaggatgccgaggtgggtgatggtacaactagtgtaaccattttagctggtgagttaatgaaagaagccaagccctttttggaagaaggcatttcttctcatttgattatgaagggctacagaaaggccgtttctttagctgtggagaagattaacgaattagctgtggatattacttccgagaaaagcagtggcagagaattacttgaacgctgtgctagaactgcaatgtcttctaaattgattcataataatgcagatttttttgttaaaatgtgtgttgacgccgtgttatcccttgatagaaacgatttggatgacaaattaataggtattaaaaaaattccaggtggtgctatggaagaatctcttttcatcaacggtgtcgcctttaagaagacattttcttatgctggatttgaacagcaacccaaaaagttcaacaatcctaaaattttaagtttgaatgtagaattagagttgaaagcagagaaagacaatgctgaagtacgtgtagaacatgttgaagattaccaagctattgtagatgcggagtggcaattaatctttgaaaagttgagacaagtggaagaaacaggtgccaatattgtattatccaagttacctatcggcgatttggctactcaattttttgctgatagaaatattttctgcgctggtagagtgagcgcagatgatatgaatcgtgtcatccaagctgttggaggctctatacaatctactacttctgatataaaaccagagcatttgggtacttgtgctttgtttgaggaaatgcaaatcgggagtgaacgctacaatttattccaaggttgcccacaagctaaaacatgtacattattattaagaggaggtgctgagcaagttattgccgaggttgagagaagtttgcacgatgcaatcatgatagttaagagagcgttacaaaataaattaatcgttgctggtggtggtgctacagaaatggaagtatccaaatgcttgagagattattctaaaaccatagctggtaagcaacaaatgataatcaatgccttcgctaaggctttagaagttattccaaggcaactctgtgaaaatgctgggtttgatgctatagaaatattaaacaaattgagattggctcacagcaaaggtgagaaatggtatggtgttgtctttgaaacagaaaatattggcgataattttgccaaattcgtatgggaacctgctttagtaaaaatcaatgctttgaacagtgccacagaggctactaacttgattttatctgttgacgagacgatcactaataaaggtagtgaaagtgccaatgctggcatgatgcctccccaaggggctggaagagggagaggtatgccaatgtga
